United States Patent Application Publication US 2012/0070457 A1 - sequence listing, part 5

SEQ ID NO: 37268 - DNA, 1173 bp, Neisseria meningitidis
atgaaacgtgatttgagcaaaatgacctgcatcgaagacttgcgccgcgttgccaagcgcaaaatgccgcgtatgttttacgattacatcgattcgggttcgtggacggaaacgacttatcgggaaaatacttcggatttcaaagacatccgtttccgacaaaaagtgttggtcaatatggaggggcgcagcctcgaaaccaaaatgattgggcaggatgtgaaaatgccggtggcgattgccccgactggtttcacgggtatggcgcacgcagacggtgaaatcttggcggcgcgggcggcggagaagttcggcattccgtttacgttgtccaccatgtccatctgctcgattgaagacgttgccgagaacacttccgcaccattttggtttcagctttatgtgatgcgcgaccgcgagtttatggaaaacctgattaagcgcgcgaaggatgccaaatgttcggcattggtattgaccgccgatttgcaggttttgggtcaacgccacaaagacatcaaaaacggcctgtccgcgccgccgaaaccgaccatcgccaatttaatcaatctggcgaccaaaccggaatggtgcatgaaaatgctgaacacggaacgccgcacgttccgcaatatcgtcggacacgcgaagaacgtcggcgatttgtcttcgctgtcttcatggacttccgaacaattcgacccgcgcctgagctgggacgatgtggcgcgcattaaagatttgtggggcggcaagctgattatcaaaggcattatggaacccgaagacgcggaaaaagcagcgaaaagcggcgcggacgcattggtcgtttccaaccacggcggccgacagctcgacgataccgtgtctgccatcaaagccttgcccgacatcgtcagcgcagtgggcagcgacatcgaagtttggatggacagcggcatccgcagcggtcaggatattttgaaggcgtgggctttgggcgcgaaaggtacaatgataggtcgggcgtttctgtatggcttgggcgcgtatggagaagaaggcgtaacccgcgcgctggaaatcctatataaggaaatggatatatctatggcgtttacggggcaccgcgatattcaagatgtcgatgcctcgattttaaggggtaaagattggggcagggaaacggtttag

SEQ ID NO: 37269 - DNA, 270 bp, Neisseria meningitidis
atgctcaaacaatccatcgaaatcatcaacaaactcggacttcacgcccgtgcctccagcaaattcacccaaaccgcgtctcagtttcaaagcgaagtctgggtaacgaaaaacggcagccgcgtcaacggcaaaagcatcatggggctgatgatgctcgccgccgccaagggtacggtcatcgagctggagacggacggcgcggacgaggcggaagcgatgcgcgccctgaccgacttaatcaacgactacttcggcgagggcgaataa

SEQ ID NO: 37270 - DNA, 288 bp, Neisseria meningitidis
atgaacaaagaaatagtcggtgttttctttataccggcgggcatcatcagcatgtgtatggccgcattgtggcagatgtatgtgatgatgaccgaaacttatacgctcaaccgtttcaaagataaagaattggtttggcgcgtggcattgttgtttatcagtttcagccttgccgtttacctgctctgtccgaattcgcgtaaaaaaggcatcgtcttttttattctcgggggaggcggcgcaatcatgtatctgctggcgcggatgtggttgcctttcagtaaatag

SEQ ID NO: 37271 - DNA, 2019 bp, Neisseria meningitidis
atgaataaatctttatccagttcggtagaagaataccgcgagctgacgctccgaggcatgatactcggtgcattgatcactgtaatttttactgcgtccaatgtttacctcggtttgaaagtcgggctgacctttgcctcgtcgattccggcggcggtgatttcgatggcggttttaaagtttttcaaaggcagcaatattttggaaaacaacatggtgcagacccaagcctcggctgcgggtacgctttcgaccatcatcttcgtcctgcccggtttgctgatggcgggctactggagcggtttcccgttctggcagacgacgcttttatgtattgccggcgggattttgggggtgattttcaccattcctctgcgttacgcaatggtggtgaaaagcgatttgccttatccggaaggtgtggcggctgctgaaattttgaaagtgggcggtcatgaagaaggggataaccgtcagggcggcagcggcatcaaagagctggcggccggcggtgcgttggcgggattgatgagcttttgcgccggaggtctgcgcgtgattgccgacagcgcgagttattggtttaaaagcggtacggcgattttccagctgccgatgggcttttcactggcattgttgggcgcgggctatttggtcggactgacgggcggtatcgccatcctgttgggcatttcgattgcttggggcattgccgtgccgtatttctcctcacacattccgcagccttccgatatagaaatggcggcgtttgcgatgaagctgtggaaggaaaaagtacgcttcatcggcgcgggaaccataggtatcgcggcggtttggacgcttttgatgctgctcaagccaatggtggaaggcatgaagatgtcgttcaagagttttggcggcggtgcgcccgcaacagaacgcgctgaacaggatttgtcgcctaaagccatgattttctgggtattgtctatgatgtttattctaggcgtgtcgttttaccactttatcggcgattcgcacattacgggcggcatggcttggcttttggtggtcgtttgcacgcttttggcttccgtcatcggctttttggtcgccgccgcctgcggttatatggcgggtttggtcggctcgtcttccagcccgatttccggcgtgggcatcgtttccatcgtcgtgatttcgctggttttgctgctggtgggcgaatccggcggtttgatggcggatgaggcaaaccgcaaatttttgctggcactgactttattttgcggctcggcagtaatctgcgtggcttcgatctccaatgacaacctgcaagacctgaaaaccggctacctgctcaaagccacgccttggcggcagcaagtcgccctgattatcggctgtatcgtcggtgcgctggttatttcacccgtgttggaactgctttacgaagcctacggctttaccggcgcaatgccgcgcgaaggtatggacgcggcgcaggctttggcagcccctcaagcgactttgatgacgaccatcgcgtcgggcattttcgcccacaaccttgaatgggtctatatctttaccggcatcgcgattggcgcggtgttgattgccgccgatttggtgttgaaaaaatcatcaggcggcaaacttgccctgcccgtcctcgcggtcggtatgggcatttatctgccgccgtccgtcaatatgcccatcgtggcaggcgcggtgttggcggcggtgttgaaacacatcatcggcaaaaaagcggaaaaccgtgaaggccgtctgaaaaacgccgaccgtatcggtacgcttttcgcggccggtctgattgtcggtgaaagtctgattggtgtgattatggcgtttattattgccttctccgtgaccaacggcggctcggacgcgccgctcgcgttgaatctgcaaaactgggatgccgccgcttcttggctgggcttggcgttcttcgttaccggaatgattatttttgcacggcgcgtactgaaggcgggtaggtag

SEQ ID NO: 37272 - DNA, 606 bp, Neisseria meningitidis
atgaataccgacttccaaaacatcctcaaacaactgggcaaacaagcccaaaaagaagcggcagaaaaacaggcagccgaaaaaaacaagcaaaaacaagaacaggatttcgatttttcacaagcagtcggacaagtctccccattaaaaaaccggcagcaatattatgcgccgcccgacaaaacccccatcaaagtccgtcccaaagacaaccgcgccgacgaagaaaactacttctacatcggcagcacatacaacgacccgcccgccagcttcagcaaaaacggacagggaaaaaacgacatccaacgcctgaaaaacggatactatcccgtcgttaccgatgtcgacctgcacggctacacacaggaagaagcccaaaaagtcctcaacgaattcatcgcattcacccaaaaacgcggcgtatgcggcgaaatcatccacggcagcggattaggttccaaaggctacaaacccgttctgaaaaatatgacccgaaactggctgatgcaacaccccgacgtactcgcctacgccgaaccccgggaaggcaacgacggctgcgtccgcatcctgctcaaacgcaaattaaggcagcaagactga

SEQ ID NO: 37273 - DNA, 444 bp, Neisseria meningitidis
atgagcgaagaactgcaacccgtattcagcatcgagcgactgtatgtcaaagacttgtctttggaagtgccgcacgcgccgcaaatctttttggaacagggcgagcctgaagtggatatgcgcgtttccaccggcagccaaaagctggaagacggctactacaacgtggacgttaccgtaaccgttaccgccaagctggataacgagcgcacgatgtttttgaacgaagtaacccaaagcggcatcttccgtttggaaaacatccccgaagaagatgtgcagctgctgctgggcgtggcgtgtccgaacatcctcttcccttacgcgcgcgaagccgtttccggtacggtaacgcgcgccggcttcccgcccgtcctgctcgcgccgattaattttgaggcgatttaccaacaacagcaggaagccgaagccgccggggcttga

SEQ ID NO: 37274 - DNA, 1398 bp, Neisseria meningitidis
atgagccaaggcaaaatcgtacaaattatcggtgcggttgttgacgtggaatttccacgcgacatgattccgcgcgtttacgacgctttgaaattagacgaaaacggtctgactttggaagtccaacagcttttgggcgacggcgtagtccgtaccattgcgatgggcagctcggacggtttgaaacgcggcatgactgtgagcaataccggtgcgcccattactgtgccggtaggtaaaggtacgttgggacgcattgtcgatgtattgggaacgcctgttgacgaagcaggtccgattgataccgacaagagccgtgccatccaccaagccgcccctaagtttgacgaactgtcttccacaaccgaattgctcgaaacgggcattaaagtgattgacttgctgtgtccgtttgccaaaggcggtaaagtaggtctgttcggcggtgccggtgtgggtaaaaccgtgaacatgatggaattgatcaacaacatcgccaaagcgcacagcggcttgtccgtgttcgcaggcgtgggtgagcgtacccgcgaaggtaacgacttctaccacgagatgaaagattccaacgtattggataaagtggcaatggtttacggtcagatgaacgaacctccgggcaaccgtttgcgcgtcgcattgaccggtttgaccatggcggaatacttccgtgacgaaaaagacgaaaacggcaaaggccgcgacgtattgttcttcgtggacaacatctaccgttacaccctggctggtaccgaagtatccgcattgttgggccgtatgccttctgcagtgggctaccaaccgacattggctgaagaaatgggtcgtttgcaggagcgtattacctctacccaaaccggttctattacttccatccaagccgtatatgtacctgcggacgacttgaccgacccgtctccggcaacaacgttcgcccacttggacgcaaccgtcgtattgagccgtgatattgcctctttgggtatttacccggcagttgaccctcttgactctacttcacgccaactggatccgatggtcttgggtcaagaacactacgacgtggcgcgcggcgtacagtccaccctgcagaaatacaaagaattgcgcgacatcatcgccatcttgggtatggacgaattgtctgacgaagacaaactgaccgtaatgcgtgcgcgtaaaatccaacgcttcctgtcccaaccgttccacgttgccgaagtgtttacaggttctccgggcaaatatgtcgccctgcgcgataccattgccggcttcaaagccatcttgaacggcgaatacgaccatctgcccgagcaggcattctatatggtcggcagcatcgaagaagcggttgagaaagcgaaaaccttaaactga

SEQ ID NO: 37275 - DNA, 1110 bp, Neisseria meningitidis
atgtccttgacccgcctaatcttgaaattctatgcactgttgcgcctttttttgggcaaaaacgcccgcaccgcatggatttcgcatcccgcctgcaccgggcacgaacccggcgcaaaccatcccgattcgcccgaccgcatcctctgcatcgagcaggcattgcgccgcgccggtatttggcagcacctccaaaccatagaggcggaagaaatcagcgatacgcgcctcgcacttgtccactcgagcaaatatctgaaccgtttggaatcttgcctgccccaaaaaggcaagattttccgcctggataacgacactgcaatcagcacaggctcgctgtctgccgcacactttgccgccggttcggcagttcaggcagtcgacatggtcatgaaccgtaaagcatggcatgccttttgcgccgcccgcccgcccggacaccatgcgggcagcggcaaagccggcggattctgcctgctgaacaacgttgccgccggcgtcatgcatgccattgccgaataccgcctgaaacgcattgccgtcatcgatttcgatgtccactacggcgacggtacggcagaaatattcaaagacgatccgcgcatcctgtttttcaacctgtttgaaaccgaccttttccccttccccgaaaacaacgatatgcccgacggcggcaatatggtgcacctgcccttgccgccgggaacgggcagccgcacattccgcgaagccgtccgcagacagtggctgccccggcttgccgcattcaaacccgaactggtgctgctgtcggcaggattcgacgcacaccgtctggacgaatcgggcaggctcaacctgcacgaggcggattttgcctggctgacacacaaaatcattcagacggcatcgggctgccccggcaaaatcgtatccgtactcgaaggcggctacacccttgaacctctggcacaatctgctgccgagcatatccgcgtgctggcggggctgggcaaatccgatgccgcaaccgcctatcagaaaacactggatccaacaaaaaaacggtttgccaaaccgaaaaccggacaggtgcgccaacctacccaatccgaccgttacgacatatag

SEQ ID NO: 37276 - DNA, 525 bp, Neisseria meningitidis
atgcctatttcaatccgccgcaatctttcagacggcacggcgcgcaaaccgcttataatcacgccggacaccacacaaaggcacaatatggacacacccgtttacctttacaccgacggcgcgtgcaaaggcaatcccggcgcgggcggctggggcgtgttgatgcgctacggcagccacgaaaaagaacttttcggcggcgaagcgcaaaccaccaacaaccgcatggagctgaccgccgtcatcgaaggactgaaatcgctcaaacgccgctgcaccgtcatcatctgcaccgactcgcaatacgtcaaaaacggcatggaaaactggatacacggttggaagcgcaacggctggaaaaccgccgccaaacagcccgtcaaaaacgacgatttatggaaagaactcgacactctggtcgggcagcaccaagtcagttggacttgggttaaaggacacgcgggacacgcggaaaacgaacgcgccgacgatttggcaaaccgtggcgcagcgcagttttcctga

SEQ ID NO: 37277 - DNA, 696 bp, Neisseria meningitidis
atgatgaaggatttgaatttgagcaacagcctgttcaaaggctacaacgacaaacatggcttaatgatttgtggctatgaatggggttggagtaaagccgatgaggctgcttatgtagcaggtgaatacaaactccctgaaaacaaaatcgaccatacatttgcaaacaaatccctctatttcggagagcaggcaaaaaagtggcgttacgacaatacgataaaaaattggtttgaaatgtggggacaccccttagacgaaaatggattgggcggtgcatttgaaaaatccctggttcaaaccaactgggctgctacacagggcaacactatcgacaatcccgacaagttcacacaacccgagcacatcgataattttctctaccacatcgaaaaactgcgtccgaaagtcatcctcttcatgggcagcaggttggcggattttctgaacaaccaaaatgtactgccacgcttcgagcagttggtcggtaagcagaccaaaccgctggagacggtgcaaaaagaatttgacggtacacgtttcaatgtcaaattccaatcgtttgaagattgcgaagtcgtctgctttccccatcccagtgccagtcgcggtctatcttacgattacatcgccttgtttgtgcctgaaatgaaccggattttatcggactttaaaacaacacgcggattcaaataa

SEQ ID NO: 37278 - DNA, 267 bp, Neisseria meningitidis
atgaatcaagctgttgcacaatttgctcctttagtgttgattatggtggtgttctacttcctgatcatgcgtccgcagcaaaagaaattcaaagcgcatcaggcaatgcttgccgccttgaaagtcggcgacaaagtggtcttggcggcaggtttcaagggtaaggtaaccagagtcggcgaacagttttttaccgtggatatcggacagggtacaaaaatcgaggtcgaagtagaacgcaatgcgattgccgcaaaagtcgattga

SEQ ID NO: 37279 - DNA, 1014 bp, Neisseria meningitidis
atgcaagtctattacgataaagatgccgatctgtccctaatcaaaggcaaaaccgttgccatcatcggttacggttcgcaaggtcatgcccatgccgccaacctgaaagattcgggtgtaaacgtggtgattggtctgcgccaaggttcttcttggaaaaaagccgaagcagccggtcatgtcgtcaaaaccgttgctgaagcgaccaaagaagccgatgtcgttatgctgctgctgcctgacgaaaccatgcctgccgtctatcacgccgaagttacagccaatttgaaagaaggcgcaacgctggcatttgcacacggcttcaacgtgcactacaaccaaatcgttccgcgtgccgacttggacgtgattatggttgctcccaaaggtccgggtcataccgtacgcagtgaatacaaacgcggcggcggcgtgccttctctgattgccgtttaccaagacaattccggcaaagccaaagacatcgccctgtcttatgcggctgccaacggcggcaccaaaggcggtgtgattgaaaccactttccgcgaagaaaccgaaaccgatttgttcggcgaacaagccgtattgtgcggcggcgtggtcgagttgattaaagcaggttttgaaaccctgaccgaagccggttacgcgcctgaaatggcttacttcgaatgtctgcacgaaatgaaactgattgttgacctgattttcgaaggcggtattgccaatatgaactactccatttccaacaatgcggagtacggcgaatacgttaccggccctgaagtggtcaatgcttccagcaaagaagccatgcgcaatgccctgaaacgcatccaaaccggcgaatacgcaaaaatgtttatccaagagggtaatgtcaactacgcgtctatgactgcccgccgccgtctgaatgccgaccaccaagttgaaaaagtcggcgcacaactgcgtgccatgatgccttggattactgccaacaaattggttgaccaagataaaaactga

SEQ ID NO: 37280 - DNA, 1356 bp, Neisseria meningitidis
atgaaagcacccgaactcttattgcccgccggcggattggaaagaatgcgcaccgcctacgactacggcgcagatgccgtttatgccggcagcccgcgttattccctgcgcgcccgcaacaacgaatttgccaaactcgacgtcctcgagcaaggcattaaagaagcgcacgagcgcaacaaaaaattctttttgaccgtcaatacgctgccgcacaactccaaactcaaaaccttcgtttccgacatggagccgctgattgcgatgaaacccgacgcgctgattatggcggatccgggtttgatcatgaccgtgcgcgaaaaatggccggaaatgccgatccacctgtccgtacaggcgaacaccaccaattattggggcgtaaaattctggcagaacatcggtgtcgaacgcatcatcctgtcgcgcgaattgagtatggaagaaatcgccgaaatccgccaagaatgccccgacatcgaactcgaagtcttcatccacggcgcattgtgcatcgcttattcaggccgttgcctattgtcgggttatttcaaccaccgcgaccccaaccaaggcacttgcaccaactcctgccgttgggactacaaagtccacaacgccacggaaagcgatgcgggcgatgcccagcttctgcaaggtttcaactttgaaaaagcccaagaagaagccaaccaaaactttgaaggcatcaacggtcaaaaacgccatccctacgccgacaaggttttcctgattgaagaatccaaccgtccgggcgagatgatgccgattatggaagacgaacacggcacttacatcatgaactccaaagacctgcgcggcattgaagtggttgagaaactcgccaaaatcggcgtggacagcctcaaagtcgaaggccgcaccaagtcgctctattatgtcgcacgcgtcgcccaatcctaccgcaaagcgattgacgatgccgtcgcaggccgtccgtttgattacagcctgttgagcgaactcgaaggccttgccaaccgcggctacaccagcggcttcctcgaacgccaccaaacccaagactatcaaaactacctcagcggccattccaccgccaaacaaagccaatatgtcggccacgttaccgaaatcgacgaaaacggctgggcgaccatcgaagttaaaaaccgcttcgccgtcggcgattcgctcgaaatcatccacccgagcggcaaccaaaccatcaaattggaacaaatggcccgaaaaggccagcctgtcgatgtcgcacccggcaacggcattcaggtcaaaatccccgatatgcagggcaaagaaaaagccctcatcgcacgcgtgttgaacccctga

SEQ ID NO: 37281 - DNA, 762 bp, Neisseria meningitidis
atgaccgaattcgtcgtattgattccggcgcggctggattcgtcgcgcctgcccggaaaagccttggcggacatccacggcaaaccgatggtcgtgcgcgttgccgaacaggcggcaaaaagtaaagccgcgcgcgtcgtcgtcgccaccgaccatcccgatattcagacggtctgtcaggcgcacggcatcgaagcggttatgacttcaaaccggcacgaaagcggcacgacgcgccttgccgaagcctctgccgcgctgaagctgccgccgcatttgattgttgtgaacgtacagggtgacgagccgctgattgcccccgaactcatcgaccgcaccgccgaagtactcgtcgaaaacaacgtccaaatggcgaccgccgcccacgaattgcacgatttcgacgaattgatgaatcccaatgccgtcaaagtcgtcctcgacaaaaaccgcaacgccatctacttcagccgcgccccgattccctatctgcgcgatgcaatgcgtgccggaaaacgcgaaatgccgtctgaaaccgccgtcctgcgacatatcggcatctacgcttaccgcgccggcttcctgcaacgctatgccgaaatgagcgtttcgccgctggaaaccatcgaatcgctggaacagctgcgcgtcctgtggcacggttatcccattgccgtcgaaaccgccaaagaagcccccgccgccggtgtggatacgcaagaggacttggacagggttcgcgccgtatttcagaccgtataa

SEQ ID NO: 37282 - DNA, 1059 bp, Neisseria meningitidis
atgattacaccgcaacaggctatcgaacgattaatcagcaataacgagttgttttacgatgaaatgaccgacttgatgcggcaaatgatgagcggaaaagtgccgcccgaacaaattgcggcgattttgacaggattgcgtatcaaggttgaaaccgtttccgaaattaccgccgccgccgccgtcatgcgcgagtttgcgacaaaagtgccgctggagaatgcagaggggctggtcgatatcgtcggtacgggcggggatggcgcgaaaaccttcaatatttcgacgacttcgatgtttgttgccgcagcggcaggcgcgaaggttgccaaacacggaggccggtcggtctcttcctccagcggtgcggctgacgtggtggagcagatgggcgcaaacctcaacctgactcccgaacaggttgcccaaagtatcaggcagaccggcatcgggtttatgttcgcgcccaatcaccacagtgccatgcgccatgtcgcccctgtacgccgttcgctcggtttccgaagtattttcaacatattgggtccgttaacgaatcctgcgggcgcgccgaaccagcttttgggcgtgttccacaccgatttgtgcggcattttgtcgcgggtcttgcaacaacttggttcaaaacacgttttggttgtttgtggggagggcggtttggatgaaattacactgacaggcaaaacgcgcgttgccgaactcaaagacggaaaaatcagcgaatacgacatccgcccagaagatttcggtatcgaaacccgccgcaatttggatgaaatcaaagttgccaatactcaggaatctttgttgaaaatgaatgaggtgctggaaggaagagaaggggctgcgcgcgatatcgtattgctcaacaccgccgccgccctgtatgccggaaatgtcgctgcttcgctttcagacggcatatctgccgcacgggaagccatcgattcaggcagggccaaatcgaaaaaagaggagtttgtcggttttcaaccacaacaaagatgccattttcttggaaagatggagcttgggtga

SEQ ID NO: 37283 - DNA, 1188 bp, Neisseria meningitidis
atgactgaacactataaaacccttccggaacacgagctgctgattcagaagtctttgatcagcaatctgaatctttgggattgggtatttgccgtgctggtttttgcggctacggttttcgtacagacccgttccggtatgcatatggacatttacgaaacggtcatgttgtgggcgagtgccggtattgccgtgtttttgggttggtttttcaaaccgatgcgctggtttgttcctttaagcgtattgcttgcctatgccgccgtcggtctgtatggcggcaacatcaaatcggcagagattttcctgttgcggtatttcctcagcagccagtcggcgatcatgtggcagtgcgcctttgtctttttcgccctgttcgcctatatttcgggcgcggttttggcaagcgtaaaaaatgtgccgaccaacacgctgttgggtatgggaaccgtgtttgcatgggtgtctgccgtagcaggctttaccggtctgctggtacgttggcacgaaagctatctgctccgtcccgatgcggggcatattccggtttccaacctgtatgaagtgttcatcctgtttttggtgattaccgcgctgatgtatctttattatgaaggtaagttcgccatacagaaattgggcggcttcgtgttcggctttatggcggtcgtggttggatttgtcttgtggtacagcgtgtcccgcgaggcgcataccatccagccgctgattcccgcgctccagtcctggtggatgaaaatccacgttccggcaaactttatcggttacggcgcgttttgcatttccgcgatgctcggtattgccgaactggtttccctgcgtgcggaaggaaaaggcggaaaactgtggctgccgccgtcggcattgatcgacgaggtgatgtataaggcgattgccgtcggctttctgttctttaccattgccaccattttgggtgcgctgtgggcggcagatgcttggggacgctattggagttgggatccgaaagagacgtgggcgttcatcgtctggctcaattacgccgtttggctgcacttgcggctggttgccggttggcgcggcaaagtgctggcgtggtgggcgattatcggtttgttcgtaaccgcatttgcctttatcggcgtgaatatgtttttgagcgggctgcattcttacggaacgctttga

SEQ ID NO: 37284 - DNA, 729 bp, Neisseria meningitidis
atgcttttaggtgtcaacatcgaccacatcgctaccgtccgcaatgcgcgcggcacgacttatcccagccccgtggaggcggcactggttgccgaaacgcacggtgcggatttgattaccatgcacctgcgcgaagaccgccgccacatcaaagacgcggatgtgtttgccgtcaaaaacgccatccgcacgcgcctgaaccttgaaatggcgttgacggaagaaatgctcgaaaacgcgcttaaagtgatgccggaagacgtgtgcatcgtgcctgaaaaacgtcaggaaatcacgaccgaaggcggcttggacgtattggcgcaacaggaaaaaatcgccgggttcaccaaaatcctgaccgacgcaggcatccgagtctctctctttatcgatgccgacgacaggcaaatccaagccgcctatgatgtcggcgcgcccgttatcgaattgcacaccggcgcatatgccgatgcacacagccacgccgagcaaatgaaacaattcgagcgcattcaaaacggtgcgcattacgccagcgatttgggtttggtcgttaacgccggacacggcctgaccattcacaacgttacgccgattgcccaaatcctcgccatccgcgaactgaacatcgggcattcgctgattgcccaagccctcttcctcggactgcccgaagccgtgcgccaaatgaaggaggcgatgttcagggcaaggctgctgccgtaa

SEQ ID NO: 37285 - DNA, 1119 bp, Neisseria meningitidis
atgccggattttcaaagaattactattgaaaacatagagtattttattgtcgatagtattcaaaatttacgtgcggaagatagttttattcacaggaataacaagttatctgtttttggtggtaatggggaagcacgcaaatatgtaggtagttatattgatgatagtggtcgaaaactaagtacattttttgagtatgaaaattgggggattactgagacaaaaaatggaaggagggtagaatatcctctcattcagaaaaattgtttttttaataagaaaaatttacagcgttatttggttgatgcaaaagttgaatatcacaaacaagaacagaaatatcatcatgatatttcaaggttttatgatgattacgttttaagtattaataatctgcctacagaaaatattttcttttcaatccatgatgtatcagaccatttggaaaattctaaaggttaccgtaggggttatatccgttcggaggatgatatatggtcaatttggcgtaagattgtattgcccaaaattagttatttatcaattcttaaactattgcctgtcaaagatatagaagattcagaaccattattttatttccgaatatttttggattatcaatttcgctctatcgtgcacccgcaactcttatcaggagaaaaattagaaataccggcttcagaatttaatcaattcgtagagcaagaaatcattaaacagaaaagtagaaaagggcagcagaaatatcgcaaggatgttataaatcatatgccgcaatgtccatttacattaattacagatgagattttgttaagggctagtcatattaaaccttatatggtttgtattactgagaaaaatgagaaagaggcattagattatttaaatgggttagctttaacgccgacttatgattggttgttcaatcaaggttatattactttcttggatgatggtcgtttgatttgcggtactcgactaagccgttacacatgggaaaaacttaatatcaatccaaatgcaaaaaataagatgagaatatatcccgaaggaagagaaaaatatttggaatatcatcgcaaatttgtgtttcaggacaatatcgatgatttcttgtaa

SEQ ID NO: 37286 - DNA, 1188 bp, Neisseria meningitidis
atgaatgacttggcagctcagacaatacaagtagtaaataaatccgatgacttagtagcttcagcaatacagacagcaaataaatcaattgcagtatactgtcgttatattcgtcccaatgatgttggtactactggtagtcaccaatcaggattttatattcaaaaacatttttcagacgacctctttgatgtagtttgccaaaagggaacaaataaaactatttcaatcaaaattaattggcaagatggaagcgtcactaatagcaattttaaatattacggccaaggcacgagaaatgaggcgagaattacgggttttggcaagaattttgaatttttaagtgataaatatagtggttccttattggtattgtgcagagcttgttataaagatttattattccatgcttttgttttatcttcagatgaagatattgaaatatttatcgcagaaactaacattttaccaggaagtttatatttacctaaaaaacaagaagtagaggataacctaacaaaattattttcactatttcctaacttccccaaaactgaagaaatggcagttttggcaagggaaaatattgcattaaataaaactaacgttagtaatgtgttaaaacaatgggtttcaaaggaatatgaattattttccatttttgaaaaacgtgaatttgaaattattaaatcaaaaattactgatttggatagcttcattaattttgcacattcttttacaaatcgcagaaaagcaagagcaggaaaatctttagagttacatttatcaagaatatttgacgaattttccttaaaatttgagacgcaagcgaagacagaagggaaaaagaaaccagattttttatttcctggaagtgaagagtaccatgcgatggatgaatcagggaatttcatatttcaaactgaaaagctgacaatgctaggttcaaagactacttgtaaggatcgctggcgccaagttttaaatgaagcagatcgaattcctcataagcatttatttactctacaagaaggtatatctgatactcaaattcaggaaatgagtgatgagaatttaaccttagttgtccctaaagaatccgtaaaaacatttggaacttttgggaaaacccatgttttaactttagaaaattttattaaatatataaagtctcagcaggttagttaa

SEQ ID NO: 37287 - DNA, 327 bp, Neisseria meningitidis
atgaacttcaaacgccttctcttgaccgccgccgcaaccgcactgctgagcatttccgcccccgcgctcgcccaccacgacggacacggcgatgacgaccacggacacgccgcacaccaacacagcaaacaagacaaaatcatcagccgcgcccaagccgaaaaagcagcgttggcgcgtgtcggcggcaaaatcaccgacatcgatctcgaacacgacaacggccgtccgcactatgatgtcgaaatcgtcaaaaacggacaggaatacaaagtcgttgtcgatgcccgtaccggccgcgtgatttcctcccgccgcgacgactga

SEQ ID NO: 37288 - DNA, 300 bp, Neisseria meningitidis
atgaaaatatttgaaaatatagaagatgttaaagccatccgtaaaaagaccgggctgaaccagatagacttctggggcaaggtcggcgttacccagtccggaggatcgcgctacgaaaccggccgcaaaatgcccaaacccgtacgcgaactgctccgcctcgtccatatcgaatgcatcgatttggcgaaagtcaacaaaaaagatatggaaatcgccgccctgttgaaaaaacaccatcccgacctgtatgccgagttgtccaaacagaccaagtccgaaagaaaaaaacaaagttaa

SEQ ID NO: 37289 - DNA, 330 bp, Neisseria meningitidis
atgtcattacccccatgcccacaatgcgcctccgaatacacctatgaagacggcggacaatacatctgccccgaatgcgcccacgaatggaatgaaaccgaatccgccgccgaccttgcggctcaagtgcgcgatgccaacggcgcggcactgcaaaacggcgataccgtcatcctcatcaaagacctcaaggtaaaaggcagctcgatggtgatcaaacaaggtacaaaagtcaaaggcatacgcctgcaggaaggcgatcacaacatcggctgcaaaatcgacggcagcgcgatgaatttaaaatccgaattcgtcaaaaaagcctga

SEQ ID NO: 37290 - DNA, 906 bp, Neisseria meningitidis
atgcttaccttccaacaaatcatcttcaaactgcaaacattctgggcagacaaaggctgcaccgtcatccaacccttcgacatggaagtcggtgcaggtacttcccatcccgccacctgcctgcgcgcgctcgggcccgagccttggtttgccgcctacgtccaacccagccgccgccccaaagacggccgctacggcgacaaccccaaccgcctgcaacactattaccaattccaagtcgccctcaaacccgcccccgccaatatccaagacctttatctcgactccctgcgcgaattgggcatcgaccccaaagtgcacgacatccgctttgtcgaagacgactgggaaaaccccaccctcggtgcgtggggtttgggctgggaagtctggctcaacggtatggaagtaacccagttcacctatttccaacaagtcggcggcatcgactgcacccccgtactcggcgaaatcacctacggcatcgaacgcttggcgatgtacctgcaaggcgtggaaaacgtctatgacctcgtttgggcaaaaacgctggacggtaatacagtaacttacggcgacgtgtaccaccaaaacgaagtcgaacaatccacctacaacttcgaatacagcgatgccgattggctgctgcgccagttcaacgactacgaagcgcaagccaaacgcctgcttgccgaagaaaacgccgccctcgccttgcctgcctacgagctggttctcaaagcggggcatacgttcaatcttttagacgcacgcggcgcgatttccgtaaccgagcgggcaacttatattggacgtattcgtgcattgagccgcgccgtggcgcaaaaatatgttgaaagccgcgaaaaactgggcttccctttaatgaaggcaaacgccgcctaa

SEQ ID NO: 37291 - DNA, 1662 bp, Neisseria meningitidis
atgacagaatccatcacccgcgacagtatgcaatacgatgtcgtgattgtcggcgcaggcccgtcgggtttgtccgccgccatcaaactcaagcagcttgccgaaaaaaacgggcgcgaaatcagcgtttgcgtggtggagaaaggttctgaagcaggcgcgcattcgctggcgggcgcggtcattgacccgattgcgctgaatgagttgattcccgactggaaagaaaaaggcgcgccgctgacgcgcacggtaacgcaggacaaggtgttgttcctgactgagaaaaaagcgttcaatctgcctattaccccaaatttcgacaatcacggcaactacatcgtcagcttgggcgaagtcgtgcgctggttggcggagcaggcggaaaatttgggcgtggaaatttatccgggctttgccgccgccgaagtgctgtatcacgaagacggttcggtcaaaggcattgcgaccggcaatatgggcattggcaaagacggcgagccgaccgacagtttccagcccggcatggagctttgggcgcagcaaactctgtttgccgaaggttgtcgcggttcgctttccaaacaagtcatcgaacgtttccaactcgaccaaaacagccagccgcaaacttacggcttgggcatcaaagaaatttgggaagtgccgtctgaaaaacatcagcccggcttggtggtgcacagcgcgggctggccgctggacagcaaaacctacggcggcgcgtttgtttaccatttcgatgacaacaaagtcgccgtcggtttcgtggtcggtttggactatcaaaacccttatctgtcgccgtttgaagagttccaacgtttcaaaacccatcccgaaatccgcaaaacctttgaaggcggccgccgcatcgcttacggcgcgcgttcgctgattgaaggcggtttgcaaagtttgccgaagctctcgttcaaaggcggcgttttaatcggcgacgcggcaggcttcctcaatatgccgcgcatcaaaggcattcataccgcgatgaaatccgccatgctcgccgcagaagccgtgttccccttgttggaaaaccttgaagaagtggaaaacttcgacagcggcaaagaggcggcggattatcagcaacgttttgaacaaagctggctgtatcaagagctttacgccgcgcgcaatgtccgtccgtcattcaaatggggcgtttacctcggctcaatctacaccggcatcgatcagatgattttcagaggcaaagccccgtggaccttgaaacatcacggcaaagacaacgagcagctcaaaaaagccgccgcgtgcaagccgattgattatccgaaacccgacggcgtgttgaccttcgaccgcttgagcagcgtcttccttgccaatctcgcgcacgaagaaaaccagcccgaccatttggtgctgaacaatccgcaaacgatgatagacgtgaactacaaagaatacgcctcgcccgaaacgcgctattgtccggccggcgtgtacgaaattgttgaagaaaacggcaatccgcgcctgcaaatcaacgcggcaaactgcgtgcactgcaaaacctgcgacatcaaagacccgacgcaaaacatcacttggatttgccccgaaagcgcgagcgggccgaattacggcgggatgtaa

SEQ ID NO: 37292 - DNA, 2751 bp, Neisseria meningitidis
atgctgacaaacattgccaagaaaatcttcggcagccgcaacgaccgcttgctgaaacaataccgtaaatccgttgccagaatcaacgcgctcgaagaacagatgcaagccctaagcgatgctgatctgcaagccaaaactgccgaattcaaacaacgcctcgccgacggtcagactttggacggcattttgcccgaagccttcgccgtctgccgcgaagcgtcccgccgcaccctcggtatgcgccacttcgacgtgcagcttatcggcggtatggtgctgcacgacggcaaaatcgccgaaatgcgtaccggcgaaggcaaaaccctggtcgccaccctcgccgtctatctcaacgcgctggccggcaaaggcgtacacgtcgttaccgtcaacgactacctcgcctcacgcgatgcgggcattatggagccgctctataatttcctcggtctgaccgtcggcgtgattatttcagatatgcagccgttcgaccgtcaaaacgcctatgccgccgatatcacctacggcaccaataatgaattcggcttcgactacctgcgcgacaatatggttaccgaccaatacgacaaagtgcagcgcgaattgaattttgccgttgtcgatgaagtggattccatcttgattgacgaagcgcgcactccgctgattatctccggtcaggcggatgacaacatccagttgtaccaaatcatgaacaccgttccgccccacctcgtccgtcaagagacagaagaaggcgaaggcgactattgggtcgacgaaaaggcacatcaggtcatcctgagcgaagcaggtcacgaacacgccgagcaaatcctgacccaaatgggattgctggcagaaaacgactccctctattccgccgccaatatcgccctgatgcaccaccttatggcggcattgcgcgcgcattccctcttccacaaagaccaacattacgtcatccaagacggcgaaatcgtcatcgtggacgaattcaccggccggctgatgtccggccgccgctggtcggagggtctgcatcaagccgtcgaagccaaagaaggcgtggaaatcaaacgcgaaaaccaaacccttgcctccatcaccttccaaaactatttccgcctgtacaccaagctctccggcatgaccggcacagccgataccgaagctttcgagttccaaagcatctacaacctcgaaaccgtcatcatcccgaccaaccgccctgtacagcgcaaagacttcaacgaccagattttccgttccgccgaagaaaaattcgaagccgtcgtcaaagacatcgaagaatgccacaaacgtgggcagcccgtcctcgtcggcaccaccagcatcgaaaactccgaactggtctcccaccttctgcaaaaagccggactgccgcacaacgtcctcaacgccaaagaacacgaacgcgaagccctgattgtcgcccaagccggcaaagtcggcgcgattaccgttgccaccaatatggcgggacgcggtacggacatcgttttaggcggcaacctgaagcaccaaaccgatgccatccgtgccgacgaaaccttgagcgacgaagagaaacaggcacaaatcgccgcactcgaaaacggctggcaggcagaacacgataaagtaatggaagcaggcggcctgcacatcatcggtacggaacgccacgaaagccgccgtatcgacaaccaattgcgcggacgttccggccgtcagggcgaccccggatccagccgtttctacctttcgtttgaagacccgctgctgcgcttattcgcactcgaccgcgccgccgccatcctcaaccgtctcgcccccgaacgcggcgttgccatcgaacacaacctgctgacgcgccaaatcgaaggggcgcaacgcaaagtcgaaggcagaaacttcgatatgcgcaaacaggttttggaatacgacgacgttgccaacgaacagcgcaaagtcatttacagccagcgcaacgaaattctgaccagcaaagacatcagcgacctgatgcaggaaatccgttctgatgtcgtcagcgacctcgtggatacctatatgcctcccgacagcatggaagaacaatgggacatcccgactttggagaaccgtctggctgccgaattcagactgcacgaagacatccaatcctggctgaaggcggacaatgcgattgacggtcaagacatcaaagaacgcctgatcgaacgcatcgaaaacgaatatgccgccaaaaccgaactggtcggcaagcaggcaatggccgatttcgagcgcaacgtgatgttgcaggtcatcgacaaccaatggcgcgaacacctcgccgctatggactacctgcgacaaggcatacacctgcgcagctatgcccaaaaaaatccgaagcaggaatataaacgtgaagcctttaccatgttccaagacctgtggaacggcatcaaattccatattgcctccctgcttacctcggttcaaatcgaacaaaaccctgtcgcggtggttgaagagcaacccatcggcaacatccaatccatccattccgaatcgcccgatatggaagaacttttgggtcagtcgcaaaccgatctggttaccgaagcctttaatcccgatggaacggatttcagccccgaagccttggaagcgcggggacaaatcgtccaccgcaacgacccctgcccctgcggcagcggtttgaaatacaaacaatgccacggcaaactggcttga

SEQ ID NO: 37293 - DNA, 273 bp, Neisseria meningitidis
atggcaagtaaaaaagcaggcggcagcacccgcaacggtcgcgattcagaagccaaacgcttgggcgttaaagcctacggcaacgagctgattcccgcaggttccatcatcgtacgccaacgcggtaccaaattccacgcaggcgacaacgtaggtatgggcaaagaccacactttgttcgccaaagttgacggttatgtcgaattcaaaaccaaaggcgcgctgaaccgtaaaactgtcagcatccgtccttacactggttctgaagaataa

SEQ ID NO: 37294 - DNA, 1200 bp, Neisseria meningitidis
ttgcccacttttccgaaccacaccatgcacaccatttcctttccaaaccgcacccgactcaccgccctgccgcccctgtcgctttacatccacatcccgtggtgcatcaaaaaatgcccgtattgcgacttcaattcccacagcctgaaaaacggattgcccgaagccgcctatatcgacgcgctgctgaccgatttgcagcttgaattgcccaatatttggggcaggccggtggaaacgatctttttcggcggcggtacgcccagcctgtttcaggcggaatcgattgaccgtttgttaagcggcgtgcgttcgctgttgcgcttgcagccggaagcggaaattaccttggaagccaatccggggacatttgaaatcgagaagtttcaaggatttaaagacgcaggcatcacgcggctttctattggtgtacaaagcttcaacgacgatatgctctcaaggctggggcgcgtccacaacggtaaagaagccttaaccgccatagctactgccttgaaattatttgataaaatcaatatcgacttgatgtacgccctgccgaaccaaaccgttcggacggcattggatgacgtacaaaccgccatcgccacgggcgcaacccacatcagcgcgtatcacctgacgatggaaccgaacacgccgttcggacacacgccgccgaaaggtttgccgcaagacgaagccgccctcgacatcgaagacgcggtacacggcgcgctggaaagcgcgggttttgtccactacgaaacatcggcttttgcgaaaccagccatgcagtgccgccacaatttgaactactggcagttcggcgattatttaggcataggcgcgggcgcgcacggcaaaatttcctatcccgaccgcatcgagcgcaccgtccgccgccgccaccccaacgactacctcgccttaatgcaaaaccgaccgagcgaagccgtcgaacgcaaaaccgtcgccgccgaagatttgccgtttgagttcatgatgaacgccctgcgcctgaccgacggcgtacccgccgcgatgttgcaggaacgcacgggcgtaccgagtgccaaaatcatggcgcaaatcgaaacagcaaggcaaaaaggcctgctggaaaccgaccctgccgtattccgcccgaccgaaaaaggacgcttgtttttaaacgatttgctgcagtgttttttatag

SEQ ID NO: 37295 - DNA, 312 bp, Neisseria meningitidis
atgcaaaaccatccgtttgctagtcaacctgccgtatatattttggcaaacggtaaaaacggaacactctatatcggcgttaccatgaatttgccggaaagagtttggcagcacaaaaaccatgtcaatattgatggctttactgcccgatatgatgtgcatgatttggtttggtatgagttttttgagaatatgcctgaagcagttgccaaagaaaaaacgatgaaaaaatggcgacgtgaatggaagattaaattgattgaagaacaaaatcccgaatggttggacttgtcgggcgtgttgtttgtttag

SEQ ID NO: 37296 - DNA, 306 bp, Neisseria meningitidis
atgaacatcgaacaagtccacatcgaagtcatgcacgcccggctgaccgtcaacacaccggcagaagaaaaagacacactgttgcaggcagtcggaatgctcaacggcaaagccgaagccatccgcgaaggcggacgcgtcgcggacagcgaaaaaatcgtcattatggccgcgctcaacgtcgtccacgacctgttgaaaacctccctgaacggcggcgatttggcaatcggcgattttgcgcgtaaaatagccgatatggacaacgcctgccaaaaagcactatcccgcttggcgcaggaataa

SEQ ID NO: 37297 - DNA, 1155 bp, Neisseria meningitidis
atgaaatttaccaagcaccccgtctgggcaatggcgttccgcccgttttattcactggcggctctgtacggcgcattgtccgtattgctgtggggcttcggctacacgggcacgccggatctgcccggtttttactggcacgcgcatgagatgatttggggttatgccggcctcgtcgtcatcgccttcctgctgaccgccgtcgccacttggacggggcagccgcccacgcggggcggcgttctggtcggcttgactgtcttttggctggctgcgcggattgccgcctttatcccgggttggggtgcgtcggcaagcggcatactcggtacgctgtttttctggtatggcgcggtgtgcatggctttgcccgttatccgttcacagaatcaacgcaactatgttgccgtgttcgcgctgttcgtcttgggcggcacgcatgcggcgttccacgtccagctgcacaacggcaacctaggcggactcttgagcggattacagtcgggcttggtgatggtgtcgggttttatcggtctgattggtacgcggattatttcgttttttacgtccaaacggttgaatgtgccgcagattcccagtccgaaatgggtagcgcaggcttcgctgtggctgcccatgctgaccgccatgctgatggcgcacggcgtgatgccttggctgtcggcggctttcgcgtttgcggcaggtgtgatttttaccgtgcaggtgtaccgctggtggtataaacccgtgttgaaagagccgatgctgtggattctgtttgccggctatctgtttaccggattggggctgattgcggtcggcgcgtcttatttcaaacccgctttcctcaatctgggtgtgcatctgatcggggtcggcggtatcggcgtgctgactttgggcatgatggcgcgtaccgcgctcggtcatacgggcaatccgatttatccgccgcccaaagccgttcccgttgcgttttggctgatgatggcggcaaccgccgtccgtatggttgccgtattttcttccggcactgcctacacgcacagcatacgcacctcttcggttttgtttgcacttgcgcttttggtgtatgcgtggaagtatattccttggctgattcgtccgcgttcggacggcaggcccggttga

SEQ ID NO: 37298 - DNA, 1770 bp, Neisseria meningitidis
atgaccgtacagaccaagacaaaaggtttggcgtggcaagaaaaaccgctatccgacaacgaacgtctgaaaaccgaaagcaattttttacgcggcacgattttggacgatttgaaagacccgctcacgggcggcttcaaaggcgacaacttccaactcatccgcttccacggtatgtatgagcaggacgaccgcgacatccgcgccgaacgcgccgaggcaaaactcgagcccttgaaatttatgcttttgcgctgccggctgccgggcgggatcattaaaccgtcccaatggatagaactggacaaatttgcccgggaaaacagtcattaccgctccatccggctgaccaaccggcaaaccttccaatttcacggcgtgccgaaagccaagttgcagacgatgcaccgcctcttgcacaaactgggtttggattccatcgccacggcggcggatatgaaccgcaacgtgctttgcacgtccaacccgatcgagtccgaactgcaccggcaggcttacgaatacgcgaaaaagatttccgaacacttgctgccgcgcacgcgcggttatctggatgtttgggtggacggcaaaaaagttcaaagttccgacgacttccttcaagaagacgagccgattttgggcaaaacctatctgccgcgcaaattcaaaaccgcagtcgtcatcccgcccttaaatgatgtggactgctacggcaacgacttggattttgtcgccatttcagacggcaacggacagcttgccggattcaatgttttggcgggcggcgggctttcgatggaacacggcaacaccaaaacctatccgaacatttcactggaactgggtttcgtgcctccggaacacgcgctgaaggccgccgaagcggtggtaaccacacagcgcgacttcggcaaccgcagcgaccgcaaaaacgcccgcacccgctacaccattcaaaatatgggcttggacaacttccgcgccgaagtcgaacgccgtatgggtatgccgttcgaacccatacgcccgttcaaatttaccgggcgcggcgaccgcatcggctgggtaaaaggcatagacggcaactggcatttgacccttttcatcgaaagcggccgtttggttgacgaaggcgggaaacagcttctgaccggcgtgttggaaatcgccaaaatccacaaaggcgatttccgcattaccgccaaccaaaacctcatcgtggcaaatgtcgccgaagcagacaaagcaaaaatcgaagaacttgcccgaacatacggattaatccgcaacgatgtcagcaaactgcgcgaaaatgcgatgtcgtgcgtttccttcccgacctgcccgctggcaatggcggaagccgaacgcgtgctgccggacttcatcgacgagctggataagattatggcgaaacacggcacgtcggacgactacatcgttacccgcattaccggctgccccaacggctgcggacgggcaatgttggcggaaatcgggctggtcggcaaagccgtcgaacgctacaacctccatatcggcggcgaccgtgaaggcgtacgcatcccccgcctttataaagaaaacatcaccctgcccgaaatccttgccgaattggacgacctgatcggcaaatgggcggcagaacgcaatatcggcgaaggtttcggcgatttcgccatacggacgggcatcgtcaaacccgtattaaatgcacccgttgatttttgggacgtatccaaagccgtcgcgattgcccgcgcctga

SEQ ID NO: 37299 - DNA, 627 bp, Neisseria meningitidis
atgaacgttaatgttatcaaccatccgctcgtccgccacaaattaaccctgatgagggaggcggattgcagcacctacaaattccggacgcttgccatcgagctggcgcgcctgatggcatacgaggcaagccgtgattttgaaatcgaaaaataccttatcgacggatggtgcggtcagattgaaggcgaccgcatcaagggcaaaacattgaccgtcgttcccattctgcgtgcaggtttgggtatgcttgacggcgtactcgacctgattccgactgccaaaatcagcgtagtcggactgcagcgcgacgaggaaacgctgaaacccgtttcctacttcgagaaattcgtggacagcatggacgaacgtcctgccctgattatcgacccgatgctggcgacgggcggttcgatggttgccaccatcgaccttttgaaagccaagggctgcaaaaacatcaaggcactggtgctggttgccgcgcccgagggtgtgaaggcggtcaacgacgcgcatcccgacgttacgatttacaccgccgcgctcgacagccacttgaacgagaacggctacatcatccccggcttgggcgatgcgggcgacaagattttcggcacgcgctaa

SEQ ID NO: 37300 - DNA, 423 bp, Neisseria meningitidis
atgaaaaaaatgttcctttctgctgtattgcttctgtcggctgccgcccaaacggtgtgggcggatacggtgttttcctgtaaaacggacaacaacaaatatatagaagttcaaaaaatcaaccgcaatctttacgaatattcgttcggcagtgcggcaaaaaaagaaattgccatacgcaacagcaaagctgacctgttggggcgttccgacaggtggcaaggcatgggtagcggacgccgggcaacgatgaaattccaaaacggcgaatttatgtacaccgtatggacgggcttcgattccgtgactcatacggaaagcagcggtgttgttgtggagcgtaggggcaaggaagtcgcacgggttggctgtacgccgcaaaccgcgcaggcgaatttcaacgatgctgatttttcccggtaa

SEQ ID NO: 37301 - DNA, 1221 bp, Neisseria meningitidis
atgttttcctactacgaaaccttccacgaaacggaagcgttgcaggacgacctgctccgtcaggcggcattgtacgtcgcccccgattccaaacccgaaactttgcccgagggcgacggcgatacgcgtattttggtacagatgccgcagcaggaagaccctgttgtcagcctgcctgcgcatctggcggacggtctgcacacgcttcaggcggacggggacgacgattattaccgcgtctatatccgcacgaccgaacagggacggattgccgttatgcaggaaaacgaataccgtgaagatttggcggcggatgcggcacggcaaagcgtgttgcccctgctggcggcactgccgctgatgatactgctgaccgtgtggattacgcacaaagccatgcgccccgtccgcaaattgtcgcaaagtctcgaacaacgccgaatcaatgacctgtctgctttgagtgtggacaatattcccagtgaaatcagagggttcgtaaccgccatcaacctgcttttgaaacgtgcggatgaagacatccgccaccgtcagcggtttgtcgccgacgcggcacacgaattgcgtacgccgatgacagccctttcccttcaggcggaacggctcaacaatatgtcgctcccacccgatgcagcgcggcagcctgccgttttgcagcagagcatcaggcgcaacaaacacctgctcgaacagcttttggcactggcgcgttcgcagtcggacgaaacccctctgacgaaaacgacattcggtctgcaaagccgtttccgccaagtgttgcaggaactgatgccgctggctttggaaaaacgtcaggacatcggtgtggcggtcagaggcgatgtcgaagtgtctgccgacgaaacagaaatctatacgctgattaaaacctttgccgataacgcggtacgttacacgccgcctgaaggcaggatagatttgggtttcacagacgaagggaaatatcttgccgtgtgggtggaagataacgggaacggcattcccgaatccgaacgcgcccgcgtcctcgatccgttttaccgtattttgggaacggagcagcaggggacggggctgggtctgtccatcgccgacacgcttgccaaaaaatacggcggacatttggaactgaccgacagccgacgtttcggacacggtctgttgatacgggcgttgttggacaaggaaaccctgaaatag

SEQ ID NO: 37302 - DNA, 285 bp, Neisseria meningitidis
atgttcggcggtcgtctgaaaaacgctccatccattaccgccaaacactttttgaaggaaaatatcatgaaatttattaacacctgccgtaaatacggcgcaaaactggctgttgtaacagctgctcccctggctttggccgcacatgcaaatgcaacgttgcccgatacagcaaaaaacgctttggaagccgcaaaagcggacggtatggaagccggttggattgtagtgggcgttttcgccgcgctttttgtcttttccatcgttaagagagtgatgaagtaa

SEQ ID NO: 37303 - DNA, 186 bp, Neisseria meningitidis
atggaaagcatgtttatattggtgcccatcagcattattttggcgtttgtcatcggctggtttttttggtggtcgggcaaaaacgggcagtttgacgacttggaagggccggcgcaccgcatcctgatggatgatgattcgacaagtaaactgattgaaaaagagagggaaaacgatgtacgctaa

SEQ ID NO: 37304 - DNA, 567 bp, Neisseria meningitidis
atgttattgcaaaacatccttccattcgcccattgccttttgcggaaggcacttcccgaaggtggcaatgctttggacggcaccgccggcaacggacacgacacccttttcctcgcacaaaccgcaggcatccgggggaaagtgtgggcattcgacatccagccgcaagccctgagccgcactcgatgccgtctgaaagaagcgagatacgagaatgtgcaactcatcttagacggacacgaaaacctgaaacaatatgtttcagaaccactaaatgccgccattttcaatttcggctggctgcccggcggggacaaaagccttaccacccgcacggaaaccagcattgccgccctttctgccaccttatccctactgaaagaaaacggtatgcttattgccgtcctctatccgggacacgaaaacggcaaacaggaggcagaagcaatcgaacaatgggcaaaaaacctgcctcaagaacagtttgccgttttgagttacggctttaccaaccggaaaaacaacccgccctatctgttggcatttgaaaagttacgtcaaaaataa

SEQ ID NO: 37305 - DNA, 708 bp, Neisseria meningitidis
atgaatgcagccatcgaacacgtccaagccgtcgccttcgatttggacggcacactgtgcgattccgtccccgaccttgccgccgccgcagaagcgatgttggaacaactcggtatgaaaccgctgcccgccaaagtggtcgaaagctatgtgggcgacggcatcggcaaactggttcaccgcgtcctcaccaacgaccgcgaccgcgaagccgattccgaactgtgggaaaaaggtttcgtatcctatatgaaatactaccgcgaccatttgagcgtcttcacccgcccctatcccgaaaccgaagccgggctggcattgctcaaatctttgggcatcccgctggcagtcattaccaacaaaaacgaaatccttgccgtcgaactgttgaaacagctcggacttgccgactacttcagcctgatactcggcggcgacagcctgcccgagaaaaaacccagccccctgccgctgcggcacgccgccgaagttttgggtatcgatgttgcaaacatggttatggtcggcgactcgcgcaacgacatcatcgccgccaaagccgccggctgcctgagcgtcggcgttaccttcggttacggcgatatgacgctgctctcgcaagacgatgcgacccgccccgactggattatcggctcgctgcccgaaatttacgacaacctgcaacctcagaaaaacaaagaagagtag

SEQ ID NO: 37306 - DNA, 642 bp, Neisseria meningitidis
atgaaagcctttaccaaaattaccgccatcgtcgccccgctcgaccgcagcaacgtcgataccgacgccatcatccccaaacaatttttaaaatccatcaaacgcagcggcttcggccccaatgcctttgacgaatggcgttacctcgaccacggcgaaccaggcatggacaacagcaaacgcccgttgaaccctgatttctcgctgaaccagccgcgttaccaaggcgcgcaaatcctgttgacgcgtaaaaacttcggttgcggctcttcacgcgaacacgccccttgggcattggacgactacggcttccgcgccgtcatcgcccccagcttcgccgacatcttcttcaacaactgctacaaaaacggccttttacctatcgtgttgaccgaagaacaggttgaccggcttttcaaagaagttgaagccaacgaaggctatcagctctccatcgaccttgccgaacaaaccctgaccacaccaagcggcgaaacattcacattcgacattaccgaacaccgcaaacactgcctcttaaacggcttggacgaaatcggactgaccctgcaacatgccgatgaaattcacgcctttgaagaaaaacgccgccaaagccagccttggctgtttaacggttaa

SEQ ID NO: 37307 - DNA, 411 bp, Neisseria meningitidis
atgacaacttataccattccaaaaaaagattatcaatttctgtatatatatgagggcactctattaaactatactttgaaaaacgatgaattccatatcatcgtccagaatgtggattatccggactttcctcaagagatccctatgcccaattattcagaatgggtaaaaattaaattcaagcagttcagctatctgaaatttatctatggatacgccacgaagaaccaagataaaaatatcaaaaatgtattggaacttggagaattaaagcaggatgatgaaatcttggattatggaggtgcgctggaagtgataggcggtaggtatgatcttccgaccggttttagtatagatatagtttgccgggaaatagagttagaatttttagatcaggagagttttaattaa

SEQ ID NO: 37308 - DNA, 2058 bp, Neisseria meningitidis
atgcccgaacaaaaccgcatcctctgccgcgaactaagcctgctggcattcaaccgccgcgtgttggcgcaggcggaagaccaaaacgtcccccttttggaacgcctgtgcttcctgtgcatcgtttcatccaacctcgacgagtttttcgaagtccgcatggcgtggctcaaacgtgaaaacaagctgcacccccggcgcaggctggacaacggcaaaatgccgtctgaaaccatcgccgacgttaccgaagcggcgcgctccctgatacggcaccagtacgacctgttcaacaacgtccttcagcccgagttggcgcgggaaggcatccatttttaccgccgccgcaattggacagacacacagaaaaaatggattgaagactattttgaccgtgagttgttgccgattctgacccccattggccttgacccgtcccaccccttcccgcgaccgctgaacaaatcgctcaacttcgccgtcgaactcgacggcacggacgcgttcggcaggccttcggggatggcgattgtgcaggcaccgcgcatcctgccgcgcgttgttcccctgccgtccgaactgtgtggcggcggacacggcttcgtcttcctgtcgtccatcctccacgcccacgtcggcaaactcttcccgggcatgaacgtcaaaggctgccaccagttccgcctcacgcgcgacagcgacttgaccgttgacgaagaagacgtacaaaacctccgcgccgccattcaaaacgagttgcacgaccgcgaatacggcgacggcgtgcggctcgaagtcgccgacacctgtcccgcctacatccgcgactttctgctcgcgcaattcaaactgaccgccgccgaactctatcaggtcaaaggcccggtcaacctcgtgcgcctcaacgccgtccccgatttggttgaccgtcctgatttaaaatttccgccccatacacaaggcaggttgaaagccttgggtaaaaacggctcgatattcaaactgatacgccgtgcacccatcctgctgcaccacccctaccaatccttcaatcccgttgtcgaaatgatgcgcgaagccgccgccgaccccgccgtgcttgccgtcaaaatgacgatttaccgcaccggcacgcgttccgaactcgtccgcgccctgatgaaggcggcactcgccggcaaacaagtaaccgtcgtcgtcgaactgatggcgcgttttgacgaagccaacaacgtcaactgggcgaagcagctcgaagaggcgggcgcgcacgtcgtgtacggcgtgttcggctacaaagtccacgccaagatggcactggtcatccgccgcgaagacggcgtactcaagcgttacgcccacctcggcacgggtaactaccaccaaggcacatcgcgcatctacaccgacttcggcctcatcacagccgacgaacaaatcaccgccgatgtgaacacattgtttatggaaatcacaggcttgggcaaacccgggcggctgaacaaactctaccaaagcccgtttaccctgcacaaaatggttatcgaccgcatcgcacgcgaaaccgaacacgcaaaagccggcaaaccggcgcggattaccgccaagatgaattcgctcatcgaaccgaccgtcatcgaagccctgtatcgggcaagcgcggcaggcgtacaaatcgatttgattgtgcgcggtatgtgcaccttgcgcccgggtgtaaaaggcttgtccgaaaacatccgcgtccgctccatcatcggcaggcagctcgaacacgcgcgcgtgtattgcttccacaacaacggcgcggacgatacctttatctccagcgcggattggatggggcgcaacttcttccgccgcatcgaaaccgccgcgccgattaccgcgcccgaactcaaaaaacgcgtcatccgcgaaggtttggaaatggcattggcagacaatacgcacgcgtggctgatgcagcccgacggcggctatatccgcgccgcacctgccgagggcgaatccgaagccgacctgcaaaacgatttgtggacactgctcggaggctga

SEQ ID NO: 37309 - DNA, 732 bp, Neisseria meningitidis
ttgttaatccactatactttatgccgctaccgcaactggctggcgcaagacgacaccctgtccgaattgctggaactgattaaccgacaactgaccgaaaaaaacctaaaagtagagaaagcatccgccgccgtcattgacaccaccattattcagaccgccggcagcacacagcgtcaggctatagaagtcgatgaagaaggacaagtcagcggccaaaccacaccgagtaaggacagcgatgcccgttggatcaagaaaaacggcctctacaaactcggttacaaacaacatacccgtaccgatgcagaaggctatatcgagaaactgcacattacccccgccaatgctcatgagtgcaaacacctgtcgccgttgttagaagggatagctgaaggtacgaccgtctatgccgacaaaggctatgacagtgcggaaaaccggcaacatctggaagaacatcagttgttagacggcattatgcgcaaagcctgccgcaaccgtccgctgacggaaacgcaaaccaaacgcaaccggtatttgtcgaagacccgttatagtggattaaatttaaatcaggacaaggcgacgaagccgcagacagtacaaatagtacggcaaggcgaggcaacgccgtactggtttttgttaatccactatatgtggtcgaacagagcttcggtacgctgcaccgtaaattccgctacgctcgggcagcctatttcgggctga

SEQ ID NO: 37310 - DNA, 624 bp, Neisseria meningitidis
atgaaaaaaccgaccgataccctacccgttaatctgcaacgccgccgcctgttgtgtgccgccggtgcgttgttgctcagtcctctggcgcacgccggcgcgcaacgtgaggaaacgcttgccgacgatgtggcttccgtgatgaggagttctgtcggcagcgtcaatccgccgaggctggtgtttgacaatccgaaagagggcgaacgttggttgtctgccatgtcggcacgtttggcaaggttcgtccccgaggaggaggagcggcgcaggctgctggtcaatatccagtacgaaagcagccgggccggtttggatacgcagattgtgttggggctgattgaggtggaaagcgcgttccgccagtatgcaatcagcggtgtcggcgcgcgcggcctgatgcaggttatgccgttttggaaaaactacatcggcaaaccggcgcacaacctgttcgacatccgcaccaacctgcgttacggctgtaccatcctgcgccattaccggaatcttgaaaaaggcaacatcgtccgcgcgcttgcccgctttaacggcagcttgggcagcaataaatatccgaacgccgttttgggcgcgtggcgcaaccgctggcagtggcgttga

SEQ ID NO: 37311 - DNA, 183 bp, Neisseria meningitidis
atgagctgcggcggctgcgtcaaaagcgttacccggatattggaaggcgtaaaaggcgtggcaagcgtcgaagtcagtcttgaaaacaaaagtgcgaccgtcggatacgaccccgcgcaaaccgatgcaggggcgttgattgaagccgttgaagacggcggctatgatgccgcgttgaaataa

SEQ ID NO: 37312 - DNA, 384 bp, Neisseria meningitidis
atggaaccttcttcttacgcggcagaaaaaaaaggcaaaggcggcatcaggcgcgtcattaacgcattcggctattcgatagacggcatcgccgccgcctaccgttacgaagcggcattccgtcaggttttgtggctgaacgtactgctggtgtgcgcggcatttttttgggtttccgaaaccgccgtccgcctgccgttgattatcgcgtcttttgtgtcggtcattgtcgaactgttcaacaccgccgtcgaagctgccgtcgatcatacttcgaccgaaaaacacgagctggccaaactcgccaaagacgcaggttctgccgcacaattgttcgcgatgctgatgttggcggcggtttggctgtctgccctgttcgggtaa

SEQ ID NO: 37313 - DNA, 423 bp, Neisseria meningitidis
atgcaggttacatcaaaatggatagacggaatgtgctttgtcggaacaacggaaggcgggcacagcgtcgttatggaggggtcggcggcagaaggtaaggctaagcgcgggcccagccctttggaaatgctgctgttgggcgtggcgggctgttcgagcatcgatgtggtgatgattgccgaaaaacagcgtcagaaagtgactgactgccgtgcgacggttacggcgaaacgggcggacgatgcgccgcgcgtgtttaccgaaatccacatccatttcaaagtattcgggcatgatttgaaagaatcggccattgagcgcgccgttcagatgtctgccgaaaaatactgttcggcttcgattatgttgggcaaagcggcaaagattacccacagttttgaaattgccggggcagataaatag

SEQ ID NO: 37314 - DNA, 771 bp, Neisseria meningitidis
atgaaaatcaccacttggaacgtcaattcgctcaatgtgcggctgccgcaggtgcaaaacctgcttgccgacaatccgcccgatattttggttttgcaggaactcaaactcgatcaggacaaatttccggccgccgctttgcaaatgatgggctggcactgtgtttggagcgggcagaaaacctacaacggcgtggcaatcgtcagccgcaacgcgccggaagacgtgcatatcgggctgcccgcgctgccggacgatccgcaacggcgcgtgattgcggcaaccgtcggcggtgtgcgcgtcatcaatgtctattgcgtcaacggcgaagcccttgacagcccgaaattcaaatataaagaacaatggtttgccgcactgacggagtttgtccgcgatgaaatgacccgctacggcaaactggtgctactgggcgatttcaatatcgcgcctgccgatgcggactgttacgaccctgaaaaatggcacgaaaaaatccactgttcgtccgtcgaacggcagtggtttcaaaacctgctggatttgggactgaccgacagcctgcgccaagtccatcccgaaggcgcgttttacacatggttcgactatcgcggcgcgatgttccaacgcaaactgggcctgcgtatcgaccatattttggtgtcgcctgcgatggcggcggcgttgaaggatgtccgcgtcgatttggagacgcgcgcgctggagcgtccgagcgaccacgcgccggtgacggcagaattcgattggtaa

SEQ ID NO: 37315 - DNA, 579 bp, Neisseria meningitidis
atgtcccccactcatgaaatcagtaatgtagaacggctgattgacgaaattaaccgcatacacgccggatatcacgaaagggtttccaaactgtatggcggaaaccttcccaatttgtcaaagacgctccggcatctggacatcgattttgtgttgcaataccgacttaatttgcatgagtcaatcaacgactatctgattcgatctgacatcggggacttgcctttggcatactactaccgcgttaaaaccacggagtccgttttcgacaaaatccgctggttttcggaacgcgagtccgggtatccagcgaataaggtgttaaatgatatttttggggtgagaatcatcgcagattccgcactaatggaagaaatacatgctgctttagatgaatgggtttcgacgaagggcttaaaaaactggaacgttcaggaaaaaaacggctatatcggaacgcatgtgtattttaatcaaaaaaataatctgttttttccgtgggaacttcagatatgggacaaggcggatgccttgaaaaatattgagagccatgaacgggacaagcgactttttgtttaa

SEQ ID NO: 37316 - DNA, 1356 bp, Neisseria meningitidis
atgtcggaatatacgcctcaaacagcaaaacaaggtttgcccgcgctggcaaaaagcacgatttggatgctcagtttcggctttctcggcgttcagacggcctttaccctgcaaagctcgcaaatgagccgcatttttcaaacgctaggcgcagacccgcacaatttgggctggtttttcatcctgccgccgctggcggggatgctggtgcagccgattgtcggccattactccgaccgcacttggaagccgcgtttaggcggccgccgtctgccgtatctgttttatggcacgctgattgcggttattgtgatgattttgatgccgaactcgggcagcttcggtttcggctatgcgtcgctggcggctttgtcgttcggcgcgctgatgattgcgctgttggacgtgtcgtcgaatatggcgatgcagccgtttaagatgatggtcggcgatatggtcaacgaggagcagaaaagctacgcctacgggattcaaagtttcttagcgaatacgggcgcggtcgtggcggcgattctgccgtttgtgttcgcgtatatcggtttggcgaacaccgccgagaaaggcgttgtgccacaaaccgtggtcgtagcattctatgtgggcgcggcattactgattattaccagtgcgttcacaatcttcaaagtcaaagaatacgacccggaaacctatgcccgttaccacggcatcgatgtcgccgcgaatcaggaaaaagccaactggttcgaactcttaaaaacggcacctaaagcgttttggacggttactctggtacagtttttctgctggttcgccttccaatatatgtggacttactcggcaggcgcgattgcggaaaacgtctggcacaccactgatgcgtcttccgtaggttatcaggaggcgggcaactggtacggcgttttggcggcggtgcagtcggttgcggcggtgatttgttcgtttgtattggcgaaagtgccgaataaataccataaggcgggttatttcggctgtttggctttgggcgcgctcggctttttctccgttttcttcatcggcaaccaatacgcgctggtgttgtcttataccttaatcggcatcgcttgggcgggcattatcacttatccgctgacgattgtaaccaacgccttgtcgggcaagcatatgggcacttacttgggcctgtttaacggctctatctgtatgccgcaaatcgtcgcttcgctgttgagtttcgtgcttttcccgatgatgggcggtttgcaggccaatatgttcttggtagggggcgtcgtcctgctgctgggcgcgttttccgtgttcctgattaaagaaacacacggcggggtttga

SEQ ID NO: 37317 - DNA, 894 bp, Neisseria meningitidis
atgccgcatccgtgccaaaccgttcacactttaaccgcccgtgtcccgaaatgccgtctgaagttgaacgccgcccgacggcagcgttacaatcgcccacaactgttttttccgaacatcatcatgaccacgaccgaacacgacaacgacgatgcattcctgctgcggtacagccgccacatcctcttggacgaaatcggcatcgaagggcagcagaaactttccgccgcgcatattttggtcgtcggctgcggcggtttgggtgccgccgccctgccctatctcgccgcttccggcatcggcacgctgaccatagccgattccgacacggtcgagctgcacaacctgcaacgccaagtcgcatttgacgagggcgatgtcggcaagcccaaagccgaagccttggcagaccgcctgaaacgcatcaaccataacgtcgatgtccgcaccgtcaacgaaaaactcgacggctgccgcctgaccggtttggttcaaaccgccgacatcgttttagactgctgcgacaactacgccacgcgccaagccgtcaaccgtgtctgcgtacaaacgaaaacaccgctggtttcaggggcggcggtacgctttgaagggcaacttgccgtgtaccgtcccgacttgcccgactcgccgtgttacgcctgcctgtttgacggcggatcggcttcagacggcatctgttctctcttcggcgtgttctcgccgctggtcggcatcatcggcagtacccaagcggcggaggctctgaaaatcctgctggatgcgggcgaaccgtcgcacggcaggctggcggtttaccgtgccttggaagggggctggcaatatttcgacctgccgcgcaaccctgaatgcccggtttgcggcacggcgcgataa

SEQ ID NO: 37318 - DNA, 417 bp, Neisseria meningitidis
atgattgatgtcaaaatagacaatatctttgtcgtcctaaaccaaatcgagcggcttggcaacgggatcgaaaaccgctacctgctgatgcgccgactgtccgaaaccatgcacacggcggtcaagctcaatttccgctacgcaggccgtccgaaatggttggggctaaaataccgcgacggcaagctgctttcggattcgggtcgtctgaaagacagtttttccacactgtcagacaacgataccgcccttgtcggtacgaatatcgtctatgccgccatccacaacttcggcggtatggcggggcgcaaccgcaaagttcggattccgcaacgggaatttttgacgctgacggacgacgacaaacaggctttgatggacgatgtgcaggattatttttcgggtctgataccgtga

SEQ ID NO: 37319 - DNA, 966 bp, Neisseria meningitidis
atgagctacacgcaactgacccaaggcgaacgataccacatccaatacctgtcccgccactgcaccgtcaccgaaatcgccaaacagctgaaccgtcacaaaagcaccatcagccgcgaaatcagacggcaccgcacccaagggcagcaatacagcgccgaaaaagcccagcggcaaagccggactatcaaacagcgtaagcgacaaccctataagctcgattcgcagctgattcagcacatcgacacccttatccgccgcaaactcagtcccgaacaagtatgcgcctacctgtgcaaacaccaccagatcacgctccaccacagcaccatttaccgctaccttcgccaagacaaaagcaacggcagcacgttgtggcaacatctcagaatatgcagcaaaccctaccgcaaacgctacggcagcacatggaccagaggcaaagtccccaaccgtgtcggcatagaaaaccgacccgctatcgtcgaccagaaatcccatatcggcgattgggaagccgacaccattgtcggcaaaggacagaaaagcgcattattgaccttggtcgaacgcgttacccgctacaccatcatctgcaaattggatagcctcaaagccgaagacactgcccgggcagctgttagggcattaaaggcacataaagacagggtgcacaccatcaccatggataacggcaaagagttctaccaacacaccaaaataaccaaagcattgaaagcggagacttatttttgtcgcccttaccattcttgggagaaagggctgaatgagaacaccaacggactcatccggcaatacttccccaaacaaaccgatttccgtaacatcagtgatcgggagatacgcagggttcaagatgagttgaaccaccgaccaagaaaaacacttggctacgaaacgccaagtgttttattcttgaatctgttccaaccactaatacactag

SEQ ID NO: 37320 - DNA, 273 bp, Neisseria meningitidis
gtgaacaattcagtcatcaccgtcatcggtaaagaccgcgtcggcatcgtgtacgatgtttccaaaattttggcggaaaaccaaatcaatattctcaacatcagccaacagctgatggacgatttttttactatgattatcttggtggacacttcaaaatgcagcaaatcgcgtcaagaggttttggatttgtttgcggaagagagcaaaaaactcgcgcttgatatccgtatgcaaaacgaagaaatcttccaagcgatgcaccgcatttga

SEQ ID NO: 37321 - DNA, 1230 bp, Neisseria meningitidis
atggcgttcggcaaatccttatttcatgcgatcggccgcgtcagcctggtcaggcagattgccgccggtttggcgttgggcatcgtaatcggttcggtttccccgcaactgggcttggcggcaggcttgttcggcagcctgtttgtcggcgcgctcaaagcggtcgcgccggttttggtatttattttggtggcggccacaatcgcgcagcaccaaaaaggcaacaaggcgcatatcaggccgattatcgtcctttacctcatcggtacgttttccgcagccctgaccgccgtcatcgccggtatggttttcccgacgcacattgttttggcgggcgcgggcgatgtgtccgccgcgccgccttccggcattgtggaagtattgaaatcgctgctgatgaacctggtcgccaacccgattaacgcgattgccaatgccaactatatcggcattttggcttgggctttggttttgggcgcggcgttgcggaatcacggttcggacgttacgcggcaggtcgttgccgatttggcggaagcggtttccaccgtcgtgaaatggattatccgttttgcccctttgggcattttcgggctggtgtcgtccacaatcgcggagacgggtttcggcgcgctggcgggttatgcgaagctgcttgcggtactgttgggctgtatggcgtttatcgcgctggtggtcaatcccgccatcgtgtggtggaaaatccgccgcaacccttatccgctggtgtttacctgcctgcgcgaaagcggcgtgtatgccttctttacccgttcttccgccgccaatatccccgtgaatatggctttggcgaaaaaactggggctgcacgaagacacttattcgatttccatcccgttgggggcgaccgtcaatatgggcggcgcggcgattacgattaccgttttggctatggcggcggcgcacactcaaggcatacaggttgattttgccaccgcgctgctgttgagcctggtggcgacggtcagcgcgtgcggcgcgtccggtgtggcaggcggttcgctgctgctgattccgctggcgtgcagcctgttcggcatcagcaacgatgtcgctatgcaggtggtcgccgtcggctttatcatcggcgtgattcaggattcggcggaaacggcgttgaattcttcaaccgatgttttgtttaccgctgccgccgatttgtgtcgacagagaaaccgggcggaataa

SEQ ID NO: 37322 - DNA, 1377 bp, Neisseria meningitidis
atgaaacacatccacattatcggtatcggcggcacgtttatgggtgggattgccgccattgccaaagaagcagggtttgaagtcagcggttgcgatgcgaagatgtatccgccgatgagcacccagctcgaagccttgggcataggcgtacacgaaggcttcgacgcggcgcagttggaggaatttaaagccgacgtttacgtcatcggcaatgtcgccaagcgcgggatggatgtggttgaggcgattttgaaccgcgggctgccttatatttccggtccgcaatggctggctgaaaacgtgctgcaccatcattgggtactcggtgtggcggggacgcacggtaaaacgaccaccgcgtccatgctcgcatgggttttggaatatgccggactcgcaccgggcttccttatcggcggcgtaccggaaaacttcagcgtttccgcccgcctgccgcaaacgccgcgccaagacccgaacagccaatcgccgtttttcgtcattgaagccgacgaatacgacaccgcgtttttcgacaaacgctccaaattcgtgcattaccgtccgcgtaccgccgtgttgaacaatctggaattcgaccacgccgacatcttcgccgatttgggcgcgatacagacccagttccaccacctcgtgcgtaccgtgccgtctgaaggcctcatcgtctgcaacggacggcagcaaagcctgcaagacactttggacaaaggctgctggacgccggtggaaaaattcggcacggaacacggctggcaggccggcgaagccaatgccgatggctcgttcgacgtgttgcttgacggcaaaaaagccggacacgtcgcttggagtttgatgggcggacacaaccgcatgaacgcgctcgccgtcatcgccgccgcgcgtcatgccggagtcgacattcagacggcctgcgaagccttgagcacgtttaaaaacgtcaaacgccgcatggaaatcaaaggcacggtaaacggcatcactgtttacgacgacttcgcccaccatccgaccgccatcgaaaccaccatagaaggtctgcgtcagcgcgtcggaaacgcccgcatcctcgccgtcctcgagccgcgttccaacacgatgaagctgggcacgatgaagtccgccctgcccgaaagcctcaaagaagccgaccaagtgttctgctacgccggcggtgtggactggaacgtcgccgaagccctcgcacctttgggcggcaggctgcacgtcggcaaggatttcgatgccttcgttgccgaaattgtgaaaaacgcccgaaccggcgaccatattttggtgatgagcaacggcggtttcggcggaatacacaccaaactgctggacgctttgagatag

SEQ ID NO: 37323 - DNA, 156 bp, Neisseria meningitidis
atggaaaaacgaaacacatacgccttcctgctcggtataggttcgctgttgggcctgttccatcccgcaaaaatcgccatccgccccaatcccgccgacgatctcaaaaacatcggcggcgattttcaacgcgccatagagaaagcgcgcaaatga

SEQ ID NO: 37324 - DNA, 648 bp, Neisseria meningitidis
atgaaaacaaaattttacaatcatcaaggcgaacatttaatcctgtattttgcaggttggggaacgccgcccgatgctgtaaatcatttgattttgccggaaaatcacgatttattgatttgctatgattatcaagatttaaatttggattttgatttttccgcctatcggcacatccgtttggtggcgtggtcaatgggcgtttgggcggcagagagggcattgcaaggaataagattaaaatccgcaacggcagtgaatggcacaggtttgccttgcgatgataatttcggtatccctttcgccgtttttaaaggcacattggagaacctcacgggaaatactcgtttaaaatttgaacgcagaatgtgtggcgataaagcatcttttgaagattaccaacaattttccgcccgtccgtttgacgaaattcatcaagaacttaccgcactttttgcgatgatcgggcaagataggcgtacagattttatccgctggacaaatgccttggtcggatcgggcgataaaatttttatgtctgccaatcagcaccgatattggacagcgcgttgcaccgttcgggaaattgacggcggacattacctgttttcaagattcacccattggtcggcactatggaatcactga

SEQ ID NO: 37325 - DNA, 591 bp, Neisseria meningitidis
atgggtttggaactgcctttgattttgggtacgagttcggttttccgccgcgaacagatggaaaggctcggcattgcctttcaggcggcgtcccccgattttgacgaaacgccgatgttgggggaatccgcccctcagacggcattgcgccttgccgagggtaaggcgcggtcgttgaccgggcgtttcccagaggcgttgattgtcggtgcggaccaggtggcgtggtgcgacggcaggcagtggggcaagccgatgaaccttgctaatgcgcaaaagatgttgatgcatttgagcggcagggagattgagttttacagcgcggtcgttctgctaaatacggttacgggcaggatgcagcggcatatcgataagacggtggtcgtgatgaggaagttggacgagctgcacatcctccgctatttggagcgcgagcctgatgcggtttattgctcgtgtgcgttgaagagcgagggcttgggcgcgctgctgatcgaacggattgaaagcagcgatccgaatgctttaatcggtttgccggttttccgtctggtcgatttcttgaaaaatgagggcgtggaggttctgtaa

SEQ ID NO: 37326 - DNA, 1170 bp, Neisseria meningitidis
atgacagcacataaaatcctgcccgtcctgctttccatcatcttaggcgtttctcatgcaacggctgcatcgcccgcgcccaacagaccgacggcacacgccgcccccacgctccaaacacccgaaaccctcacagcggcacacatcgttatcgaccttcaaagcagacagactttatccgccaaaaacatcaatacccctgtcgaaccggcggcactaacccaactgatgaccgcatatctggttttcaaaaacatgaaatcgggaaatatccgatctgaagaaaacttaaaaatacccgaatccgcatgggcttcagaaggaagcagaatgtttgtacgtcccggcgatacggtcagcaccgacaaactcttaaaaggcatgattgcactatccgcaaacgatgccgccctaacccttgccggccggctgggcaacggctcgattgaaaattttgtgcaacaaatgaacaaagaagcccgacgcttgggcatgaagaacactgtattcaaaaatccgacaggcttgagtagagaaggacaggtttccaccgccaaagacctcgcccagctgtctgaagcattgatgcgcgactttccggaatattacccgctgttttccatcaaatctttcaaattcaaaaatatagagcaaaacaaccgcaatatccttttatatagggacaacaatgtaaacggtctgaaagccggacacacagaaagcggcggctacaaccttgccgtgtcatactccggcaacggcaggcacatccttgtcatcacattgggttcggaatcggcggaaacacgcgcatcggacaacagcaagctgctgaactgggcattgcaagccttcgatacgcccaaaatatatccgaaaggcaaaaccgttgcccaaatccaaatttccggaggcagcaaaaaaaccgtccgcgcaggcttcctcaaagaagcctacatcactctgccacataaggaagcgaaaatggcagaacagattttggaaaccatacagccgattcccgccccggtaaaaaaagggcaaattttaggaaaaatcaaaatcagacaaaacggatacaccattgccgaaaaagaaatcgtcgcactggaaaatgtagaaaaaagaagccggtggcaaaggctttgggtgcgtctgacagggcagtaa

SEQ ID NO: 37327 - DNA, 1314 bp, Neisseria meningitidis
atgctgacgtttatcggactgctgattatcggggtcatcgtatggctgctgctgacggaaaaagtgtcgcccatcatcgcattaatcttggtgccgctgtttggggcgttgctggcggggtttgatgtatcccaattaaaagaattttattcgggcggcaccaaatcggtgatgcagattgtgattatgtttatgttttccattttgttttttggaatcatgaacgatgtggggctgttccgtccgatgataggcggtttgattaagctgactcggggtaatatcgtggcagtgagtgtggggacggtcttggtgtcggtggtggcgcagttggacggggcgggtgcgacgacgtttttattggtcgtccccgcccttttgccgctttacaagcgtctgcatatgaatccttacctgctgtttttgctgctaacttccagtgcgggattgattaaccttctgccgtggggcgggccgactgggcgggttgcaagcgtgttgggcgcagatgtgggcgaattgtataaacctttgttgacggtgcaaattatcggtgtagtgtttatccttgcgctgtccctgcttttgggtgtgcgtgaaaaaaggcggattgtccgggagttgggcgcgttgcccgccgtggcggatttgataaagccggtgcctttgtcggaagaagaacaaaaattggcgcgtccgaaactgttttggtggaatgtcctgctgtttttggcggcgatgagcctgcttttttcgggcatcttcccgccgggttatgtatttatgctggctgcaacggcggcgttgcttttgaattaccgcagcccgcaggaacagatggagcggatttatgcccacgccggcggcgcggtgatgatggcgtccattattttggcggcaggtacgtttttggggattttgaagggtgcggggatgttggacgcgatttccaaagacattgtgcatatcctgccagacgcgctgctgccttatctgcatattgccatcggtgtgttgggcattccgcttgagttggttttgagtacggacgcttattatttcggactgtttccgattgtggagcagattacctcgcaggcgggcgtggcgcccgaagcagcaggttatgcgatgttgatcggcagtatcgtcggcacttttgttacgccgctttcgccggctttgtggatgggcttgggtttggcgaaattgtcgatgggcaaacacatccgttattcgtttttttgggcgtggggtttgtcgctggcgatattggccagttcgatagcggcaggaatcgtgcctctgccgtaa

SEQ ID NO: 37328 - DNA, 1566 bp, Neisseria meningitidis
atgacccaagacaaaatcctcatcctcgacttcggttctcaagttacccagctgattgcccgccgcgtgcgcgaagcccacgtttactgcgaactgcattccttcgatatgcctttggacgaaatcaaagccttcaaccccaaaggcatcatcctttccggcggccccaattccgtttacgaatccgactatcaagccgatatcggcatttttgatttgggtattccggttttgggtatttgctacggtatgcagtttatggcgcaccacctgggcggcgaagttaccccgggcaaccagcgcgaattcggttatgcgcaagttaaaaccatcgacagcggactgacgcgcgatatttacgacgacgcgcccaatacattggacgtatggatgagccacggcgacaaagtgtccaaactgcccgacggtttcgccgtcatcggcgacacgccgtcctgcccgattgcgatgatggaaaacgccgaaaaacaattctacggcatccaattccatcccgaagtaacccacaccaaacaaggccgcgccctgttgaaccgctttgtcttggacatctgcggcgcgcaaccgggctggacgatgcccaactacatcgaagaagccgttgccaaaatccgcgaacaggtcggcagcgacgaagtgattttgggtttgtccggcggcgtggactcttccgtagccgccgcgctgatccaccgcgccatcggcgaccaactgacctgcgtgttcgtcgatcacggtttgttgcgcctgaacgaaggcaaaatggtgatggatatgttcgcccgcaacttgggtgtgaaagtgattcacgtcgatgccgaagggcagtttatggcgaaactcgccggcgtgaccgaccccgagaaaaaacgcaaaatcatcggcgcggaatttatcgaagtatttgatgccgaagagaaaaaactcaccaacgccaaatggctggcgcaaggcacgatttaccccgacgtaatcgaatccgcaggcgcgaaaacccaaaaagcccacgccatcaaatcccaccacaatgtcggcggcctgcctgaaaacatgaagctcaagctgcttgagccgttgcgcgacttgtttaaagacgaagtgcgcgaactgggcgttgctttgggtctgccgcgcgaaatggtgtaccgccatccgttccccggccccggtttgggcgtgcgcatcttgggcgaagtgaaaaaagaatacgccgacttattgcgtcaagcagacgatattttcatccaagaattacgcaacaccaccgacgaaaacggcacatcttggtacgacctgaccagccaagccttcgccgtgttcctacctgtgaaatccgtcggcgtaatgggcgacggacgcacttacgactacgtcgtcgcactgcgcgcagtcatcaccagcgacttcatgaccgcacactgggcagaactgccttactcactgctcggacgcgtgtccaaccgcatcatcaacgaagtcaaaggcatcaaccgcgtggtgtacgatgtcagcggcaaaccgcctgccaccatcgagtgggaataa

SEQ ID NO: 37329 - DNA, 684 bp, Neisseria meningitidis
atgcaacacgacgtttacgactacaccgcgcatacggtttctaaaaacaccgtcctgcagaaaacctaccgcctgctcggattttcattcattccggctgccgcaggcgcggcacttgccgccaatgccggtttcaatttttacgccgccttcggttcgcgctggatagggtttgccgtcgtgttggcgtttttctacggtatgatccacttcatcgagaaaaaccgttacagcaataccggcgttaccctgctgatggtattcacattcggtatgggcgtattgatcggccccgtgctgcaatacgcgctccatattgccgacggtgcgaaaatcgtcggcattgccgccgcgatgaccgccgccgtctttttaacgatgtccgccttggcgcgccgaacccggctcgatatgaacgcgctcggacgcttcctgaccgtaggtgcggtcattctgatggtcgccgtggttgccaatctgtttttgggtattcccgcactcgccctgaccatttccgccggttttgtcttgttcagttccttaatgattatgtggcaggtacgcaccgtcatcgacggcggcgaagacagccacatcagcgcggcactgacactgtttatctcgctttacaacatcttcagcagcctgctgaacatcctgttgtctttaaacggcgaggattga

SEQ ID NO: 37330 - DNA, 654 bp, Neisseria meningitidis
atgaagataacgcactgcaaattaaagaaaaaagtacaaaaagaactgctccgtttttttgtgctggaagttaccgtccgttctgccgccgatattttgggtattcatcccaattcggcagcactgttttaccgtaaaatccgcacggttatcaaccatcatttggccttggctgccgatgaggtttttgagggccctgtcgagccggacgaaagcgatttcggcggacggcgtaaaggtagacgtggtcgcggtgcagcaggaaaagtggttgtcttcggcattctgaaacgcaacggacgggtctataccgttgtggtggataatgccaagtctgaaacgttactccctgtcatcaaaaagaaaatcatgccggacagtattgtttataccgatagtctgagcagctgcgacaagttggacgtgagcggttttatccattaccgcatcaaccattccaaggaatttgcagaccgtcagaaccacattaacggcattgagaatttttggaatcaggcaaaacgcgtcttgcgaaaatacaacggaatcgattgcaaatctttcccactgttcttgaaagaatgcgaatttcgatttaacttcggcacaccgtctcaacagcttaaaatcctgcgggattggtgtgggatttag

SEQ ID NO: 37331 - DNA, 1998 bp, Neisseria meningitidis
atgaagaaaattacccctcaaaacctacgccccctgctttcggaaagcttgggacataccgattttgtcaacgtcctcaacgcactgattaaatttttgcgccgtggcggcaaaaaatgtgcaggggaacgtttcgacctgattatcgacacattcaaacaagacagggaattactgtcccgcttcagccggtgtttttacatctggctcgcgcaaatacacatttatccggcactcatcaaactcggcatcttctcgcgccacagctttgcccgggaaatgggcatacgcatctacgaacgcttcagcccgtcatataaagattttgccaacttgggcgaagtcttcctttatcttttccattccgaaaacgacgacaaatggctgcaaacgctcaatatccgccaatggctggttttatacgaactcatccggagccacgccgaaccgtccaaattgcagacggcgggcatccgccttgccgatgcgcgtttgcgcgccatcgaaatgctgtctgtctggacggcatccgaagccatcgaacccgacctcatccgcatcgccccgcgcctgctggaagccgattcttccttcgtcgccctccaacgcgaaaccgccaaactggtcgaacactaccgcaacggcaccgcgccttacgacaccgcccacctcgaagtgatgttcgaccaatgtttcagccagattgactatttgcgccgcaaagggacgggcgccggctccggttcgtcggtcaaagtcgcccacctgctcgaacggctccggcagaccgtagaccgtctgaagctgctcaccgacatccaaaccggcgccggcaacagcaaccgcctgaccatcgcgctgatgaactccctcatctacgcggcggtcgaacaatacagcacccgccacctgcgccgcagcagcatccgtatgctcgcccgcagcattaccgaaaacaaaagccaccacggcgaacactacattacccgcaaccgcaaagaatatttcaaaatgttctactcggcggcaggcggcggcatcatcatcgccctgatggcgctgctcaaaatccgcatcggcacactcggcctcagccccttcctgacttccttgtcggctgggttcaactacggcatcggctttatgatcatccatattctgcactgcaccgtcgccaccaaacagcccgcgatgactgccgccagcttcgccgaacaagttgatctcaacgaaggcggcaaagcggtggacaacaagctcgccaagctcctcatcgacgtatgccgctcccaaagcgtcgccgttttcggcaacgtttccatcgccatccttttggcgtgcgccatatcgttcggctatgcccatctgcaccaacagcccatactcgatgcccacaccgccgcctaccagttcaaatccatagacatcatcgcttacccgacgctgtggtatgccgccattgcaggtctgtggctgttctgctccggcatcatcgcaggttttttcgacaaccgcgccgactacctcaacctgcgccaacgcctgcccttcaaccccttgctgcgtaaaatcatgcgccccgggccccgccgcgtcctcgccgcctacatccacaaacactacggctcgttggcaggcaacttcatcttcgggatgctcttgggtatgaccggctatttcggacacctcctcgggctgccgctggacattcgccacgtcgccttctcctccgccaacctcggctatgctgccgtcagcggcaacgtcggtttgggcacgttcgtactcggcattttcagcgtcctcgccatcggcttggtcaacctctgcgtcagcttcagcctcgccctcttcgtcgccctgcgctcgcgcggcacgaaaatcggcagtatccgcaatctgattaagagtttttggaatcagattaaaagcaatccctgcatacttttcctcccgcccgccaaagaacagggacatcctccttcggacaagccttaa

SEQ ID NO: 37332 - DNA, 243 bp, Neisseria meningitidis
ttgctgattttgttaatttttgagtataggaagtttctaatggcaaccggtatcgtaaaatggtttaacgacgctaaaggttttggtttcatcacgcctgatgaaggcggcgaagatttgttcgctcacttctcagcaatcaatatggaaggtttcaaaaccctgaaagaaggccaacgtgtctctttcgacgtaaccaccggccctaaaggcaaacaggccgccaacattcaggctgcttaa

SEQ ID NO: 37333 - DNA, 1305 bp, Neisseria meningitidis
atgaaaaaacacatatgggcggcatctttgctgccgacatccctatcggcagaacctttaaactggtggaagccttattccgccgtcaattcgggcgataccgcctgggtgatgactgcggctgccttggtactgttgatgacgcttcccgggctggctttattctacggcggtatggtgcggaaaaaaaacctgctctcgacgatgatgcacagcttttccatcgcgacattggtgggcatcctttgggtcgccgtcggctattctttagcgttcacgccgggaaatgcctttatcggcggtttggggcgcgtatttttaagcgggatgcagatagacgctgccgcacagatgctgaccgtgtcgcccaatgcgccgactgttcccgaaccggtatttatgttttttcagatgacgtttgccattatttcgaccgccattattaccggcgcgtttgccgaacggatgaaatattcggcaatgatgctgttttcgggcatatggtttttattggtttatgtgccgggcgcgcattgggtctggggcggcggctttatgagcaagggcggcgtattggattatgccggcggtacggtggtgcacatcaatgccggtatcgcgggactcgtcgccgccttggttttgggcaggcgcataggctacgggcgcgaggcgatgcctccgcacaatatggcgatgacactgatcggcgcggcaatgttgtggttcggctggttcggctttaacgccggatcggcgcttgcggcagacgcggcggcgggtatggcgatggcggtaacgcaggtgtcggccgtattcggcgcggcaggctggcttgcctgcgaaaaaatagcgggacacaaaccttccgctttggggctggcttccggcgcggtttccggtctggtcggcatcacccctgccgccggctttaccggcccgtcgggcgcggccgccatcggtatattgactgccgccgcgtgctttgtgtccgtcaccgtcgtcaaacacaaattgcgttacgatgattctttggacgctttcggcatacacggattcggcgggctggtgggcggaatattgaccggcatctttttcgacaaccgcattttcggcggggatgcggcagtttggcagcagttgtggatacaggtaaaagacgggttcgttatggcggcatacagcgggctgatgagttgggcgattttgaaggtcgtggggaaaatctgcggcggcctgcgcgtcggcaaggatgtcgaacgcgaaggtttggatctgaatatccacggcgaacgcgtggaataa

SEQ ID NO: 37334 - DNA, 1386 bp, Neisseria meningitidis
atgatggcaagagataaccgcatccaaatgtttccgcacgaatggcgcgccagtacgacgctttccggcgtgtacgcgctgcgtatgctgggtatgttcctcgtgctgcccgtattggcggtgtatgccgcctcgctgcccggcgcggaaggcaacaaaacgctggtcgggctggcaatgggcatttacgggctgacacaggctctgctgcaactgcctttgggcatcgcttccgacaagttcgggcgcaagaaaaccatttatgtcgggctgattgtgtttgcagcgggcagcttccttgccgccgccgccgatacgctgcccatgctggtcgccgcacgcgccatacagggtgcgggagcggtcagtgcggcggttaccgcgctgctggcggatttgacgcgcgacggcgtacgtacccgcgcgatggcgatgatcggtttgagtatcggtttgactttttcggtcagccttgtcgttgcccctgtgattgccgacgcggtcggcgtgcgcggcttgttcctgctgaccggtatgttaaccgtcgccagtatcggcgtggtggcgtttatgactcccgatcccgaagtttccaagctgcacgaagacacgcaggcgcagccttcgcgcataggcgaagttttgaaaaaccgtaggctgctgacgctcgatttcggcattttcgccctgcacgccgcgcaaatggcattgtttaccgcgctgcctttcgcgatgacccagctcggtttggaaaaaatccagcattggaaagtctatctgccctcgaccattacgggcttggtggtgatggttccgctgattatcgtcggcgagacgcgcaacaagctcaaacaggtttttatcttgggcatcgcctgcatcgcggcggcacagctcggtttgctgtccggtatgcgctcggtaggcttgattaccgcttatttggttgtttactttatcggttttaatgtgttggaagcgagcctgccgtctatggtttccaaaatcgcgccgtccgacctgaagggtacggcgatgggcgtgtacaacacgatgcagtcgctcggactgtttgccggcggcgtggcaggcggtttgctgtttcaaaaatacggcttttccggcgtgtttgccttttgcagcatattgatgctgctgtggctggtgattgccgttttatcgcctgcgcccaagcccgtcaaaaacctcagttaccctgtcggcggcgtgtggcaggtcaatcaggaagggttataccgcgccttgtcggagcttgagggcgtggaagacatcggtttcagtttcgacgggcagaccgtctatctcaaagtgttgcagaagggtttcgatcaggctgccgctgaaaaaatcatcacaggagtttaa

SEQ ID NO: 37335 - DNA, 561 bp, Neisseria meningitidis
gtgggaatccaggacgaaaaatctctagaaaccgttttacccgataagtttccgcaccgacaggtctggattcccgcatgcgcgggaatgacgatgcaggtatttctgacgattcccggctatgatgttgaggcagaaatcgaaaaattcgtttggatggatgctgtgatttggcagatgccgagctggtggatgcacgagccttggacagtgaaaaaatacatagacgaagtattaaccgctggacacggcaaactctaccaaagcgacggcagacacagcgtcaatccgactgagggctacggcacaggcggcttgttgcaaggcaaaaaacatatgctttcactgacttggaatgcgccgattgaggcgtttacccgcgaaggcgatttctttgaaggcaaaggcgttgatgttttgtatatgcacttccacaaagccaacgagtttttgggtatgacccgcctgccgacattcttatgtaacgatgtggttaaaaatccgcaagtggaaaaatacttggcagattatcaggcacacttggaaaaagtgttcggctaa

SEQ ID NO: 37336 - DNA, 915 bp, Neisseria meningitidis
atgcggcaaccgcataaacagatttcctttatatttcagagtacgcaaatgatgaaaaccttactgccctttttcggcgtggtgcgcgtcagcggcgaagaccgccaaaccttcctgcacggacagctttccaacgacatcaataatcttcagaccgggcaggcgtgttatgcgacttacaacacgcccaaaggccgcgtcatcgccaatatgattgtcgtcaaccgaggcggcgatttgctgctgattatggcgcaagacttgcttgaagcaacggtcaaacgtttgcggatgtttgtgttacgcgccaaagccgtttttgaaatccttgaagattacgccgtcgacgcggaattggcagcatccgccgaaccgcttgccgcgcaagaacccagtctcgtctttaccgccgaatgcgtttcagacggcatctgcaccgtcgtcctgccccatcggggcattttgcacatcgcccccaaaaacgccctgcccccttatgatgccgccgccgaaagcgcgtggcggctgcacgaaatccgcagcggttatccgtggatatgcgcggctaccaaagaaaccgccgtcgcccaaatgctcaaccagcacatcatcggcggcgtacacttcaaaaaaggctgctatccgggacaggaaatcatcgcgcgtgcccagtatcgggggcaggtcaaacgcggcttggcggtattgtcgggaaattcggcagccgaagtgggtagcgtattggcagcggacggcgaagaggccggcatcgtgcttgacagcgtaaaagattcggaaaactttaccgcccttgccgtaattaaattctccgccgctcaaaaaacactgtccgccccaaacggcggcagcttcaaagcggttcatctcttctttaaaaccgaaaatgcagaataa

SEQ ID NO: 37337 - DNA, 876 bp, Neisseria meningitidis
atgttacaaggtagcctggttgccctgattaccccgatgaatcaagacggcagcatccattacgaacaactccgcgacttaatcgactggcacattgaaaacggcacggacggcatcgttgccgtcggcacgacaggcgaatccgccaccctctccgtcgaagaacacaccgccgtcatcgaagccgtcgtcaaacacgttgccaaacgcgtccccgtcatcgccggcacaggggcaaacaacaccgtcgaagccatcgccctttcccaagccgccgaaaaagccggggcggactacaccctctccgtcgtcccctattacaacaaaccttcgcaagaaggcatgtaccgccatttcaaagccgttgccgaagccgccgcgattccgatgatactctacaacgtacccggcagaaccgtcgtcagcatgaacaacgaaaccatcctgcgccttgccgaaatccccaacatcgtcggcgtgaaagaagccagcggcaacatcggcagcaacatcgaactcatcaaccgcgcgcccgaaggcttcttcgtcctttccggcgacgaccataccgccctgccgttcatgctgtgcggcggacacggcgtgattaccgtagccgccaacgccgcgcccaagctctttgccgatatgtgccgcgccgcgcttcaaggcgatatcgcccttgcacgcgaactcaacgaccggctgattccgatttacgacaccatgttctgcgaacccagccccgccgcaccgaaatgggcggtatccgccctgggcagatgcgaaccgcacgtccgcctgccgctcgttccgctgacggaaggcggacaggcaaaagtccgcgccgccctgaaagcctcaggacaactttaa

SEQ ID NO: 37338 - DNA, 780 bp, Neisseria meningitidis
atgaatcaaaagtatattttatctgcaaacaataatagtttgatagaagaaattcacaatacagtacagagtattgggtattgtattgttcgcggtcttaatctaaaccatcttgatgacagccggagaaacaagaaattatttgactttctatctcaattaggaatgctgacaaaccacaaagacgatggttttaaatctatattttgggatattaaatatcgcggcgatgactatgtaataaataatgatataactttctcggaagatgttggagaatgtccacttcatagtgattcatcttttagtgaaaacccggaaagttatttggttatgtatgtagtaaaatcagccaatgatggaggtaattccctatttttaagttcatcagatattgtcaatcagttatctaaaacagaaactggtaaaaaacacttaaaaacattaacgggcaatttatatccatttaaaacaccaacatcatttgataaaaaacaaggtgtgagatggggtaatatcttatcggtcaatactcaaatgattagatttagaagggattgtatctataaaggtattgaagaaaatagaaataaagtatcaaaggaaatggtacttgcacttgattatcttgtaaatgttataaaaaatgcgagtgatattcaagaattttctgcacaagatgatgatttgattattattgacaatgtcaatggtttgcatgccagaactgattatacggataaaaacaggcattatattagagcaagaattactgtataa

SEQ ID NO: 37339 - DNA, 1188 bp, Neisseria meningitidis
atgaataccttactcaaccaactcaaaccctatccctttgcccgactgcgtgaagcgatgcagggcatttccgcgcctgaaggcatggaagccgtccccttgcacatcggcgaaccgaaacatccgacaccgaaagtcattacggatgcgctgaccgcctcattgcacgagttggaaaaatatccgctgactgcgggtctgcctgaactgcgtcaggcgtgtgcaaactggttaaaacgccgttatgacggcttgacagtggatgcagataatgaaattctgccggttttaggcagtagggaggcgttgttttcttttgttcaaaccgtgttgaaccctgtttcggacggcatcaaacccgcaattgtcagcccgaatcccttttatcagatttacgaaggtgcgacacttttgggcggcggtgaaatccattttgccaattgccccgcgccgtctttcaaccccgattggcgcagtatttccgaagaggtttggaaacgcaccaaactggtgttcgtctgctcgcccaacaaccccagcggcagcgtgctggatttggacggatggaaagaaatttttgatttacaggataaatatggtttcattattgcctcggatgaatgctattccgaaatctatttcgacggcaacaaacctttaggctgcctgcaggccgctgcacagttgggtcgaagcaggcaaaaactgcttatgttcaccagtttgtccaagcggtccaatgttccaggtttgcgttccggttttgtcgccggcgatgccgaactgcttaaaaactttctgctttacagaacctatcacggcagtgcaatgagcattcccatgcagcgcgcaagcattgccgcttgggatgacgaacagcacgttatcgacaaccgccgcctgtatcaggaaaaatttgagcgcgttattcccattttgcaacaggtatttgacgttaaattaccggatgcctcgttttacatctggttgaaagtccccgatggcgacgatttggcatttgcacgcaatttatggcaaaaagccgctatccaagtattgcccggacgttttttggcacgggataccgaacagggcaatcccggggaaggttatgtgcgtatcgctttggttgtcgatgtcgcaacttgtgtcaaagctgcggaaaccattgtttccctatatcggtaa

SEQ ID NO: 37340 - DNA, 318 bp, Neisseria meningitidis; identical to SEQ ID NO: 37073

SEQ ID NO: 37341 - DNA, 822 bp, Neisseria meningitidis
atggctgttttaattaccggtgcttcggcaggattcggcgaagcgatgtgccgtgcgtttgtcggggcgggataccgcgttatcggtgcggcgcgtcgtgcggacaggcttcaggccttggcggatgaattgggtgctttgttttaccctttggaaatggacgtgtcgcgccgcgagtcggtggaaaacgccttaaacggcatccctgatgaattttccgacatcgactgcctcatcaacaatgccgggctggctttgggtctggacacggcggacaaggcggattttgaagattgggaaacgatgattcaaaccaatgttttgggtttgacgttcctgacgcgcaaaattttgccgcaaatggtggaacgcggcggcggttatgtgatgaatttgggttcgattgcaggcaattatgcttatgccggcagcaacgtttacggggcgaccaaggcgtttgtgcgccagttcagcctgaatttgcgcgcggagttggcggataagaacatccgcgttaccaatatcgagccgggtttgtgcggcaatacggagttttccaacgtgcgcttcaaaggcgatgacgagaaggcagcaggcgtgtatgagggtgtggaatttatccgccccgaagatattgcggaaaccgcattgtggctgtaccgccggccggcgcatatgaatgtgaacacgattgaaattatgcccgtggcgcagacttttgcaggaatgaaggtcataaaaacagccgtgcccgaagtgcgggaagactttgaaaaacagagtatgtcgctgttttcccgcatcaggtcctggttcaaatga

SEQ ID NO: 37342 - DNA, 621 bp, Neisseria meningitidis
atggaattgaaagtaattgacgctaaaggacaagtttcaggcagcctgtctgtttctgatgctttgttcgcccgcgaatacaatgaagcgttggttcatcagctggtaaatgcctacttggcaaacgcccgctctggtaaccgtgctcaaaaaacccgtgccgaagtaaaacactcaaccaaaaaaccatggcgtcaaaaaggtaccggccgcgcccgttccggtatgacttcatctccgctgtggcgtaaaggtggtcgcgcgttcccgaacaaacccgacgaaaacttcactcaaaaagtaaaccgcaaaatgtaccgtgccggtatggcgactattctgtcccaattgactcgtgacgagcgtttgtttgcgattgaggcgttgactgccgaaactcctaaaaccaaagtttttgctgaacaagtgaaaaatctgggtctggagcaagtgttgtttgtaaccaaacagctcgacgagaatgtttacttggcttcacgcaacttgccaaacgtgttggttttggaagctcaacaagttgatccttacagcttgctgcgttacaaaaaagtaatcatcactaaagatgcagttgcacaattagaggagcaatgggtatga

SEQ ID NO: 37343 - DNA, 966 bp, Neisseria meningitidis
atgagccacacgcaactgacccaaggcgaacgataccacatccaatacctgtcccgccactgcaccgtcaccgaaatcgccaaacagctgaaccgccacaaaagcaccatcagccgcgaaatcagacggcaccgcacccaagggcagcaatacagcgccgaaaaagcccagcggcaaagccggactatcaaacagcgtaagcgacaaccctataagctcgattcgcagctgattcagcacatcgacccccttatccgccgcaaactcagtcccgaacaagtatgcgcctacctgtgcaaacaccaccagatcacgctccaccacagcaccatttaccgctaccttcgccaagacaaaagcaacggcagcacgttgtggcaacatctcagaatatgcagcaaaccctaccgcaaacgctacggcagcacatggaccagaggcaaagtacccaaccgtgtcagcatagaaaaccgacccgctatcgtcgaccagaaatcccgtatcggcgattgggaagccgacaccattgtcggcaaaggacagaaaagcgcattattgaccttggtcgaacgcgttacccgctacaccatcatctgcaaattggatagcctcaaagccgaagacactgcccgggcagctgttagggcattaaaggcacataaagacagggtgcacaccattaccatggataacggcaaagagttctaccaacacaccaaaataaccaaagcattgaaagcggagacttatttttgtcgcccttaccattcttgggagaaagggctgaatgagaacaccaacggactcatccggcaatacttccccaaacaaaccgatttccgtaacatcagtgatcgggagatacgcagggttcaagatgagttgaaccaccgaccaagaaaaacacttggctacgaaacgccaagtgttttattcttgaatctgttccaaccactaatacactag

SEQ ID NO: 37344 - DNA, 273 bp, Neisseria meningitidis
atgatgagtgtaaaagaattattcaaagtcatcttagatgaaaataaagattttcctattagaacgattcatcgcacgccaatagggatacttcccaaacctgttgctttaagtattgttcaatatgaagatgaccaaggattttatttgttttatttggatgagaccggtcaggaacaaacggatacttatcatgacacattagattcggcatttgaacaggtggagtttgaatttggaattagcaaagaagaatggatgcaaagcccttag

SEQ ID NO: 37345 - DNA, 969 bp, Neisseria meningitidis
atgaacggaaaaaccatcatccttgccaatccgcgcggcttctgcgccggcgtggatcgggcaatcagtattgtcgagcgtgctttggaagaattcggcgcgccgatttatgtgcgccacgaagtcgtccacaacaaattcgtcgtcgataacctgcgtgaaaaaggcgcggtgtttatcgaagacttggcggaagtgccgccgggcgcgacgctgatttattcggcacacggtgtatcgaaggcggtgcagcaggaagcggcggagcgcggtttccgcgtgtttgatgcgacttgcccgctggttacgaaagtgcataaggaagtcgcccgactggatgcccaagactgtgaaatcatcatgatcgggcataaggggcacgttgaggtcgaaggaacgatggggcagcttgcgccgggcaaaatgcttttggtcgaaacggtcggagatgtggcaaaactcgaagtcagaaaccccgacaaactcgcctatgtcagccaaaccacgctctcggtcgatgaaaccaaagacatcattgccgcgctgaacgcgcgtttccccaatatccgcaatccgcacaaggaagacatctgctatgcgacgaccaaccggcaaaccgccgtcaaagagctggcggaacagtgcgacatcgtgattgtggtcggttcgcccaattcgtccaacagcaatcgcctgcgcgaagtggcggcaggcatcgggaccgatgcgtatatggtggacaacgcgtcctacctgcaacgcgcgtggtttgagggcaaaaacaaagtcggcgtaacggcaggcgcgtccgcgcccgaagtgttggtgcaggaagtactggcaaccatacgcagatgggggcacgaaaccgtacgcgaaggggagggcgcggaagaaagcattgtgttcgtcctgcccaaagagctgcgccgcgagggcgaaaccaaacccgatttgtgcaaacgttga

SEQ ID NO: 37346 - DNA, 1284 bp, Neisseria meningitidis
atgactgcatcgaaatcaggttttatcgggcaaatcttttcccgcaatatgctcgtctgtatttttacggggtttacctcggggctgccgctgtactttctgattaacctgattccggcgtggttgcgcagcgagcaggtggatttgaagagcatcgggctgatggcgttaatcggtctaccgtttacttggaaatttttgtggtcgccgctgatggacgcggtcaggctgcccgttttgggacggcggcgcgggtggatgctgctgacgcaggcagggttgctggcggctttggcggcctatgcctttttaaacccccgtaatcatctgccgctgattgccggcttgtcggtgcttgtcgcttttttttccgccagtcaggatattgtattggatgcgttcaggcgcgagattttgtcggacgaagaattgggtttgggcaactcggttcatgtgaacgcctaccggattgccgccctgattcccggttcattgagtttggtgttggcagacaggatgccgtggtcagaagtatttgttattacttcattatttatgctgcccggccttctgatgacgctgtttctcgcgcgcgaacccgtgttgccgcctgccgttcctaaaacgttgaagcagaccgtggtagagccgtttaaagaattttttacacgtaaaggcatcgcttcggctgtatgcgtgctgctgtttatcttcctttacaaactcggcgacagtatggcaaccgcgttggcaacgccgttttatctggatatgggtttcagcaagacagacatcggtttgattgcgaaaaatgcaggactgtggccggcagtggcggcaggtatcttgggcggcgtgtggatgctgaaaatcggcgtaaacaaagccttgtggatattcggcgcggtgcaggctgtaaccgttttggggtttgtatggctggcagggttcggacatttcgacacggtcggcacaggcgagaggctgatgctggcggcagttatcggcgcggaagcggtcggcgtggggttggggacggcggcgttcgtatcgtatatggcgcgcgagaccaatcccgcatttaccgcaacgcagcttgcgctgtttaccagcctgtccgctgttccccgtacggtcatcaattcctttgccggttatctgattgaatggctcggttatgtaccgtttttccaactgtgtttcgcactcgccctaccgggtatgctgctgctgctgaaagttgcgccttggaacggggagaaaactcaggatgcaggcagatga

SEQ ID NO: 37347 - DNA, 1455 bp, Neisseria meningitidis
atgagcatcgaacacactcctccgacacacgacggcgaaaccggtcaaaaccatgccgaacgcccttccgctgatttcgaccgtgtccactccctctgcgaaatcctcgaacctgcctttgaacaaatcgaaaacggcacaccgctcgaagacgcgccgctgcgcgacaagctgaccgagctgaccgtcctcttgggcgagctgcaccctgccgacgtggcggcggtgttggaatcgctgccgccgcgcgaacgcaacgtcgtttggcttctggtcaaacccgaagacgacggcgaagtattgctggaagtatccgacgcggtgcgcgaaacactgatcgagtcgatggataaggacgaattgttggcggcagttgacgatttggacgcggacgaattggcggaactggcagacgatttgccgcaccaagtggtttacgaagccttacagacgcgtgatgaggaagaacgcgcccaagtcaaggcggcaatgtcctacgaagacaaccaagtcggtgcgattatggacttcgagttggtcagcatccgcgccgatgtcgcctgcgaagtggtgctgcgttacctgcgccgcttcgacagcctgcccgaccacacggataaaatcttcgtggttgacgaaaacgatgtgttgcagggcgtgctgcccatccgcaaacttttggtcgccgatcccgaagacttggtggaaaacgtgatggcgaaagatgtcgtgcgtttccgcgccgaagacgacgtggaagaagcggcgcaggcgtttgaacgctacgacttggttaccgcgcccgtcgtcgatgaaaacaaaaagctcatcggtaggattaccgttgacgagatggtggacgtcatccgcgaagaatccgaagccgatatgttgaacatggcaggtttgcaggaagaggaagacctgttcgcccccgtatgggattcggtgaaaaaccgctggatgtggctcgccgtcaacctctgcaccgccttcctcgccagccgcgtcatcggcgcgtttgaaggcagcatcgaaaaaatcgtcgcactcgccgcgctgatgcccatcgtcgccggtatcggcggcaactcgggcaaccagacgattaccatgattgtccgcgcaatggcgatggggcagttgacgggaatgcaggcggggcgcttgttgaaaaaagaagtcggcgttgccctagtcaacggcattatctggggaaccgtcatgggcgcggtttcatggctgctctacggcagcctcggcatcgggctggttatgattgccgcgatgacgctcaacctcctgctggcggcaaccgtcggcgtattaattcccgtggtaatggaaaagttcggacgcgatcccgcactgggcagctcggtgctgattaccgccgttaccgactccggcggcttcctgattttcttggggctcgccaccctattcctgctttaa

SEQ ID NO: 37348 - DNA, 717 bp, Neisseria meningitidis
atgaagaccaaattaccgctttttatcatttggctgtccgtatccgccgcctgttcttcccctgtttcccgcaatattcaggatatgcggcccgaaccgcaggcagaggcaggtagttcggacgctattccctatcccgttcccactctgcaagaccgtttggattatctggaaggcacactcgtccgcctgtcgaacgaagtggaaaccttaaacggcaaagtcaaagcactggagcatgcgaaaacacacccttccagcagggcatacgtccaaaaactcgacgaccgcaagttgaaagagcattacctcaataccgaaggcggcagcgcatccgcacataccgtcgaaaccgcacaaaacctctacaatcaggcactcaaacactataaaagcggcaggttttctgccgctgcctccctgttgaaaggcgcggacggaggcgacggcggcagcatcgcgcaacgcagtatgtatctgttgctgcaaagcagggcgcgtatgggcaactgcgaatccgtcatcgaaatcggagggcgttacgccaaccgtttcaaagacagcccaaccgcgcccgaagccatattcaaaatcggcgaatgccaatacaggttgcagcagaaagacattgcaagggcgacttggcgcagcctgatacaggcttacccgagcagcccggcggcaaaacgcgccgccgcagccgtgcgcaaacgatag

SEQ ID NO: 37349 - DNA, 177 bp, Neisseria meningitidis
atgggggaatacctggaatttgaagaaagcggtacgaaaattaccgttgaaatcggcagcgcgtggcattttaatgaaactataagaaatattaatacacatttaagaggtacgaaacttccaggttctaactggagagttcaagataaggggcattttcatctttggaaaagataa

SEQ ID NO: 37350 - DNA, 351 bp, Neisseria meningitidis
atgtcagacggacaaaatattccggcaaaaatgatgtcgttgcagctgaaagacatgaatctgctgtacagctcctacatgccgtttttggaacacggcggtctgtttgtgcagaccaacgacgtattttccatcggggacgatattctgcttgccgtagaaatcctcaacttccccaaactgttcctgccgaccaaagtcgcctggatcaatcctgcgcgtacttcctccaaacccaaaggggtggggctggcattcacaaaacacgaaaactgcctgaaagtcaaagaccagatcgaagtcgaactgggcaacacaatcggcggcagcagatctacgtttaccatgtaa

SEQ ID NO: 37351 - DNA, 552 bp, Neisseria meningitidis
gtgaactattgcgaatttgccgcctcacttcccgaaaacaccgataacccgaacaaacattaccacgacacgcaatacggttttccgattgaggacgacaatgaattgtttgagcggctggtgttggaaatcaatcaggcaggattaaactggacgctgatgctgaagaagcggcaggcgtttcagacggcatttgaaggtttcgacatcgatacggttgccgccttcgacgacaccgaccgcgaacgcctgcttgccgacgcgggcattgtccgcaaccgcctgaaaatcgatgccgccattttcaatgcacggcaaatccaagcgttgcaacaagaatacggctcgttcaagaactggctcgacacgcaccatccgcgaagcaaagacgaatgggttaaactctttaaaaaacatttcaaattcgtcggcggcgaaatcgtcggcgaatttctgatgagtaccggctacctcaaaggcgcgcacgccgaaagctgtccggtttaccgtgaaaccctgaaataccacccgaaatggctcgatgccatctga

SEQ ID NO: 37352 - DNA, 1128 bp, Neisseria meningitidis
ttgaaacggaaaaggtcgtctgaaagggtgtttcagacgaccttttccgatatcgggaatttgttttgccgtatcgggaattttgcgttttgcggcgtggtttctgcaggttgtttgcttaataataaacattcttattcgtatgcaaaggaaccgcacaccgtgaaaccgcgtttttattgggcagcctgcgccgtcctgctgaccgcctgttcgcccgaacctgccgccgaaaaaactgtatccgccgcatccgcatctgccgccacgctgaccgtgccgaccgcgcggggcgatgccgttgtgccgaagaatcccgaacgcgtcgccgtgtacgactgggcggcgttggatacgctgaccgagctgggcgtgaatgtgggcgcaaccaccgcgccggtgcgcgtggattatttgcagcctgcatttgacaaggcggcaacggtggggacgctgttcgagcccgattacgaagccctgcaccgctacaatcctcagcttgtcattaccggcgggccgggcgcggaagcatatgaacagttggcgaaaaacgcgaccaccatagatctgacggtggacaacggcaatatccgcaccagcggcgaaaagcagatggagaccttggcgcggattttcggcaaggaagcgcgcgcggcggaattgaaggcgcagattgacgcgctgttcgcccaaacgcgcgaagccgccaaaggcaaaggacgcgggctggtgctgtcggttacgggcaacaaggtgtccgccttcggcacgcagtcgcggttggcaagttggatacacggcgacatcggcctaccgcctgtagacgaatctttacgcaacgaggggcacgggcagcctgtttccttcgaatacatcaaagagaaaaaccccgattggattttcatcatcgaccgtaccgccgccatcgggcaggaagggccggcggctgtcgaagtattggataacgcgctggtacgcggcacgaacgcttggaagcgcaagcaaatcatcgtcatgcctgccgcgaactacattgtcgcgggcggcgcgcggcagttgattcaggcggcggagcagttgaaggcggcgtttgaaaaggcagaacccgttgcggcggggaaagagtag

SEQ ID NO: 37353 - DNA, 93 bp, Neisseria meningitidis
ttgaagcggccgtgcattttaaggcgcattaaaaaccaccccgatattcaggtcatcgggcaggtggttcaggtctcgaaaaacctgtattaa

SEQ ID NO: 37354 - DNA, 429 bp, Neisseria meningitidis
atggccattctgaaacttgacgaacacctctatatttctccgcaactgaccaaagccgatgcggaacaaatcgcgcaactgggcatcaaaaccgtcatctgcaaccgccccgaccgcgaagaagaatcgcaacccgacttcgcccaaatcaaacagtggctggaacaagcaggcgttactggattccatcaccaacccgttaccgcacgcgacatccaaaaacacgatgtcgaaaccttccgccaactcatcgaacaagccgaatatcccgtccttgcctattgccggaccggtacgcgctgctccctcctgtggggcttccgccgggcggcagaaggtatgccggttgacgaaatcatccgccgcgcccaagcggcaggcgtaaatttggaaaacttcagagagcggctggacaacgcccgcgtctga

SEQ ID NO: 37355 - DNA, 846 bp, Neisseria meningitidis
atggtctgcctctccggcggcaaagacagctacgccctgttagacatcctgcgccagctccaagccagcgcgccgattgatttcgaactggttgccgtcaatctcgaccaaaagcagccgggcttccccgaagaagtattgccgacctatctcgaaagcataggcgtgccgtacaaaatcgtcgaagaagacacctactccaccgtcaaacgcgtattggacgaaggcaaaacgacttgttcactgtgcagtcgcctgcgccgcggcatcctctaccgcaccgcaaaagaattaggctgcaccaaaatcgccttgggacaccaccgcgacgacatcctcgctaccatgtttttaaatatgttttacggcggcaaactcaaagccatgccgcccaagctggtgagcgacaacggcgaacacatcgtcatccgtccgctggcgtatgtcaaagaaaaagacttaatcaaatacgccgaattgaaacagttcccgattatcccgtgcaacctctgcggctcgcagcccaacctgcaacgtcaagtcatcggcgatatgctgcgcgattgggacaaacgcttccccggccgtatcgaatcgatgttctccgccctgcaaaacgtcgtcccttcccaccttgccgataccgaactcttcgactttgccggattggaacgcggtcaaaccctgaaacacggcggcgatttggcgtttgacagcgaaaaaatgcccgaacgtttttcagacggcagcgaagaagacgaaagcgaaatcaaaatcgcgccgcaaaaagccgaacgcaaagtcatcaacattctggcgaacaagccgaaaacctgcggcgcgtaa

SEQ ID NO: 37356 - DNA, 399 bp, Neisseria meningitidis
atgtccgattgctgcaaccgtatccaaccggttttgctttctgttttgcgtatcgtaaccgcttacctgtttttgttgcacggtacgtcgaaaatcttcgccttccccattgaaatgggcagcggttcgcccggcgggctgttgttgcttgccggtattttagaaattgtcggcggcattttgctggtgttgggcctgtttgcgcgccctgccgcgtttgttttgtccggccagatggcggttgcctattttatggcgcacgcttccggaaatgctttgttcccgattgccaacggcggcgagtccgcagtgctgttctgcttcgtattcctctatatcgcggcggcgggcggcggagcatggtcgctggacaggctgtttttcaagcgtaaagcctga

SEQ ID NO: 37357 - DNA, 918 bp, Neisseria meningitidis
atgtctgtctataccagtgtttccgatgatgaaatgcgcggcttcctgagcggttacgatttgggggaatttgtttccctgcagggcatcgcgcaggggattaccaacagcaattattttctgacgacgacttcgggacgttatgtgctgaccgtgtttgaagtgttgaaacaggaagagctgccgttttttctggagcttaaccggcatttgagtatgaagggcgtggcggttgccgcgccggttgcgcgcaaagacggccggcttgattccgttttggcgggcaagcccgcatgcctggttgcctgcctgaaaggttcggacaccgcgctgccgacggcggaacagtgtttccataccggcgcgatgttggcgaaaatgcaccttgccgccgccgatttccctttggaaatggaaaacccgcgttatgatgcgtggtggacagaggcgtgcgcccgactgctgcccgtcctgccgcgagacgatgccgcgctgctgtgttccgaaatcgatgcgctgaaggacaatctcggcaaccatctgccttcgggcatcatccacgccgatttgttcaaggataatgtgttgcttgacggcggtcaggtatcgggtttcatcgatttctattatgcctgccggggcaattttatgtatgacttggcgattgcggtcaacgattgggtaaggacggcggacaataagttggatgaggcgttgaaaaaggcgtttatcggcggttatgagggcgtgcgccccttgagtgccgaagaaaaggcgtatttcccgaccgcccaacgcgccggctgcatccgtttttgggtgtcgcgcctgttggattttcattttccgcaggcgggcgagatgacgtttatcaaagacccgaacgcgttccgcaacctgctgttgagtttgggttga

SEQ ID NO: 37358 - DNA, 420 bp, Neisseria meningitidis
atgtctttcggctatttgattgcaacatcgcaaccttgcgaattgttgacaaaatctcgaggtgaaactttttctttaattatggataagatggatttatggatttatttcagattttgtgaaggaaatatttatacaataaggaagaatgaaactgaatcttgtcttacagaaagaggaggcaaatggttgaaacatatttatgaatttaatcggggaagttttattttttcttatgtgcttctaaaaaagagagaaagcgaagagaattttgcagaaattgttttaaaatcaataaaaaataataaaattttgacagttaaggtacggtcaggcttgcattttgacttaagaaatatttatcgtattgagatgtatagcggattaaatttaaaccagtacggcgttgcctcgccttag

SEQ ID NO: 37359 - DNA, 468 bp, Neisseria meningitidis
atgcaaatagataatatatccgatgaacaggttgtgattgtcagaatgtcttgttatcttgagaaagatgaaatttttaagaatgtagaaagatatggatatcagtcatcagatattaagaaaattagtcctccttttccattaaatattttacctgttcccaaaccttattatttttatctttatgatacccatttgaatcaaatttatgatttggcttggtcatgtaatgattttttaatgtttgaaatatttattttggatagggaaagcatcaaatatatagataaagataaactttttaaatctggagaaacactatattcgaattttaaatctattaaaaatcaatgcaaaaattattttttttgcggttttgattttgatgccccttactttaaaagcggtgtgagtcaggtggcagattataattttgttcctgatgcattttctttattctttatttaa

SEQ ID NO: 37360 - DNA, 354 bp, Neisseria meningitidis
ttgctgtgttttaatggcggcattgaaaaacacatcttattcaatcaaccgataaagaaaggactgaaaatgaaaaaactgttattggctgccgttgtttccctgagtgccgcaaccgcatttgccagcgactctgccgagcgtcagatttacagtgatcccaattttgaacagaaccgcgtaaaagctgtgaaaatgttggaacagcgcggttatcaggttcacgatgtcgatgccgacgaccattggggtaagcctgtgctggaagtggaagcctataaagacggccgcgaatacgacatcgtgttgtcttaccccgacctgaaaatcatcaaagagcagctcgatcgctga

SEQ ID NO: 37361 - DNA, 729 bp, Neisseria meningitidis
atgtgggataatgccgaagcgatggaacggctgacgcgctggctgcttgtcatgatggcgatgctgcttgctgcgtccgggctggtttggttttacaattcgaatcatctgcccgtcaagcaggtgtcgctgaagggcaacctggtttattccgataagaagacattgggcagtttggcgaaagaatacatccatgggaatattttgaggacggacatcaatggcgcacaggaggcctaccgccggtatccgtggattgcgtcggtcatggtgcgccgccgttttcccgacacggttgaggtcgtcctgaccgagcgcaagccggtcgcgcgttggggcgaccatgccttggtggacggcgaaggcaatgtttttgaagcccgcttggacagacccggaatgccggtattcagaggcgcggaaggaacgtctgccgaaatgctccgccgttatgacgaattttcgactgttttggcaaaacagggtttgggcatcaaagagatgacctatacggcacgttcggcgtggattgtcgttttggacaacggcatcaccgtcaggctcggacgggaaaacgagatgaaacgcctccggctttttaccgaagcgtggcagcatctgttgcgtaaaaataaaaatcggttatcctatgtggatatgaggtataaggacggattttcagtccgctatgcttccgacggtttacccgaaaaagaatccgaagaatag

SEQ ID NO: 37362 - DNA, 240 bp, Neisseria meningitidis; identical to SEQ ID NO: 37009

SEQ ID NO: 37363 - DNA, 201 bp, Neisseria meningitidis
atgaaatttgaagaacgtttcatagttcaagatttagaaacgcatgactttatttatcccgatccgttcggtgatgtggggtttactcaaaatattaaatcagcaggtcaatttgaaagttacgaagatgcgttgaattcaggcataaatgaaatgggcggaggattccagatatttcagttcttcgtaaaatcggaataa

SEQ ID NO: 37364 - DNA, 1518 bp, Neisseria meningitidis
atgttgtatttcagatacggttttttggttgtttggtgtgcggcaggtgtttctgccgcctatggggcggatgcgcccgcgattttggatgacaaggcattgttgcaggtgcagcggtcggtgtcggataagtgggcggaatcagattggaaagttgaaaatgatgccccgcgcgtggttgacggggattttttgttggcacatccgaaaatgttggaacatagtttgcgcgacgcgctcaacggcaatcaggcggatttaatcgcttcgttggcggatttgtatgccaagctgccggattatgacgcggttttgtacggcagggcgcgggctttgctggcgaaattggcgggaaggccggcggaggcggtggcgcggtatcgggaactgcacggggaaaatgcggcagacgagcggattttgctggatttggcggcggcggagtttgacgatttccggctgaagtcggcagaaaggcattttgcggaggcggcaaaattggatttgccggcaccggttttggaaaatgtggggcgttttcggaaaaaaacggaggggctgacgggctggcgtttttcgggcggcatcagtccggcggtcaatagaaatgccaataatgccgcgccgcagtattgccggcaaaacggaggccggcagatatgcagtgtcagccgggcggagcgggcggcagggttgaattatgaaatcgaggcggaaaaactgacggcgttggcagataatcattatttgttgttccgttccaatatcggcggcacgagctattatttcagtaaaaaatcagcttatgacgacgggttcggcagggcgtatttgggttggcagtataaaaatgcacggcagacggcggggattttgccgttttatcaggtgcagttgtcgggcagcgacggctttgatgcgaaaacaaaacgggtaaacaaccgccgcctgccgccgtatatgctggcgcacggagtcggcgtgcagctgtcccatacttaccgaccaaacccgggatggcaattttcggtcgcgctggaacattaccgccaacgctaccgcgaacaggatagggcggaatacaataacggcaggcaggacgggttttatgtttcgtcggcaaaacgtttgggcgaatcggcaactgtgttcggcggctggcagtttgtgcggtttgtgccgaaacgcgaaacggtgggcggcgcggtcaataatgccgcctaccggcgcaacggtgtttatgccggctgggcgcaggagtggcggcagttgggcggtttgaatagtcgggtttccgcgtcttatgcccgccgcaactataagggcgttgcggctttctcgacagaggcgcaacgcaaccgcgaatggaatgtctcgctggctttgagccacgacaagttgtcgtacaaaggtatcgtaccggcgttgaattatcgtttcggcaggacggaaagtaatgtgccgtatgcgaaacgccgcaacagcgaggtgtttgtgtcggcggattggcggttttga

SEQ ID NO: 37365 - DNA, 1008 bp, Neisseria meningitidis
atgagcaccttcttccagcaaaccgcccaagccatgattgccaaacacatcgaccgtttcccgctattgaagttggaccaggtgattgattggcagccgatcgagcagtacctgaaccgtcaaaaaacccgttacctccgagaccaccgcggtcgtcccgcctgtcccctgttgtccatgttcaaagccgtcctgctcggacaatggcacagcctctccgatcccgaactcgaacacagcctcatcacccgcatcgatttcaacctgttttgccgctttgacgaactgagcatccccgattacagtactttatgccgttaccgcaactggctggcgcaagacgacaccctgtccgaattgctggaactgattaaccgccaactgaccgaaaaaggtttaaaaatagagaaagcatccgccgccgtcgttgatgccaccattattcagaccgccggcagcacacagcgtcaggctatagaagtcgataacaaaggacaaatcagcggccaaaccacaccgagtaaagacagcgatgcccgttggatcaagaaaaacggcctctacaaactcggttacaaacaacatacccgtaccgatgcagaaggctatatcgagaaactgcacatcacccccgccaatgcccatgagtgcaaacacctgccgccgttgttggaaggtctgcccaaaggtacgaccgtctatgccgacaaaggctatgacagtgcggaaaaccggcaacatctgaaagaacatcagttgcaggacggcattatgcgcaaagcctgccgcaaccgtccgctgacggaagtgcaaaccaaacgcaaccgatatttgtcgaagacccgttatgtggtcgaacaaagcttcggtacgctgcaccgtaaattccgctatgcgcgggcggcctatttcggactgattaaagtgagtgcgcaaagccatctgaaggcgatgtgtttgaacctgttgaaagccgccaacaggctaagtgcgcccgctgccgcctaa

SEQ ID NO: 37366 - DNA, 1374 bp, Neisseria meningitidis
ttgcatcctgattgggtgtatcgccttttttcctttataatgccgccacttatatttgccactttcccgatgaagccgtttgccgaaaatatcccccacagccttcgcggcaactgctgcgacgaagccctgccgccgcatacggtagattgtccggaatgcggctgccgcgcggatgtaccccggttggacagtggagaagcggcgttctgtccccgttgcggacacaaactcttcagggtgggcaggcatcctttttccgccccgcccgcttatgcggcggcttcgctgattttgatggcgtttgcttacggtatgacgtatatcgaggtcgggataccgggtgcggcatccgtcctttcgctgcctgaaatgatgcgcctgatggtgtttcaggattatggttttttggccgaagtgatgtttgtgctgaccttcggcgcgccggttctgtttctgctgctgtgcctgtatgtctatgccgcgctgatacggaaacaggcgtatcctgcgctgcgtttggcaacgcgcgtaatggtgcgcttgaggcaggcgatgatggtggatgtgttttttgtttccactttggtggcgtatatcaagctctcgtctgtggcagaggttcgcttcggatcggcgttttatctgatgttcgcgctgtcggttatgctgattcggacttcggtatcggttccccagcattgggtgtattttcaaatcgggcggctgacgggggataatgcggttcagacggcatcggaaggtaaaacctgttgcagccgctgcctgtatttccgcgacagtgccgaatccccctgcggcgtgtgcggcgcggaactgtaccgccgacggccgaaaagtctgagtatttcgtcggcgtttctgacggcggcggttattttgtatttccctgccaatatcctgccgattatgatttcgtccaatcctgccgccacagaggtcaataccatccttaacggcatcgcttatatgtgggacgagggcgacaggctgattgcggcggttattttcagcgcgagtattttggtgccggtactgaagattgcggcaatgtcggttttgattacgtccgcccgcttcgctttgccaacgggcgcaaagaaattgtcgcacctctaccgcatcaccgaagcggtcggccgctggtcgatgattgatatttttgtgattattattttgatgtgttcgttccacacttatgccgcgcgtgtcattccgggcagtgcggcagtctatttctgcctggtcgtgattctgacgatgctgtccgcctattatttcgacccgcgcctgctttgggacaaacgcgcttcagacggcattgctttcaatgaaacggaaaaatatgactga

SEQ ID NO: 37367 - DNA, 486 bp, Neisseria meningitidis
ttggctgattttaaacctgactttgcgtggctgttgaaacgaccgttgtgttttttggcttttggtttcggcagcgggctggctccgttcgcgccgggtacatttggcactttggcggcactgcctttggcatttgtgctgattttgctcggcatagacgggctgctgctggcttttttgtgtatcgtgctgtttatgtggggcatacgcatttgcgcttatgcggaacgtgaaacgggtgtcagcgaccatggtgggattgtttgggacgagattgtcgccatgctgtttgtgctggcgtttgtgccgttcaggtggacgtggtggctggcggcatttgtcctattccgtctgtttgacgcgctcaaaccgtctcccgtcggttggtttgacaagaatctgcacggcggtttgggcattatggcggacgatatggcggctgcggtgatgactttgattgtcttgaggattgcaatgctgttttaa

SEQ ID NO: 37368 - DNA, 2889 bp, Neisseria meningitidis
atgagtaacacaaccgtagaacaatttgccgccgagctgaaacgccccgtcgaagacctgttgaaacagttgaaagaagccggcgtcagcaaaaacagcggcagcgattccctgacgctggacgacaaacagcttctgaacgcctacctgaccaagaaaaacggcagcaacggcggcaccatcagcatccgccgcaccaaaaccgaagtcagcaccgttgacggcgtaaaagtcgaaacacgcaaacgcggacgcactgtcaacattccttctgccgaagaattggcagcacaggtaaaagccgcccaaacccaagccgcacctgtccggccggagcagacggcagaagacgcggcaaaagcccgagccgaagctgccgcacgtgcagaagcccgtgccaaggcagaagcggaagcggcaaaactgaaagcggcaaaagcaggcaacaaagccaaacctgccgcgcagaaacccaccgaagcaaaagccgaaaccgcacccgttgcggcggaaaccaaacccgccgaagaaagcaaagcggaaaaagcccaagccgacaaaatgccgtctaaaaaacccgccgagcccaaagaaaaagccgccaagccgaaacacgagcgaaacggcaaaggcaaagatgccaaaaaaccggcgaaacctgccgcacctgccgtgccgcaacccgtggtcagcgcggaagaacaggcgcaacgcgatgaagaagcacgccgtgccgccgcacttcgcgcccaccaggaagccctgttgaaagagaaacaggaacgccaggcacgccgcgaagccatgaaacaacaggcagaacaacaggcaaaagccgcacaggaagccaaaaccggcagacagcgtcccgccaaacctgccgagaaaccgcaggcagccgcgccggccctcgaaaacaagcctgtcaatccggcaaaagcgaaaaaagaaaaccgccgcaaccgcgatgacgaaggtcaaggccgcaacgccaaaggcaaaggcggaaaaggcgggcgcgaccgcaacaatgcacgcaatggcgacgacgagcgcgtacgcggcggtaaaaaaggcaaaaaactcaaactcgagccgaaccaacacgccttccaagcaccgaccgaacctgtcgtacacgaagttttggtgcctgaaaccattaccgttgccgacttggcacacaaaatggcagtcaaaggcgtggaagtggtcaaagccctgatgaagatgggcatgatggttaccatcaaccaatccatcgaccaagacaccgccctgattgtcgtcgaagaactcggacacatcggcaaacccgccgccgccgacgatcccgaagccttcttggacgagggcgcggaagcggtggaagccgaagcattgccgcgtccgcccgtcgttaccgtcatgggccacgtcgaccacggcaaaacctcgctgctggactacatccgccgtaccaaagtggtacagggcgaagcaggcggcattacccaacacatcggtgcataccacgttgaaaccccacgcggcgtgattaccttcttggatactccgggtcacgaagcgtttactgccatgcgtgcgcgcggtgcgaaagcaaccgacatcgtgattcttgtggtcgccgccgacgacggcgtgatgccgcaaaccatcgaagcgattgcccacgccaaagcggcaggcgtaccgatggtggttgccgtcaacaaaatcgataaagaagccgccaacccagagcgtatccgccaagagctgaccgcacacgaagtcgtgcctgacgaatggggcggcgatgtacagtttatcgacgtttccgctaaaaaaggtctgaacatcgatgcattgctcgaagccgtattgctcgaagccgaagttttggaactgaccgcacctgtcgatgcgcccgccaaaggcattatcgtcgaagcccgtttggacaaagggcgcggcgcggttgccacattgctggttcaaagcggcacgctgaaaaaaggcgatatgctgctggccggtaccgcgttcggcaaaatccgcgcgatggtcgatgaaaacggcaaatccattaccgaagccagcccgtccatccccgtcgaaatcctcggcttgtccgacgtaccgaatgcgggtgaagatgcgatggtattggcggacgagaaaaaagcgcgcgaaatcgccctcttccgccaaggcaaataccgcgacgtgcgccttgccaaacagcaggcggcgaagctggaaaatatgttcaacaatatgggcgaaaaccaagcccaatctttgtcggtcatcatcaaggcagacgtgcaaggttcttacgaggctttggcgggcagcctgaaaaaactgtccaccgacgaggtgaaagtgaacgtgttgcacagcggcgtgggcggcattaccgaatcggatgtcaaccttgccatcgcttcgggcgcgttcattatcggctttaacgtgcgtgcagatgcctcttcgcgcaaacttgccgaaaatgaaaacgtggaaatccgctactacaacatcatctacgatgccatcgacgacgtgaaggcggcgatgagcggcatgctttctccggaagagaaagaacaggttaccggtacggtcgaaatccgtcaggtcatctccgtttccaaagtcggcaacattgcaggctgtatggttaccgacggcgtggtcaaacgcgattcccatgtccgcctcatccgcaacaacgtagtcatccacacgggcgaactggcttcgttgaaacgctataaagacgacgtcaaagaagtccgtatgggcttcgagtgcggtctgatgctcaaaggctacaacgaaatcatggaaggcgaccaactggaatgcttcgacatcgtcgaagtggcacgcaccctgtga

SEQ ID NO: 37369 - DNA, 558 bp, Neisseria meningitidis
ttgcagcaatgcccaaaatgtcgaattcaagaatccgacctacaaaatcattccgagcataatactatgaaataccgtcgtttttaccgcaatggcggcacttacttttttacggttgtaaccaataaacggcagaagattttgaccgatgatgcggtgcgtttggctttacggcaggcggtaatggcggtgcgcgaacggtatccgtttgaaattttggcatgggtgttgatgcccgaccatctgcataccatatggcggctgccggacaatgattctgcttattcggaacgctggcggcaaatcaagcggcacagccaatatttaatcggcggcaatctcaggctttggcaaaaacgcttttgggaacatactatccgcgatgaggccgattttgcctgccattttgattatctgcatttcaatccggtcaaacatggctatgtaggacaaatttccgattggcggttttctacgtttcaccgttatgtcaaacagggtatttatccgcataattggggtggcggcaatgcggacttttctattggatacgattga

SEQ ID NO: 37370 - DNA, 1611 bp, Neisseria meningitidis
ttgagaatgcaggcataccgtctggcatacatggcgggtgaaggatctccccgctcccaaatagacaatcaggttgacgaatttgaaaaaagcctgaatcgtatttcacaaagtgatgccatccatccgctgattccttcggacacccctcttgcttatgatttgatacaatccatgctgattatagattggcaggcacacatcctccccccgctccagtcctaccggcgaccgactcaggtcgatctctaccgctttgccggaaacatcgaactgtttttgcaggcattggaaaatgccaacgaaaaaaacacatggtggctcaggcgttttcaatgggcaattatgttgatgacgctggtgtcgtctgtactgatgctgttttggcaccagatttgggttatccggccgctgcaggcgttaagggaaggtgcggaacgcatcggacggaggtgtttcgatattccggttcccgaaggcggtacgccggaattcaaacaggtcgggcgttgtttcaatcaaatgggcggcaggttgaaaattttatatgatgatttggaaggacaagtcgccgagcagacacgcagtctcgaaaaacaaaatcaaaacctgaccctgctgtaccaaactacacgggacctgcaccaatcctacataccgcaacaggctgcagaacattttctaaaccgtatcctgcccgccgtaggagcagattccggcagagtttgtttggacggcggatccgatgtttatgtttccattcatcatgcggattgcggcacagcagcttcggatttggggaagtaccatgaggaaatcttccccattgagtaccagaacgaaacattgggcaggctgttgctcagctttccaaacggcatttctcttgatgaagacgaccgcatcctgcttcaaacactaggcaggcaattgggcgtatcgcttgccggcgcaaaacaggaggaagaaaaacgcctgcttgcagtattgcaggaacgcaacctgattgcgcaaggattacatgacagcatcgcacaagcattaacgttcctaaacctacaggtacagatgctggaaaccgcctttgccgaaaacaaacgggaggaagccgcagaaaacatcggcttcatcaaaacaggcgtgcaggaatgttatgaagatgtccgcgaactgctgctcaacttccgtaccaaaatcagtaataaagaatttcccgaagccgttgccgacctattcgcgcgcttcacgcaacagaccggcacgactgtcgaaaccgtttgggaaaacggcacgcacctgcctacacaggacgagcagctccaaatgatttttatcctgcaagaaagcctgtccaacatccgcaaacacgcccgcgccacccatgtaaaattcaccctttccgaacacggcggacgctttaccatgaccatccaagacaacggacaaggtttcgacacggagaaaataggagaacccacgggcagccatgtcggactgcacatcatgcaggagcgtgccaaacgtatccgcgccgtattgaaaatctattcccaaccccaacagggaaccaccgtctcattggcgggtgtatctgaagaaagcttgaaatga

SEQ ID NO: 37371 - DNA, 621 bp, Neisseria meningitidis
atggcacgttatattggccctaaatgtaagttggcacgtcgcgaaggtacggatttgtttttgaagagtgcgcgccgctctttggattctaaatgtaaaattgattccgctcccggtcagcatggtgcaaaaaaaccgcgtttgtcagactatggtttgcagttgcgtgaaaaacaaaaaatccgccgtatttatggcgtattagaacgtcagttccgtcgttatttcgcagaagctgatcgtcgtaaaggttctaccggcgagttgctgttgcagttgctggaatctcgtttggataatgtcgtttatcgtatgggtttcggttctacccgagctgaagcaagacagcttgtttctcataaggcgatagttgtgaatggacaagttgtcaatattccttctttccaagtgaaagctggtgatgttgtctcagttcgtgaaaaagccaaaaaacaggtacgtattcaagaagcattgggtttggcaactcaaatcggcttgccgggttgggtttctgtagatgcggataaacttgagggtgtgttcaaaaacatgccggatcgctcggaattgaccggtgatattaatgaacagctggtggtagagttctactctaaataa

SEQ ID NO: 37372 - DNA, 3465 bp, Neisseria meningitidis
atgcaaaatatgaaaaaccaaatacgcggatcaggcatggatgcacgatccaacccggccaatgtttcagacggcctgcaaaacagttcgggccatatcggtaccaacacgcgctaccgtctgaccaaactcggcgaacaaatggcgcgcctgcccatcgacccgaaaatcgcgcgcattttgttggcggcgaagaagcacgactgcatggcggaaatattggtgattgcgtccgcgctatcgattcaagacccgcgcgagcggccgctggaggcacgcgatgccgccgccaaggcgcatgaacgctttaccgacaagcaatccgatttccttgcctacctgaatatttgggacagtttccagcgcgagcgcgacaaaggtttgtccaacaagcagctggtgcaatggtgccgccaatatttcctgtcgcacctgcggatgcgcgagtggcgcgagctgcaccaccagcttgcccaaaccgcgattgaaatgggtttgaccaccaaggaagcggctttcagacgactttccgaaatcaagcagcttacgtcgtctgaaaaccaaggcgatcaagacttatccgccaaacgcaaacaaaaacaactggataagaaacaacaccgcgcccaaatccgcgccgccaaagaagcgggctacgaacaaatccaccgcgccctgctcaccggccttatcgccaacgtcggcatgaaatcgcccgacggcaacgactataccggcgcgcgcggcagccgtttccaccttttccccgcctccgccctgttcaaagccaaacccaaatgggtgatggcggcagaactcgttgaaacgacaaaactttatgcgcgcgacgtcgccgttatccagcccgaatggattgagcaggaagccccgcacctcgtccgctaccactatttcgagccgcactgggaacaaaaacgcggcgaagtcgtcgccagcgaacgcgtgacgctttacggcctgaccgtattgccgcgccgccccgtgtcttacggcaaagttgcccccgaagaagcgcgcgaaatctttatccgcagcgcgttggtggcgcaggaatgcgatttgaaagcggatttttttgtccacaacaaaaagctgattaaagaaattaccgaactcgaacacaaatcgcgcaagcaagacgtgctggtcgatgacgaagccctgtttgcgttttataacgaacgactgcccgaaatggcttggaaagacgcgcaaggcagcgtttggggaagtgaagattccgtacggattattgaatctgacaaagccgagaggtcgtctgaaaatgagcgcaacgagtttcgtaaaaacaagcgtaatgggtctcgccaaaatgaaaatcacggcaacaccgtaggttgggttgaaaacccaacatcagccgcaactgcaaaaactgttgggtttgacaacccaacctacgctactcagcaacccaccccctcccccgagagggagggtcggggagagggcaaaacagttgccgcacaaaccaacttttccgcaaccgcagcaaaccctctcccgcaggagagggaacagagtgcctcagcttcaacgttttcagacgacctgcgtcctgcaaatctgcagcaaaccgccccctcccccgtgggggagggctggggagagggcaaaacagttgccacacaaaccaacttttccgcaacctcaacaaaccctctcccgcaggagagggaacagagtgcctcagcttcaacgttttcagacgacctgcgtcctgcaaatctgcagcaaccctctccctcccccgtgggggagggctggggagagggcaaaacagttgccacccaaaccaacttctccgcaaccacagcaaaccctctccctaaccctctcccacaggagggggaacagagtgccgcagcttcagcggtttcaaacgaccctcaacccaaaaagcagcctgcaccccaaaaaaaccgtctgaaacccctacccctcgccgacatccgcaccttccaagcctggctcaaaaccgccgagcgcgacaatccgcgcctgctgttcctcagccgcgacgatctgatgcaacacgccgccgcacacattaccgaagaacagttccccaaattctggcaaaccgcagacggcaaattcaaactttcctaccgcttcgagccgcaccatccgctagacggcgtgaccatgaccgtgccgctgaccgtcctcaaccgcctgcacgcgccgtcgctcgaatggctggtgcccggcatgatacgcgaaaaaatccagttgcaaatcaaagcactgcccaagcaaatccgccgcatctgcgtgcccgtgcccgaattcatcacccaatttttaagccaaaaccccgaccgcaacgcccccatcctgccccaactcgcccaagccatcgccaaaaccgcaggcgacatccgcatattcgagcaaatcaaccaagacgaatgggccgcgttcaggctgcccgaacactgctatttcaacctccgcattatcgacgacggcggacaagagcttgccggcggccgcaaactgcacgaattgcaacaacaactcggtcaagccgccgccgttaccttccgcgacaacacccaagaatttgagcgcgacaacgtcaccgcatgggacatcggcaccctgcccgaatccatcaaattcgcacgcggcaaacaacagctcaccggctatctcggcctacaaaaagaaaaagacggccgcatcgccctgcgcctgtttgataccacagaagccgcagagcaggcacaccgtcaaggtgtcatcgaattgatgaagctgcaattaaaagagcaggtaaaggatttgaacaaaggcatccaaggcttcacccaagctgccatgctgctcaaacacatcaacgccgacactctgcgcgacgacctcacccaagccgtctgcgaccgcgcctttatcggcgaagacgagctgccgcgcaacgaaaaagccttcaaagaacaaatcaaacgcgcccgcagccgcctgcccgccgtcaaagaagccctcagccgctacctgcaggaaaccgccgccgtctacgccgaactcaacagcaaactcggcaaacacccattgacccaccttctaagactacgcctgcaaaccctgctcgccgccggcttcgccacccgaaccccgtgggcacaatggccgcgcctccccatctacctcaaagccatgaccctgcgcctcgaaaaatacagcagcaaccccgcccgcgacgcagcccgcgaagccgatatccaagagctggaacaaatgtggcaggaaaaaacagacagcctgattaaacaaggtctccccatttcagacggcctcgccgcgtttaaatggatgattgaagaattgagggtgtcgctgttcgcgcaggaattgaagacaccgtatccggtgtcggtgaagcggctgttgaaagagtgggaaaaaattgaaaaataa

SEQ ID NO: 37373 - DNA, 705 bp, Neisseria meningitidis
atgttgcgttctattttggcggcttccctattggcggtatcttttccggcagcggctgaagcattgaattacaatattgtcgaattttccgaatcggcgggtgtcgaggtggctcaggatacaatgtccgcacgtttccaagtggcggcggaaggacgggacaaaaatgccgtcaatgccgagtttgttaaaaaattcaacagttttaacagaaaattgaaaaacggcagctttaaaaccgaattggtatcgcgcagtgcgatgccgcgctatcaatataccaacggcagacgcattcaaacaggctgggaggagcgtgcggaatttaaggtcgaaggtagggattttgatgcgttgaaccgttttattgctgatgttcagacggatgcttcgcttgaatataccgatttcagcgtgtcgcgtgaacgccgaaacgaggtcatcgatcaggtcagcaaggatgctattttgcgttttaagacgcgtgccgaaaaactggcgggcattttgggtgcgtccggttataaaatcgtcaaattaaatttgggacacatcggcagccatatcgcgggagggggagctgctcaggcaaaaatgcttcgtgccatgccgatggcggcaagcgtcaatatggagggtgcggattctgccgcgcagggtgtggaggaaatcagcatcagcgtcaatgggacggttcagttctaa

SEQ ID NO: 37374 - DNA, 1134 bp, Neisseria meningitidis
atgaaaatcgtttttatcacaacagtcgcatccagcatttacggtttccgcgcccccatcattaaaaaattaatcggcaaaaaccatcaggtgtatgcctttgtatcggagttttccgacaatgaattggatactatcagggaaatgggggtaacacccgttacctaccgttcaaaccgcagcgggctgaacccgttttccgatataaaatccaccttcctcatctttaaagaactcaaaaaaatatcgccggatttggttttcccttatttcgcaaaacccgtgattttcggcacttttgccgcaaaactggcaggcgtgcccagaatcgtcgggatgctggaaggtttgggattcgcatttaccccgcagccggaaggcataccgttaaaaacaaaaatcataaaggggatcttgattgccttataccgcattgccctgccgatgttggaaagcctgattgtattaaaccccgacgacaaagacgaactgacggacaaatacggcatcaaaataaaaaacatccatattttgggcggaatcggtctggattcgcggcaatatccttattccgaggcggatattcccgatgaaaaagaacccgtaaaattcctctttatcggcagatttctgaaagaaaaggggattgatgattttattcgggcggcggaacaggttaaggacaaataccccgatacggtttttaccgctttgggcgcaatcgacaaatcacgcgcggggggggggggcgatttggaacgccttgccgcccgcgatattatccgtttccccggttttgtgaacaatgtttccgaagtgataaaagaacatcatatattcgtattgccgtcttattatagggaaggcgttccccgaagcactcaggaggcaatggccgtcggcagggcagtgattacgacggatgtccccggatgcagggaaacggtcgccgacaaggtcaacggcttcctgatcgaaccttggaatccccgcatcttggccgaaaaaatgatttattttatcgaaaacagggaagccgtccgcctgatggggaatgcaagttatgcgattgccaaagataaattcgatgccgaaaaagtcgatttgaaattgctcgatattttgaaggcgtaa

SEQ ID NO: 37375 - DNA, 807 bp, Neisseria meningitidis
atgtggcattgggacattatcttaatcctgcttgccgtaggcagtgcggcaggttttgtcgccggcctgttcggcgtaggcggcggcacgctgattgtccctgtcgttttatgggtgcttgatttgcagggtttggcacaacatccttacgcgcaacacctcgccgtcggcacatccttcgccgtcatggtcttcaccgccttttccagtatgttggggcagcacaaaaaacaggcggtcgactggaaaaccgtatttgcgatgatgccgggtatgatattcggcgtattcgcgggcgcactctccgcaaaatatatccccgcattcgggcttcaaattttcttcatcctgtttttaactgccgtcgcattcaaaacactgcatactggccctcagacggcatcccgcccgctgcccaagctgcccggactgactgcggtttccacactgttcggcgcaatgtcgagctgggtcggcataggcggcggttcactttccgtccccttcttaatccactgcggcttccccgcccataaagccatcggcacatcatccggccttgcctggccgattgcactctccggcgcaatatcgtatctgctcaacggcctgaatattgcaggattgcccgaagggtcgctgggcttcctttacctgcccgccgtcgccgtcctcagcgcggcaaccattgcctttgccccgctcggtgtcaaaaccgcccacaaactttcttctgccaaactcaaaaaatccttcggcattatgctgcttttgattgccggaaaaatgctgtacaacctgctttaa

SEQ ID NO: 37376 - DNA, 918 bp, Neisseria meningitidis
atgaatttgactaaaacacaacgccaactgcacaactttctgaccctcgcccaagaagcaggttcgctgtccaagctcgccaaactctgcggctaccgtacccccgtcgcactctacaaactcaaacaacgccttgaaaagcaggcagaagacccagatgcacgcggcatccgtcccagcctgatggcaaaactcgaaaaacacaccggcaaacccaaaggctggctcgacagaaaacaccgcgaacgcactgtccccgaaaccgccgcagaaagcaccggaactgccgaaacccaaattgccgaaaccgcatctgctgccggctgccgcagcgttaccgtcaaccgcaatacctgcgaaacccaaatcaccgtctccatcaacctcgacggcagcggcaaaagcaggctggataccggcgtacccttcctcgaacacatgatcgatcaaatcgcccgccacggcatgattgacatcgacatcagctgcaaaggcgacctgcacatcgacgaccaccacaccgccgaagacatcggcatcacactcggacaagcaatccggcaggcactcggcgacaaaaaaggcatccgccgttacggacattcctacgtcccgctcgacgaagccctcagccgcgtcgtcatcgacctttccggccgccccggactcgtgtacaacatcgaatttacccgcgcactaatcggacgtttcgatgtcgatttgtttgaagaatttttccacggcatcgtcaaccacagtatgatgaccctgcacatcgacaacctcagcggcaaaaacgcccaccatcaggcggaaaccgtattcaaagccttcgggcgcgccctgcgtatggcagtcgaacacgacccgcgcatggcaggacagaccccctcgaccaaaggcacgctgaccgcataa

SEQ ID NO: 37377 - DNA, 1056 bp, Neisseria meningitidis
atgaaaacctacgcaccggcactctataccgcagccctgctcaccgcctgcagccccacagccgattcaaaccatccgtccggacaaaatgccccggccaataccgaatccgacggaaaaaacattaccctgctcaacgcctcatacgatttggcacgggatttttacaaagaatacaaccccttatttatcaaaacataccaatccgaacaccccggcacatccgtcagcatccaacagtcccacggcggctccagcaaacaggcattatccgtagccaacggccttcaagccgatgtcgtaaccatgaaccaatcctccgacatcgacctgctcgaaaaaaaaggactggtagaaaaaggctggcaacaagccctccccgaccacgccgcgccctacaccagcactatggttttccttgtccgaaaaaacaaccccaaacagatccgcgattggaacgaccttgccaaagacggcgttaacatcgtcatcgccaatcccaaaacctcgggcaacggacgctacgccttcctcggcgcatacggttacggtctgaaaaccaccaacggcaacgaacaggaagcccaaaaactcgtcgcatccatcctcaaaaacacccccgtttttgaaaacggcggacgcgccgccaccaccaccttcacacaacgcaacatcggcgacgtactcatcacttttgaaaacgaagccaactacgtcagcaaaaaactgacccaaggacagtttgaaatcgtctatccgagctacaccatttccgccgaaagccccgtcgccgtcgtcaacagcatcgtcgcgaaaaaaggcacgcaaaaaaccgcccgcgcctatctcgaatacctttggagcgaaccggcgcaagaactcgccgcctcactctacctgcgcccccgcaaccccgaagtattggcaagacacaaagccgacttcccagacttagacacattctctcccgaagaaaaattcggcggatgggacaacatcatgaaaacctacttcgccgacggcggcatattcgaccgcctgaccgcacaaaaatga

SEQ ID NO: 37378 - DNA, 474 bp, Neisseria meningitidis
atgaaaaaattattggcggccgtgatgatggcaggtttggcaggcgcggtttccgccgccggagtccacgttgaggacggctgggcgcgcaccaccgtcgaaggtatgagaataggcggcgcgttcatgaaaatccacaacgacgaagccaaacaagactttttgctcggcggaagcagccccgttgccgaccgtgtcgaagtgcatacccacatcaacgacaacggcgtgatgcggatgcgcgaagtcgaaggcggtgtgcctttggaggcgaaatccgttaccgaactcaagcccggcagctatcacgtgatgtttatgggtttgaaaaaacaattaaaagagggcgacaagattcccgttaccctgaaatttaaaaacgccaaagcgcaaaccgtccaactggaagtcaaaatcgcgccgatgccggcaatgaaccacggtcatcaccacggcgaagcgcatcagcactaa

SEQ ID NO: 37379 - DNA, 831 bp, Neisseria meningitidis
ttgtccggttcgggcaaatccgtcgcactgcgccaaatggaagattcgggttatttctgcgtggacaatttgcctttggaaatgttgcccgcgctggtgtcgtatcatatcgagcgtgcggacgaaactgaattggcggtcagcgtcgatgtgcgttccggcatcgacatcggacaggcgcgggaacagattgcctatctgcgcggactggggcacagggttgaagttttgtttgtcgaggcggaagaaagcgtgttggtccgccggttttccgaaaccaggcgaggacatcctctgagcaatcaggatatgaccctgttggaaagcttaaagaaagaacgggaatggctgttcccgcttaaagaaatcgcctattgtatcgacacttccaagatgaatgcccaacagctccgccatgcagtccggcagtggctgaaggtcgaacgtacagggctgctggtgattttggagtccttcgggttcaaatacggcgtgccgaacaacgcggattttatgttcgatatgcgcagtctgcccaacccgtattacgatcccgagttgaggccttacaccggtatggacaagcccgtttgggattatttggacggacagccgcttgtgcaggaaatggttgacgacatcgaaaaatttctgacgcattggctgccgcgtttggaggatgaaagcaggagctacgttaccgtcgccatcggctgtaccggcgggcagcaccgttccgtctatgttgtcgaaaaactcgcccgaaggttgaaagggcgttatgaattgctgatacggcacagacaggcgcaaaacctgccgagccgctaa

SEQ ID NO: 37380 - DNA, 1575 bp, Neisseria meningitidis
atgaaaaaatcccttttcgttctctttctctattcatctctacttaccgccagcgaaatcgcctatcgctttgtattcggaattgaaaccttaccggctgcaaaaatggcagaaacgtttgcgctgacatttgtgattgctgcgctgtatctgtttgcgcgttataaaacttcgcggctgctgattgcgctgtttttcgcgttcagcattattgccaacaatgtacattatgcggtttatcaaagttggatgacgggtattaactattggctgatgctgaaagaggttaccgaagtcggcagtgcgggcgcgtcgatgttggataagttgtggctgcctgcgttgtggggcgtggcggaagtcgtgctgttttgtagccttgccaagttccgccataagacgcatttttctgccgatatattgtttgccttcctaatgctgatgattttcgtgcgttcgttcgacacgaaacaagagcacggtatttcgcccaaaccgacatacagccgcatcaaagccaattatttcagcttcggttattttgtcggacgcgtgttgccgtatcagttgtttgatttaagcaagattcctgtgttcaaacagcctgctccaagcagaatcgggcaaggcagtattcaaaatatcgtcctgattatgggcgaaagcgaaagcgcggcgcatttgaaattgtttggctacgggcgcgaaacttcgccgtttttaacccggctttcgcaagccgattttaagccgattgtgaaacaaagttattccgcaggctttatgacggcagtatccctgcccagtttctttaacgtcataccgcatgccaacggcttggaacaaatcagcggcggcgataccaatatgttccgcctcgccaaagagcagggctatgaaacgtatttttacagtgctcaggctgaaaaccaaatggcaattttgaacttaatcggtaagaaatggatagaccatctgattcaaccgacgcagcttggctacggcaacggcgacaatatgcccgatgagaagctgctgccgctgttcgacaaaatcaatttgcagcagggcaggcattttatcgtgttgcaccaacgcggttcgcacgccccatacggcgcattgttgcagcctcaagataaagtattcggcgaagccgatattgtggataagtacgacaacaccatccacaaaaccgaccaaatgattcaaacagtattcgagcagctgcaaaagcagcctgacggcaactggctgtttgcctatacctctgatcatggccagtatgtgcgccaagatatctacaatcaaggcacggtgcagcccgacagctatattgtgccgctggtgttgtacagcccgaataaggccgtgcaacaggctgccaaccaggcttttgcaccttgcgagattgccttccatcagcagctttcaacgttcctgattcacacgttgggctacgatatgccggtttcaggttgtcgcgaaggctcggtaacgggcaacctgattacgggtgatgcaggcagcttgagcattcgcgatggcaaggcggaatatgtttatccgcaatga

SEQ ID NO: 37381 - DNA, 636 bp, Neisseria meningitidis
atggcgcgggtctgggtcaaaatcctcaacctctcgctcaaacacatcgtcgggctcaaataccgcatcatcggcgcggaaaacatccccgaccgccccgccgtcatctgcgccaaacaccaaagcggctgggaaacgctcgcccttcaggacatttttccgccgcaggtttacgttgccaaacgcgagttgttcaaaatcccctttttcggctggggcttgaaactggtcaaaaccataggcatagaccgcaacaaccgccgcgaagccaacgagcagctcataaaacaggggttggcgcgcaaaaacgaaggctattggattaccattttccccgaaggcacgcgccttgcacccggaaagcgcggcaaatacaaactcggcggcgcgcgcatggcgaaaatgtttgagatggacatcgtccccgtcgccctcaacagcggcgaattttggccgaaaaactcctttctgaaatatccgggggaaatcaccgtcgtcatctgtccgaccatcccgcacgcaagcggcagcgaagccgaattgatgggaaaatgcgaacacctcatcgaaacgcagcagccgctcatttccggcgcaggcccgtttgccgccaaaatgccgtctgaaaccgcatga

SEQ ID NO: 37382 - DNA, 3021 bp, Neisseria meningitidis
atggcgcaaacctataactacgctattgtcatgaacgaacgaaatcagctggatgtaaggagggatgggcaatatcaaaaatcaacattaaaggacaaagacagggaacgcaaatttatctatacgagccagagaaacaatttgggccaacaaaacaattttatctcattcgacaataccgatacccttgtttctcaacaaagaggtactgccgtttttggcacagccacctacctgccgccctacggcaaggtttccggttttgatgccgacgggctggaaaagcgcaacaatgccgtcgattggattcgtaccacccgcatcgcgctggcaggctacagatacgacaatgtcgtatgcagaagcaccacagactgtcccaaacttgtctataaaacccgattttccttcgataatcccgacttggcaaaaacaggagtcgggctggataagcacacagagccaagccgcgacaattcgcccatttacaaattgaaggatcatccatggttgggcgtgtctttcaatttgggtgccgagggtaccgccaaaaatggtaagacaatcaacaaattggtatcttcttttaatgaaaagaatagtaataacaacctcgtctataccacggaaggccgcgatatttccttgggcgactggcagcgcgaaacgaccgccatggcctattatctgaacgccaaactgcacctgctggacaaaaaagggattaaagatatcgcccaaggcaaaacagtggatttgggcaccttgagaccgcgcgtcgagacgacaggacgaagctggctaaatttttgggctaagtgggacattaaagataacgggcagattccggtcaagctcggcctgccggaagtcaaagcaggccgctgcatcaacaaagcgaaccccaatcccaaagcccaagccctttcccccgccttgaccgcccccgcgctgtggttcggagctgggcaagatggtaaggcggagatgtattccgcttcggtttccacctaccccgacagttcgagcagccgcatcttccttcaaaatctgaaaagaaaaaccgacaccagcagacccggccgctattccctcgcagacttgagtgcgtcggatattcaaagtaaagagccgactttcacaagtcggcaaacaatcatccgattggatggcggcgtacgtgagatcaaactggatagaagcaatgaggccaccggtttaaatggaaatgacggcaaaaacgaaactttcggcattgttagcgaagggagcttcatgcctgatgacagcgagtggaaaaaagtgctgctgccttggacggttcggggttctgctgatgacggtcgatttaaatcaattaaccaagaatcaagcaaatacagccaaagataccgcatccgcgaaaacggcaacaatagcaagcgtgatttgggcgacatcgtcaacagccccatcgtggcggtcggcgaatatctagctacttccgccaacgacgggatggtgcatatcttcaaacaaagcggcggggacaagcgcagctacaatctgaagctcagctacatccccggaacgatgccgcgcaaggatattgaaaacaaagattccacccttgccaaagagctgcgcgcctttgccgaaaaaggctatgtgggcgaccgctacggcgtggacggcggctttgtcttgcgccgcattacagatgaccaagacaagcaaaaacatttctttatgtttggtgcgatgggcctgggcggcagaggcgcgtatgccttggatttgaccaaagccgaaaacggtgacccgaccgccgtttccctgtttgatgtcaaacatgacaataatggcaagaatagcaataatagcgtgcaattaggctacaccgtcggcacgccgcaaatcggcaaaacccacgacggcaaatacgccgctttcctcgcctccggttatgcgactaaacaaattgacagcggcgagaatacaaccgcgctgtatgtgtatgatttggaaaacaacaatggtacgctgattagaaaaatcgaagtaaccagcggcaagggcgggctttcgtcccccacgctggtggataaagatttggacggcattgtcgatatcgcctatgccggcgatcgcggcgggaatatgtaccgctttgatttgagcggtcaagatcctaatcaatggtctgtacgcaccattttcagcggcaacaaaccgattacttccgcgcccgccatttcccaactgaaagacaaacgcgtggttatcttcggcacgggcagcgatttgagtgaagaggatgtggacagcaaagaaatccaacacgtttacggtatttttgacaatgacacagacacgggtacggcgcaagacgggcagggcaaagggctgctcgagcaaaagctggaaaaagacaaagacggcaaaacgctgtttttaagcgactacaaaaggtctgacggctcgggcgacaagggctgggtagtgaaattggaagccggacagcgcgttaccgtcaaaccgaccgtggtattgcgtaccgcctttgtaaccatccataaatatacgggtaatgacaaatgcggcgcggaaaccgccattttgggcatcaataccgccgacggcggcaagctgaccaagaaaagcgcgcgcccgattgtgccggccgacaatacggctgtcgcgcaatattccggccataagaaaacttccagcggcaaatccatccctataggttgtatggaaaaagacaatggaatcgtctgcccgaacggatatgtttacgacaaaccggttaatgtgcgttatctggatgaaaagaaaacagacggattttcaacaacggcagacggcgatgcgggcggcagcggaacattcaaagagggtaaaaaacccgcccgcaataaccggtgcttctccagaaaaggtgtgcgcaccctgctgatgaacgatttggacagcttggacattaccggcccgatgtgcggtatgaaacgaatcagctggcgtgaagtcttctactga

SEQ ID NO: 37383 - DNA, 2400 bp, Neisseria meningitidis
atgtcaacagtccaaatgaataaaaatattaaatctttaaatttacgggaaaaagacccgtttttaagtcgtgaaaaacagcgttatgaacatcctttgcccagtcgggaatggataatcgaattgttggagcgcaaaggtgtgccttcaaaaatcgaatcgcttgcgcgcgaactgtcgattacggaagacgagtatgtcttttttgaacgccgtctgaaggcgatggcgcgggacggtcaggttttaatcaaccgtcggggcgcggtttgcgcggcggacaaattggatttggtcaaatgccgcgtcgaggcgcataaggacggtttcggttttgccgtgccgctcacgcccgccaaagacggtgattttgttttgtatgaacgccagatgcgcggcattatgcacggcgatattgtcactgttcgtcctgccggcatggaccgtaggggccgccgcgaagggacagttctggatattgtcgaacgcgcgcaaagcaaagtggtcggccgtttctatatggataggggcgtggcgattttggagccggaagacaagcgtctgaaccaaagcatcgtattggaaccggacggcgtggcgcgtttcaaacctgaatccggtcaggtcatcgtcggcgaaattgaggtttatcctgagcaaaaccggccggcagtggcaaaaatcatcgaagttttgggcgattatgccgacagcggcatggagattgaaattgccgtgcgcaagcatcatttgccgcaccaattcagtgaagcgtgtgccaaagccgtgaaaaaaattcccgaccatgtacgcaaaagcgatttgaaaggccgcgtcgatttgcgcgacctgcctttggtaacgattgacggcgaaacggctcgagattttgacgatgcggtgtttgccgaaaaaatcggacgcaattaccgtctggtcgtggcgattgccgatgtcagccattatgtccgccccgatgacgctatcgacacggacgctcaggaacgcagcaccagtgtttacttcccgcgccgcgtgattcccatgttgccggaaaacctgtccaacggcatctgctcgctcaatcctaatgtcgagcgtttgtgtatggtgtgcgatatggttatcacttacgcgggcaatattaaagaataccgcttctaccccgccgtgatgcgctctcatgcccgcctgacctacaaccaagtttggaaatggctttcaggcggcatcgggcatccgttcaaagcccaaatcgacacgctttacaaactcttcaaaatccttcagaaaaagcgtttcgaacgcggggcggtggagtttgacagcatcgaaacccaaatgcttttcgacgacaacggtaaaattgaaaaaatcgtccccgttgtccgcaacgatgcccacaagctgattgaagaatgtatgttggcggcaaacgtttgcgcagcggattttctgttgaaaaacaagcataccgcattgttccgcaaccatttggggcccacgcccgaaaaactcgccgccttgcgcgagcagttcggtctgttggggcttcaacttggcggcggcgacaacccgtcgccgaaagactatgccgcgcttgccggacagttcaaaggcaggccggatgccgaattgctgcaagtcatgatgttgcgctccatgcaacaggcggtttacgaaccgcattgcgacggacactttggtcttgcctacgaagcatacgcccacttcacctcgcccatccgccgctatcccgacctgaccgtacaccgcgccatcaaagccgtgttgaatcagcaaacctacacgccaaaaaaaagctggcaggctttgggcgtgcatacctcgttctgtgagcgccgtgccgacgacgccagccgcgacgtggaaaactggctgaaaacctactatatgcgtgacaaagtcggcgaaatatttgaaggcaaaatttccggggtggcaaattttggaatatttgtcactttggacgatatccatatcgacggtctggtgcatatcagcgatttgggcgaagactatttcaacttccgccccgaaatcatggcaatcgaaggtgaacgcagtggcatccgtttcaatatgggcgacagggttgccattaaagtggcccgtgccgatttggatgatggaaaaatcgattttgtcctgattgccgaggggagcggcagagggcggaaagttaaatcatccgcgtctgccaaaccggcagggacggcggggaaagggaagccgaaaaccgccgccgggaaaaaaacagcccgaggcggcaaagtaaggggaaggggcgcgtctgccgccgcagaatcggggaaaaaggcaaagaaaccgattccgattgaagtacaaaaggtaaaaaaacggaaaggcaaatcataa

SEQ ID NO: 37384 - DNA, 678 bp, Neisseria meningitidis
atgagcatcaagcaatggccggagggggaaaggcccagggaaaagctgttggaacgcggggcggcggctttgagtgatgccgaacttttggcaatcctgctgcgcgtcggcacgcgcggaatgagtgcggtcgatttggcgcgttatttgctgcaggagttcggcagtttggggaggctgatgagcgcggaggtcggcaaactgtcggcatacaaagggatggggacggcaagtttcacacagtttgccgtagtcagggaaatcgggcggcggatattggcggaagaattgcaggagagcatcgtcctgtccgatccggatacggtggccgattatttacgctttcatttggggcaggaaaaagtcgaagtcagcgtcgcgctgctgctgaaccgccaaaaccaactgattgcggtcagagagctgtcgcgcggtacggttgcggaaaacacgatttacatccgcgaaatcgtcaaactggcattggacgaatatgccgacagcctgattattgcgcacaaccatccgggcggctcgcccgaaccttcgcaggaagacatcatgttcacaaggcggctggcacaggcaatgtcgctggtcgatgtgtcgctgctcgaccattttatcgtaacggcgcaaaccgtccgttcgttcaggcagctcgggctgatgccctga

SEQ ID NO: 37385 - DNA, 525 bp, Neisseria meningitidis
atgaaaaaagcacttgccacactgattgccctcgctctcccggccgccgcactggcggaaggcgcatccggcttttacgtccaagccgatgccgcacacgcaaaagcctcaagctctttaggttctgccaaaggcttcagcccgcgcatctccgcaggctaccgcatcaacgacctccgcttcgccgtcgattacacgcgctacaaaaactataaagccccatccaccgatttcaaactttacagcatcggcgcgtccgccatttacgacttcgacacccaatcgcccgtcaaaccgtatctcggcgcgcgcttgagcctcaaccgcgcctccgtcgacttgggcggcagcgacagcttcagccaaacctccatcggcctcggcgtattggcgggcgtaagctatgccgttaccccgaatgtcgatttggatgccggctaccgctacaactacatcggcaaagtcaacactgtcaaaaacgtccgttccggcgaactgtccgccggcgtgcgcgtcaaattctga

SEQ ID NO: 37386 - DNA, 957 bp, Neisseria meningitidis
atgaaagtcctctttatcgccgacccgatggcaagtttcaaaacctacaaagacaccacctacgccatgatgcgcgagatggcaaaacgcggttggcggctgtttcataccttgagcggggaattgtcggttaaaaacggtctggtggttgctgatgcgtctgcttttgagtttctcggcgcacaagacgaccacgacaaaaactggtttgccgccgccgacaaagttcagacggcattgaaagcatttgatgccgtgattatgcgtaccgatccgccgttcgatatgcaatacctctacgccacccaattactgacgctggcggaacagcagggcgcgaaagtctttaacagcggacagtcgatgcgtgacttcaatgaaaaactggcgattttgaacttcagccgctttaccgcgcccacgctggtaacgacccgttccgccgatgtccgcgcatttttgaaagaacacggcgacattatcatcaaaccgctggacggtatgggcggtatgggtattttccgcctgaccgaaaaagaccccaacatcggcagcatcctcgaaaccctgatgcggcttgattcccgcaccattatggcgcaacgctacattcccgaaatcgtacacggtgacaaacgcatcctgattatcggcggcgaagtcgtcccctatgctttggcgcgtatcccgcaaaacggcgaaacacgcggcaaccttgcggcaggcggacgcggcgtggcgcaggaattggacggacgcgaccgcgaaattgccgaaacgctcgcccccgaactcaaacggcgcggcatcctgctggccggtttggacgttatcggcagcaacctgaccgaagtcaacgtaaccagcccgaccggattccaagaaattatgaaacaaaaaggtttcgacgtggcggcaatgtttgccgatgccgttgccgcgtggtcggtacgttaa

SEQ ID NO: 37387 - DNA, 171 bp, Neisseria meningitidis
atgaaatacggcgtattttttgcggcggcaaccgccctcctgctctcggcctgcggttacaaaggcgacctctacctgcccaaagaaggcgacaaggcgcgtttcggcgtaatccaaaccggtttgcagcttcaaggcaaaccgcaatccgcccctccaacccaaaaatga

SEQ ID NO: 37388 - DNA, 972 bp, Neisseria meningitidis
atgcccgccaagtttcaacaagaaaccctcaaatcccgtttcgcacaagccaaagtcctggttgttggcgacgtgatgctcgaccgctattggtttggcgatgtgtcccgtatttcgcccgaagcccctgttcccgtagcaaaaatcggacgtatcgaccaacgcgcgggcggtgcggcgaacgttgcgcgcaacatcgcttcgttgggcggcagggcagggctgttgtcggtaaccggcgacgacgaagccgccgacgcgctcgacgcgctgatggtacaagacggcgtcgcctcctatctgatgcgcgacaagcaaatcgccaccaccgtcaaactgcgcgtcgtcgcccgcaaccagcagcttatccgccttgattttgaagaacatcccaaccgcgaagtattggaacaaatcaagcagaaatacctcgaagtattgtccgaatacgatgcaattattttttcagactacggcaaaggcggcctgtcgcacatctccgatatgatcgattgtgcgaaacacgaaggcaaaatcgtattaatcgaccccaaaggcgatgattacgaaaaatacgccggcgcaaccctgattacgcccaaccgcgccgaattgaaagaagtggtcggcagttggaaaaacgaaggcgagctgaccgaaaaagcgcaaaacctgcgccgccacctcgacctgaccgccgttttactgacccgaagcgaagaaggcatgaccttgttcagtgaaggcgaaccgatttaccagcccacccgcgcccaagaagtttacgacgtatccggtgcgggcgacaccgtcattgccggaatgggcttgggtttggcggcaggctgcaccatgcccgaagccatgtaccttgccaatactgcggccggggttgtcgtggcgaaactcggtacggcggtttgctcgtttgccgaattgaccaaggcattgtcagggcaatcaacaatgtag

SEQ ID NO: 37389 - DNA, 1080 bp, Neisseria meningitidis
atgagccgctcggcaactgaatttgtttctccgctgacttttcaggctttaagcggcaatcctgtcctgaccgacacgcacggcggcaacggttcaaacggtatggaacatatcaacctgacccggaatgcggatgtttttctgattgcgccggcaagtatgaataccgtggcaaaaatctgtaacggcgtggcagataacctactgaccagtctggcagccgcacggaaatgtccgcttgccatcgctcccgcgatgaatgtggaaatgtggctcaaccctgccaaccaacggaatatcgcacaactggtttcagacggcattactgtctatatgccgggcttaggcgaacaggcttgcggagaaaatggtatgggaaggatgccggaacctgccgaattgctggatttgcttccggacttgtggacaccgaaaattttaaggggcaagaaaatcttgattaccgcaggtgcgacatttgaagccattgaccctgtccgaggcatcacaaatacctccagcggaaaaatgggcgtggctctggcgcgggcgtgccgtgccgccggtgcggaagtcagcctgattcacggacagcttcaaaccgcgctgcctttcggcatatccgatacggttcaagccgtcagtgccgaagatatgcatcgcgcagtgcatcgtttgattgaaaaacaagatgcttttatttctgttgccgccgtctcagactataaggttaaaaacaggagtacgcaaaaattcaaaaaagataaaaatgccaaacggctatccatcgaattggatgagaaccccgatattttggcttctattgcctcattgccgaacccgccgttctgcatcggttttgccgctgaaacggagaatgtaatggcatatgcacgagaaaaacgtattaagaaaaaaataccggtaatagttgccaatgatgtttcaatcgcgatgggcaaaccgaccaaccggattaccattatcggggacgacggggaactatcttttcccgaaacaagtaaagatgaagcggcgatgcagattgttgaaaggcttgccgtatatttgaacaaataa

SEQ ID NO: 37390 - DNA, 975 bp, Neisseria meningitidis
atgccgtctgaaaaaaatatcggttttatggcaggaagcagccgtccgttgtgggtcgcttttgcactgttgctggtttcctgcgttctgtttatgacgctcaacgtcaaaggcgattgggactttgttttgcacctgcgcctgaccaagcttgccgcgctgctgatggtcgcctatgcggtcggcgtgtccacgcaactcttccaaacgctgaccaacaatccgattctgaccccttcgattttgggtttcgattcgctgtatgtgtttttgcagaccttgctggtgtttacgctcggtggtgtgggctatgcttccctaccgttgacgggcaaattcggctttgaactggtcgtcatgatgggcggctcgctgctgttgttctacacgctcgtcaaacaaggcgggcgcgatttgtcgcgcatgattttaatcggcgtgattttcgggattttattccgcagcctgtcatcgctgctttcgcgcatgatagaccccgaagaatttacggcggcgcaggcgaatatgtttgccggattcaataccgtacacagcgagcttttgggcataggcgcgctgattctgctcgtcagcgcggcggtcgtttggcgcgaacgctaccgcttggacgtacaccttttggggcgcgaccaagccgtcaatttgggcatcagctacacgcgcaacaccttatggatactgctttggattgccgcgctggtggcgacggcgaccgccgtggtcggccccgtaagctttttcgggcttctcgccgcctcgcttgccaaccacttttccccatccgtgcgccattccgtccgcctgccgatgacggtttgtgtcggcggcatcctcttggtcggcggacagaccgtattcgaacacttcttgggcatgaaggcggtattaagcgtggtggtcgaatttgcgggcggactcgttttcctctatctcgttttaaaacacaaaaaatga

SEQ ID NO: 37391 - DNA, 768 bp, Neisseria meningitidis
atgcaagaaataatacaatctattgtttttattgctgccgcaatactgcacggaattacaggcatgggatttccgatgctcggtacaaccgcattggcttttatcatgccattgtctaaggttgttgccttggtggcattaccaagcctgttaatgagcttgttggttctatgcagcaataacaaaaagggtttttggcaagagattgtttattatttaaaaacctataaattgcttgctatcggcagcgtcgttggcagcattttgggggtgaagttgcttttgatacttccagtgtcttggctgcttttactgatggcaatcattacattgtattattctgttaatggtattttaaatgtatgtgcaaaagcaaaaaatattcaagtagttgccaataataagaatatggttctttttgggtttttggcaggcatcatcggcggttcaaccaatgccatgtctcccatattgttaatatttttgcttagcgaaacagagaataaaaatcgtatcgcaaaatcaagcaatctatgctatcttttggcgaaaattgttcaaatatatatgctaagagaccagtattggttattaaataagagtgaatacggtttaatatttttactgtccgtattgtctgttattggattgtatgttggaattcggttaaggactaagattagcccaaatttttttaaaatgttaatttttattgttttattggtattggctttgaaaatcgggcattcgggtttaatcaaactttaa

SEQ ID NO: 37392 - DNA, 999 bp, Neisseria meningitidis
atgagacgtaaaatgctaaacgtaccaaaaggcagttatgatggtatgaaaggttttaccattattgaatttttggttgcgggcctgctcagtatgattgtcctgatggcggtcggatcgagttacttcacgtcccggaaattaaatgatgcggcaaacgagcgtctttccgcacaacaggatttacggaatgcggcaacattgattgtccgcgatgcaagaatggcagggggcttcggttgtttcaatatgtccgagcatactaaaaacgatattattgttgatccaagtaagcaaactcaacctgtccctgcaaaacccggtgccaaacaagaaaatccccttttttctttagagtgggctaatactaataatactaataataatacagctaaattgattcctattgctgaatccacagatattaaatatccgggttttgcccaggctcgtccggcattgattttccaatacggaatcgatgatcttgatgcgagtgctgagactgttgtagtcagcagctgttccaaaatagcaaaaccgggtaagaaaatatctaccttgcaagaagcaaagagtgcattacagattactaatgatgataaacaaaatggaaatatcacccgtcaaaggcatgtggtcaatgcctatgcggtcggcaggattgccggtgaggaaggtttgttccgcttccaattggatgataagggcaagtggggtaatcctcagttgctcgcgaaaaagattagagatatgaaagtgcggtatatctatgtttccgactgtcctgaagatgacgatgccggcaaagaggaaacattcaaatatacggatacattcaacagcgccaaagatgctgttacgcccgccggggtggaggttttattgagtagcggtactgataccaagattgccgcttcttcagacaatcatatttatgcttaccatatcgatgcgacaatacgcgggggaaatgtatgcgcaaacagaacactttga

SEQ ID NO: 37393 - DNA, 2457 bp, Neisseria meningitidis
gtgttggacggttcgacgaaactcttgtccgtcaaaatcaacggcgtggcggcggattatgtgttggaaggcgagactctgacgattgcagacgtgccgtccgaacgcttcaccgtcgaagtggaaaccgagatcctgccggcggaaaacaaatcgctgatggggctgtatgcttccggtggcaatctgtttacccaatgcgagccggagggcttccgcaaaatcacgttctacatcgaccgtccggatgtgatgtccaaattcacgaccaccatcgttgcggacaaaaaacgctatcccgttttgctctccaacggcaacaaaatcgacggcggcgagtgttcagacggccgccattgggtgaaatgggaagacccgtttgccaaaccgagctatctgtttgctttggttgcgggcgatttggcggtcacggaagactatttcaccaccatgagcggcagaaacgtcaaaatcgagttttacaccaccgaagcggacaagcccaaggtcggctttgccgtggaatccttgaaaaacgcgatgaagtgggacgaaacgcgcttcggcttggaatacgacttggatattttcatggtcgtcgccgtaggcgatttcaatatgggtgcgatggaaaacaagggtttgaacatctttaacaccaagttcgtccttgccgacagccgcaccgccaccgataccgattttgaaggcatcgaatccgtggtcggacacgaatatttccacaactggacgggcaaccgcgtaacctgccgagactggttccagctttcgctgaaggaagggctgaccgtgttccgcgaccaagaattttccggcgaccgcgccagccgcgccgtgcgccgcatcgaaaacatccgccttttgcgccagcaccagttccccgaagacgcaggtccgaccgcacatccggtgcgccccgcccgatatgaggagatgaacaatttctacaccatgaccgtttatgaaaaaggcgcggaagtggtgcggatgtatcacaccttgctcggcgaagagggcttccaaaaaggcatgaagctctatttccaacgccacgacggacaggctgtgacctgcgacgatttccgcgcggcgatggcggacgcgaacggcatcaatctcgaccagttcgccttgtggtacagccaggcgggcacgcccgttttggaagccgaaggccgtctgaaaaacaatattttcgagttaaccgtcaaacaaaccgtgccgcctacgcccgatatggcggacaagcagccgatgatgattcccgtcaaaatcgggctgctgaaccgcaacggcgaagcggcggcattcgactatcagggcaaacgcgcaaccgaagccgtgttactgctgaccgaagccgaacagaccttccagttcgaaagcgtaaccgaagccgtcgttccctcgctgctgcgcgggttcagcgcgccggtgcatttgaactatccgtacagcgacgacgacctgctgcttctgctcgcccatgacagcgacgccttcacgcgctgggaagccgcacaaacgctctaccgccgtgccgttgccgccaaccttgccgcactttcagacggtattgaactgccgaaacacgaaaaactgcttgccgccgtcgaaaaagtcatttcagacgacctcttagacaacgccttcaaagccctgcttttgggcgtgccgtctgaagccgagctgtgggagggcacggaaaacatcgacccgttgcgctaccatcaggcgcacgaagccttgttggatacaatcgccgtccgcttcctgccgaaatggcacgaattgaaccgtcaggcggcgaagcaggaaaaccaaagctacgagtacagccccgaagctgccggctggcgcacgctgcgcaacgtctgccgcgccttcgtcctgcgcgccgaccccgcgcacatcgaaaccgttgccgaaaaatacggcgaaatggcgcaaaacatgacccacgaatggggcatcctgtccgccgtcaacggcaacgaaagcgatacgcgcaaccgcctgctggctcagtttgccgacaagttttcggatgatgcgctggtgatggacaaatatttcgccctcgtcggctcaagccgccgcagcgacaccctgcaacaggttcaaactgccttgcagcatccgaaattcagcctcgaaaaccccaacaaagcccgctcgcttatcggcagcttcagccgcaacgtcccgcatttccacgcagaagacggcagcggctaccgcttcatcgccgacaaagtcatcgaaatcgaccgctttaacccgcaggtcgccgcccgcttagtgcaggcgttcaacctctgcaacaagctcgagccgcaccgcaaaaacttggtgaaacaagcattgcagcgcattcgggcgcaggaaggattgtcgaaagacgtgggcgaaatcgtcggcaaaattttggattga

SEQ ID NO: 37394 - DNA, 1200 bp, Neisseria meningitidis
atgtccgaccaactcattcttgttctgaactgcggcagttcatcgctcaaaggtgccgttatcgaccgcaaaagcggcagcgtcgtcctaagctgcctcggcgaacgcctgaccacgcccgaagccgtcattaccttcaacaaagacggcaacaaacgccaagttcccctgagcggccgcaactgccatgccggcgcggtgggtatgctgttgaacgaactggaaaaacacggactgcacgaccgcatcaaagccgtcggccaccgcatcgcccacggcggcgaaaaatacagcgagtctgttttgatcgaccaggccgtaatggacgaactcaatgcctgcattccgcttgcgccgctgcacaaccccgccaacatcagcggcatccttgccgcacaggaacatttccccggcctgcccaatgtcggcgtgatggatacttcgttccaccaaaccatgccggagcgtgcctacacttatgccgtgccgcgcgagttgcgtaaaaaatacgctttccgccgctacggtttccacggcaccagtatgcgttacgttgcccctgaagccgcacgcatcttgggcaaacctctggaagacatccgcatgattattgcccacttaggcaacggcgcatccattaccgccatcaaaaacggcaaatccgtcgataccagtatgggtttcacgccgatcgaaggtttggtaatgggtacacgttgcggcgacatcgatccgggcgtatacagctatctgacttcccacgccgggatggatgttgcccaagtggatgaaatgctgaacaaaaaatcaggtttgctcggtatttccgaactttccaacgactgccgcaccctcgaaatcgccgccgacgaaggccacgaaggcgcgcgcctcgccctcgaagtcatgacctaccgcctcgccaaatacatcgcttcgatggctgtggcctgcggcggcgttgacgcactcgtgttcaccggcggtatcggcgaaaactcgcgtaatatccgtgccaaaaccgtttcctatcttgatttcttgggtctgcacatcgacaccaaagccaatatggaaaaacgctacggcaattcgggcattatcagcccgaccgattcttctccggctgttttggttgtcccgaccaatgaagaactgatgattgcctgcgacactgccgaacttgtcggcatcttgtag

SEQ ID NO: 37395 - DNA, 294 bp, Neisseria meningitidis
atgaaaaccctcgtcctcctcctgctttccttctccacgaccaccgctttcgccgcatacggtttgggtttggggcaggcaccgaaatatcctgccgactttcgcgcctacggttatgtttattccggacggcagggctgggttttaaaaacagaggcggatgccattaaattagacacgcttttcaaacgctttgtgtaccgtccttccgccgccaatcaaaaccccgtcggacaagccgtcggacagcgttcggacggcatacccgccaaccacacaaaggaaaaaccatga

SEQ ID NO: 37396 - DNA, 1071 bp, Neisseria meningitidis
atgaccaaacatatcgccatcctccgaggcgacggcatcggccctgaaatcgtcgccgaaaccgtccgcgtactcgacaaactcatcgcacaaggcttggacgtcggctacgaatacgcgcctttgggcggcgaagcctatgacgaatacggccatccttatccagaatttacgcaaaacctttgccgtaaagccgatgccgtattacttggtgcagtcggttctccgcaatacgacaatcttgaccgtccgctgcgccctgagcgcggcttgttggccatccgtaaagacctgaatctgtttgccaatttgcgtcctgccattttgtataaagagctggccaatgcttccactttgaaaccggaaatcgtagccggcctcgacatccttatcgtacgcgaactcaccggtgatatttactttggcgaaccgcgcggcatccgtattttggaaaacggcgaacgcgaaggctacaacaccatgaaatacagcgaaagcgaaatccgccgtattgcccatgttgccttccaatccgcccaaaaacgcagcaaaaaagtctgttccgtaggcaaagccaacgttttggaaaccaccgaactgtggcgcgaagtctttgaagaaatcggcaaagaataccctgatgtcgagctttcccatatgtacgttgataacgcagccatgcagttggtacgcgcgcctaaacaatttgacgtgattgccaccggcaacatattcggcgacattctgtctgacgaagcctccatgctgaccggttccatcggtatgctgccttccgcttctttggacgaaaacggcaaaggcctgtacgaaccgtctcacggctctgctcctgacattgccggtcaaaacaaagccaatccgctggcgaccgtattgtctcttgctatgctgctgcgttacagcctgaacgacgaagcacgcgcgcaacaagttgaaaacgctgtacaaaaagtactgcaacaaggcttgcgtaccaacgacatttacgaagaaggcacaaaactcgtttcctgctccgaaatgggcgatgcggtactcgccgccttgtaa

SEQ ID NO: 37397 - DNA, 729 bp, Neisseria meningitidis
atgtctcaaattactatgcgtcagatgattgaagccggtgtccacttcggccaccaaacccgtttctggaacccgaaaatggcacaatacattttcggcgcacgcaacaaaatccatatcgtaaacttggaaaaaaccctgccgatgttccaagacgcgcaagaagccgtacgccgtttggttgccaacaaaggtacagtattgttcgtaggtaccaaacgccaagcccgcgacatcatccgcgaagaagcgacccgtgccggtatgcctttcgttgattaccgctggttgggcggtatgctgaccaactacaaaaccgttaagcaatccatcaaacgcctggaagaaaaaaccgcagccttggaaaatgctgccgaaagcggtttcagcaaaaaagaaattctggaaatgcaacgcgatgttgaaaaactggaacgttctttgggcggtatcaaaaacatgaaaggcctgcccgacgcgattttcgttatcgataccggctaccaaaaaggtactctggtcgagactgaaaaactgggcatccccgttatcgccgtagtcgataccaacaacagccctgacggcgtgaaatacgtcatccccggcaacgacgactccgccaaagccatccgcctgtactgccgcggcatcgctgacgcagttttggaaggcaaaaaccaagcgctgcaagaaaccgtagccgctgcccaagaagccgctgccgagtaa

SEQ ID NO: 37398 - DNA, 1389 bp, Neisseria meningitidis
atgaacactcgcaccgaacacgacaccatgggcaatgtcgaagtcccgtccgaagcctattggggcgcgcagacccagcgcagccgcaacaatttcaaaatcggcggcgaaaccctgccgcagccgctgatttatgctttggcgttggtgaaaaaagccgctgccgcgaccaatgtttccctcggcaggattaagccggaacaggcggatttgattacgcaggcggcggatgatgtgttgaacggcaagctcaacggacagtttcctttagtggtttggcagaccggctccggcacgcagtccaatatgaacatgaacgaagtgctggcgaaccgcgccaacgaaatcgccggtacgggtttggcggcgtatcagcccgtccatcccaacgaccatgtgaaccacgcgcaatcgaccaacgacgcattcccgaccgctatccacgttgccgccgcgattgaaatcaaccgccacctcatccccgccgtaaaagccctgcgcgacaccttggacaaaaaagcccaagccttcgcccctatcgtcaaaatcggccgcacccacttgcaggacgcgacgccgctgactttaggccaagaattttccggctacgtttcccagcttgatcacggcttaggccgtctgaacgatgcgcttaaagacttgtatgaacttgctttgggcggtacggcggtcggcacgggtttgaacagccatcccgaatacgccgaaaaagccgccgccaaactcgccgaactgtccggcttgccgtttgtcagcgcgccgaacaaatttgaagccttaggcggacgcgatgccgccgttgccgcttcgggcgcattgaaaacgctggcggcaagcctgaacaaaatcgccaacgacatccgctggctggcaagcggcccgcgttgcggtttgggcgaaatcaaaatccccgaaaacgagccgggttcgtccatcatgccgggcaaagtcaacccgacccaatgcgaagcaatgacgatggtgtggtgccaagtgttcggcaacgacgttaccatcggtatggcgggcgcgtcgggcaatttcgagctgaacgtctatatgcccgttatcgcctacaacctcttgcaatccatccgcctgttgggcgacgcgtgcaacagcttcaacgaacactgcgccgtcggcatcgaacccgtaccggaaaaaatcgactatttcctgcaccattccctgatgctcgttaccgcgttgaaccgcaaaatcggttacgaaaacgccgccaaagtcgccaaaaccgcctacaaaaacaacaaatcgttgcgcgaaaccgccgttgagttgggcttgctgacgggcgaagaatttgacgaactggtcgttcctgccgatatggttcatccgcgctaa

SEQ ID NO: 37399 - DNA, 474 bp, Neisseria meningitidis
atggaacaaaaagggtttacattgattgagatgatgatagtcgtcgcgatactcggcatcatcagcgtcattgccataccttcttatcaaagttatattgaaaaaggctatcagtcccagctttatacggagatggtcggtatcaacaatatttccaaacagtttattttgaaaaatcccctggacgataatcagaccatcaagagcaaactggaaatatttgtctcaggctataagatgaatccgaaaattgccgaaaaatataatgtttcggtgcattttgtcaataaggaaaaaccaagggcatacagcttggtcggcgttccaaagacggggacgggttatactttgtcggtatggatgaacagcgtgggcgacggatacaaatgccgtgatgccgcttctgcccagacctattcggagaccttgtccgcagatagcggctgtgaagctttctctaatcgtaaaaaatag

SEQ ID NO: 37400 - DNA, 897 bp, Neisseria meningitidis
atgtttcgtttacaattcgggctgtttccccctttgcgaaccgccatgcacatcctgttgaccgccctactcaaatgcctctccctgctgccgctttcctgtctgcacacgctgggaaaccggctcggacatctggcgttttaccttttaaaggaagaccgcgcgcgcatcgtcgccaatatgtgtcaggcaggcatgaatcccgaccccaaaacggtcaaagccgtttttgcggaaacggcaaaaggcggtttggaacttgccctcgcatttttcaaaaaaccggaagacatagaaacaatgttcaagtcggtacacggctgggaacacgtgcagcaggctttggacaagggcgaagggctgctgttcatcacgccgcacatcggcagctacgatttgggcggacgctacatcagccaacggctgccattccccttaaccgccatgtataaaccgccgaaaatcaaagcgatagacaaaatcatgcaggcgggcagggttcgcggcaaaggaaaaaccgcgcctaccagcatacaaggggtcaaacaaatcatcaaagccctgcgttcgggcgaagcaaccatcgtcctgcccgaccacgtcccctcccctcaagaaggcggggaaggcgtatgggtggatttcttcggcaaacctgcctataccatgacgctggcggcaaaattggcacacgtcaaaggcgtgaaaaccctatttttctgctgcgaacgcctgcctggcggacaaggtttcgatttgcacatccgccccgtccaaggggaattgaacggcgacaaagcccatgatgccgccgtgttcaaccgcaatgccgaatattggatacgccgttttccgacgcagtatctgtttatgtacaaccgctacaaaatgccgtaa

SEQ ID NO: 37401 - DNA, 2526 bp, Neisseria meningitidis
atgaatccaaactcaaaacataacactaactttaccaatcttcttaaaccgtctgatagtgatataaaacaatttgccgcacaacacatctgccgcctcaccgacctcctcaaccgctacgcctacgaatactacaccctcgacgcgcccagcgtacccgatgccgaatacgacaaattgttccgcgaactcgaagcgttggagttaaaccatcccgagctcaaactgcccgacagcccgacccagcgcgtcggcggcgagcctttggcgggatttgccgaagtacgccacgaagtgccgatgctgtcgctgaccaacgctttttccccgcaagatgaaaacggcgtgttcgaccatgccgaaatgtacgccttcgaccaacgcgtgcgcgacggcttggacggcggcaatcccgaatacgttatcgaacccaaattcgacggcctcgccatcagcctgctctaccgcgacggcgtattggtgcaggcggcaacgcgcggcgacggcacgacgggcgaagacgttacccaaaacatcaaaaccgtatccaacatccccttgcggctgcacggcgaaaatacgcccgaactcatcgaggtacgcggcgaagtgctgatgctcaaagccgattttgtcgccctcaataaaagacaagccgaaaacgggcaaaaaccctttgccaatccgcgcaacgccgccgccggcagcctacgccaactcgattcgcgcatcaccgcgcaacgcaaactgcactttttcccctactccgtcgcccgccagcaagatggtttcgtcgcggaagaacacatccaggaactcgcctatttccaagcactcggcttcagtctgcccaatggcaatttcggctgtttcaaaaatatcgacgaagtattggcgttttacgaacacatgcagcaaaaacgccccgaactgccctacgaaatcgacggcatggtcgtcaaagtcaacagcttggcgcaacagcacgaactcggcttcatctcccgcgcgccgcgttgggcggttgcccacaaattccctgccgaagaagccctgaccattgtcgaagcgattgacgtgcaaatcggcaggacgggcgcggtaacgccggttgcccgattacagcccgtattcgtcggtggcgtaactgttaccaacgccaccctgcacaatcaggacgaagtatcgcgcaaagacgttcgcgtcggcgataccgtcgtcgtacgccgtgccggagacgtgattcccgaagttgtgcgcgtgatttttgaacgccgcccgatgcgggaaaccgccgttgccgtttcagacggcatcgggcatcggcaggacgatttgtttgccgaaacaccgtccgccaatcaaacccaatccgttccgctccacaagccctaccgcctgccgacccactgccccatctgccgcagcgaaatcgaacgcgaagaaggcgaagccgtcgcccgatgcagcggcggtatgctttgtcaggcacaacgcgcgcaaggcttaatccacttcgcctcgcgcaaagcgatggacatcgacggcttgggtgaaaaacaaatcgaacagcttgtcgcgcaagacctcgtccgccacttcgccgatctctaccgcctcgacatcccgaccttgcaaaaaatgaaggaaacagcggacaaaaccgttgccgaatcggatcaaatgccgtctgaaggcagttcggtcggcgcgtcgggcaaacataaaaaacaaccagtcaagtgggcggaaaacatcctcgcaggcatagaagccagcaaaacgcccgaactcgcccgcttcctgttcgcgctcggcatccgccacgtcggcgaacgcaccgccaaaacgctggcacaggcattcggcacattggaacgcgtccgccgcgcccccgaacccgtcctcgcctgcctgcccgacatcggtacggtagtggcgcgttccattgcccacttcttcgcccaagccgaacagcaggcgatgatagacgaactgctcgccgcaggcgttgccccgcaaacccaagccgttaccatcccgcccgcccgccacgccgaaccgcaacgctggatcgcccgcctgcccggtttcaaaatcagcgaaaacaaagcccaagccttatgggaactcgccggcaaaaacatagaagggctgcaaaccgacaaagccctccccaccgactggcaggcgtggcgcagcgaaccacaaaacgccgccctgctcgaaaacctgaaaaccttcttcgcgcaaatgccgtctgaagacgaggcggcgcaaggttcagacggcatcaataaagccgtggcgggcaaaaccttcgtgttaaccggcaccctgcccaccctcaaacgcgaccaagcccaatccctaatcgaagccgcaggcggcaaagtttccggcagcgtgtccaaaaaaaccgattacgtcgtcgccggagaagccgcgggcagcaagctggaaaaagccaatgccttgggcgtttccgtcctcagcgaagccgaactgcttaccctgctcggctga

SEQ ID NO: 37402 - DNA, 2256 bp, Neisseria meningitidis
atgggacagtacaagaagctgtggtacttgctgtttgccgttctggcggtatgctttaccattcttggctatatgggcagcgaggtttataagaaagccccgccttaccccgaacaggtcgtttccgcatcaggcaaagtgctgatgacgaaagacgatattttggcaggtcagtctgcatggcagagtaccggcggcatggaagtcggttcgattctgggccacggcgcatatcaggctccggactggacggcggactggctgcatcgtgagttggttgcctggttggatctgactgcgcaagaaacttacggtaaaaaatttgacgaagtttctcctgaagaacaagctgttctgaaaacacgtttggctgacgaataccgcaaccaaagccgtgtgaaggaagacggttctgtagtcatcagtgatacgcgcgtgaaagccatcgaaagcatcctgccttattatcacggtgtttacggcgacgatcccaagctgcaaaccactcgtgaacactttgcaatgaaaaacaatacattgccaagccaagaagcgcgtgaaaaactgttcgacttcttcttctggacttcttggtctgcttcgaccaaccgtcctgacgagacgttcacttataccaacaactggccgcacgagcctttgatcaacaatgtaccgactactgaaaactacatgtggtcgtttaccagtgtcgtactgctcttgatgggcatcggtttgttgatgtggggttattccttcctgaccaaacatgaagaggttgaagtacctactgaagatcctatctctaaagtacaactgactccttctcagaaagcgttgggcaaatatgtatttctgactgttgcactgtttgtcgtacaggtattgctgggcggtctgaccgcgcactacaccgtcgaaggtcaaggcttctacggtatcgataccgcactgggctttgaaatggccgactggttcccatatgcgctgacccgtacttggcacatccaatccgctattttctggattgcaaccggcttcctgacagcaggtctgttcttggctccgattgtgaacggcggtaaagatcctaaattccaacgtgccggtgtgaacttcctctatatcgccctcttcatcgtggtcggcggttcttacgcgggcaacttcttcgcgttgacgcacatccttccccccgaatttaatttctggttcggacaccaaggttacgaatacctcgatttgggtcgtttctggcaactccttttgatggtcggactgctgttgtggctgttcctgatgttgcgctgcacggtttccgccttcaaagaaaaaggcgtggacaaaaacctgctggcaatctttgtcgcttctatggtcggtgtgggcgtgttctacgcaccgggactgttctatggcgaaaaatccccgattgccgtaatggaatactggcgttggtgggtggttcacctgtgggtggaaggcttctttgaagtatttgccactgccgccttcgcatttgtcttctacaatatgggctttgtccgccgcagtaccgccactgcctccactttggccgctgccgccatctttatgttgggcggcgttccgggtacgctgcaccacctgtacttctccggctctacctccgcctctatggcaatcggcgcctgcttctccgctttagaagtcgtgccgctggtgttgctgggtcgtgaagcatacgagcattggtcttaccaacacctgtccgactgggcgaaacgcctgcgttggccgctgatgtgcttcgttgcagtcgccttctggaatatgatcggtgccggcgtattcggcttcctgatcaatccgccgatttccctgttctatatccaaggtttgaacacttctgccgttcacgcgcacgccgccttgttcggtgtgtacggtttcttggcattgggcttcgtattgctggttgcccgttatttgaaaccgaacgcgcagtttgacgacaaactgatgacttggggcttctggctgctcaacggcggcttggtcggtatgattgccatcagcctgttgccggttggcgtgattcaggcatacgcctccatcacgcacggcctgtggtatgcacgcagcgaagagttcctgcaaatggaaatcctcgacaccttgcgttgggtacgtacggcagctgacttggtctttatcggcggtgcaatctgcgttgccatccaagccactaaaatcgtattcggccgcgacaaataa

SEQ ID NO: 37403 - DNA, 1080 bp, Neisseria meningitidis
atgaaaacactgaccgtacacaccccgtcccacagctaccccatctttatcggcaacggactgctgccgcaggcaggaagcctgctcaaaccgcatttgggcaaacgcgccgccatcatcaccaacgaaaccgtcgccccgctctacctcggcacgcttcagacggcattggatgcggcaggcgtatcccatttcagcatcatcctgcccgacggcgaggcgcacaaaaactggcagacgctcaacctcatctttgacgggctgatgcaaaaccgcgccgaacgcaaaaccacgctcatcgcactgggcggcggcgtgatcggcgatatgacgggttttgcggcggctacttatcaacgcggcgcgccatttgttcaaattcccactactttattaagtcaggtcgattcctccgtcggcggcaaaaccgccatcaaccacccgctcggcaaaaatatgatcggcgcgttctaccagccgcaggcggtgcttgccgacttggacacgctgcacaccctgcccgcccgcgaactgtccgccggtatggcggaagtcatcaaatacggcacgctcggcgacattagtttttttgaatggctggaacagcatatgcccgaactgatggcactcgaacgcgcgcccctcatccaagccgtgtaccgctgttgccaaatgaaggcagacatcgtcgcccaagacgaaaccgaacagggcatacgcgcatggctcaacctcggacacaccttcggacacgccattgaaaccgagatgggttacggtacttggctgcacggcgaggccgtcgccgccggctgcgtgttggcggcgcgtttgtccgaacaactgggcaaaatctccgccgcagataccgcgcggctcgccgccctgctcgaagccgccggactgccgtccgcgccacccgtgtttgcctttgaaaaatggctggaacacatgagccacgataaaaaagtcagtagcggcgtgatgcgctttatcgggttgaaccgtctgggcgaagccgtcatcaccgaaattaccgacacggacattctccgccgcaccctgcaaccgtatctctga

SEQ ID NO: 37404 - DNA, 465 bp, Neisseria meningitidis
atgtacaaacatttggttgttgccgttgacggcagtgaaacgtccatcaatgccctgaaacatgccgccgagcttgccggggtcaacggtgcgcgtctgactttggtacacgttgccaatcctgccgaatatatggcgctcgcccccgaatttttgcaacacgaaagctacgaagccgccgccgtcgcgcaaggcaacgaagttttggatgccgccgagcgcaccgcccgggaactgggtgtggaaaataccgtcaaacacctgctggttgccaataagggtgcgcgtgaaatggcgcaggatttggttgattatgccgatgaaaacggtgccgacctgctggtgttgggcacgcacggacgtaccggactgatgcaccttttaatgggcagttttgccgaaacggtaatgcgccaaagccacctgccgcttttgattatccgcagcaaagccgaagaggcgtag

SEQ ID NO: 37405 - DNA, 1521 bp, Neisseria meningitidis
atgcagctgatcgactattcacattcatttttctcggttgtgccaccctttttggcactggcacttgccgtcattacccgccgcgtactgctgtctttaggcatcggtattctggtcggcgttgcctttttggtcggcggcaaccccgtcgacggtctgacacacctgaaagacatggtcgtcggcttggcttggtcagacggcgattggtcgctgggcaaaccaaaaatcttggttttcctgatacttttgggtatttttacttccctgctgacctactccggcagcaatcaggcgtttgccgactgggcaaaacggcacattaaaaaccggcgcggcgcgaaaatgctgaccgcctgcctcgtgtttgtaacctttatcgacgactatttccacagtctcgccgtcggtgcgattgcccgccccgttaccgacaagtttaaagtttcccgcgccaaactcgcctacatcctcgactccactgccgcgcctatgtgcgtgctgatgcccgtttcaagctggggcgcgtcgattatcgccacgcttgccggactgctcgttacctacaaaatcaccgaatacacgccgatggggacgtttgtcgccatgagcctgatgaactattacgcactgtttgccctgattatggtgttcgtcgtcgcatggttttccttcgacatcggctcgatggcacgtttcgaacaagccgcgttgaacgaagcccacgatgaaactaccgtttcagacgctaccaaaggtcgtgtttacgcactgattattcccgttttggccttaatcgcctcaacggtttccgccatgatctacaccggcgcgcaggcaagcgaaacattcagcattttgggggcatttgaaaataccgacgtgaacacttcgctggtattcggcggcacttgcggcgtccttgccgtcgttctctgcacgctcggcacgattaaaaccgccgattatcccaaagccgtttggcagggtgcgaaatctatgttcggcgcaatcgccattttaatcctcgcttggctcatcagtacggttgtcggcgaaatgcacaccggcgattacctctccacactggttgcgggcaacatccatcccggcttcctgcccgtcatcctcttcctgctcgccagcgtgatggcgtttgccacaggcacaagctgggggacgttcggcattatgctgccaattgccgccgccatggcggtcaaagtcgaacccgcgctgattatcccgtgtatgtccgcagtaatggcgggggcggtatgcggcgaccactgttcgcccatctccgacacgaccatcctgtcgtccaccggcgcgcgctgcaaccacatcgaccacgttacctcgcaactgccttatgccctgacggttgccgccgccgccgcatcgggctacctcgcattgggtctgacaaaatccgcgctgttgggctttggcacgacaggcattgtattggcggtgctgatttttctgttgaaagataaaaaacgcgccaacgcctga

SEQ ID NO: 37406 - DNA, 561 bp, Neisseria meningitidis
atgaaaacagcacaagaactgcgcgccggcaatgtatttatggtcggcaacgatcctatggtcgttcaaaaaaccgaatacatcaaaggcggccgctcttccgccaaagtcagcatgaaactgaaaaacctgctgaccggcgcggcttccgaaaccatttacaaagccgacgacaaattcgacgtggtcatcctgtcccgcaagaactgtacgtacagctactttgccgacccgatgtatgtctttatggacgaagaattcaaccaatacgaaatcgaagccgacaacatcggcgacgcgttgaaattcatcgttgacggtatggaagaccaatgcgaagttaccttctacgaaggcaaccccatctccgtagaactgcctaccatcatcgtacgcgaagtcgagtacaccgagcctgctgtcaaaggcgacacttccggcaaagtgatgaaaaccgcgcgtctggtcggcggcaccgaaatccaagtgatgtcttacatcgaaaacggcgacaaagtcgaaatcgatacccgcaccggcgaattccgcaaacgcgcctga

SEQ ID NO: 37407 - DNA, 918 bp, Neisseria meningitidis
atggttttggacgggtttgcggcgcattttgacgcttatttggaaaatatcgtgcgcgagggcaagtcggagcacacggtggcggcataccggcgcgatttggaagaactgtttgcgctgttggcacaaatgccgtctgaagctgaaggcggcgtgccgcagggcttgtcgcggcgcgattttacggcggcgttgcggcggctgtcgcagcgcggtttgaatgcgcggacgctggcgcgcaagctgtcgtcttggcggcagtattgtgtttggctggtggaacgcggtctgctgcataccgacccgaccgccgacatcaaaccgccgaagcagcccgagcgcgtacccaaagccctgccgcaggaatggctgaaccggatgctggatttgcccgtggacggcggcgacccgctggcggtgcgcgatcacgccctgttcgagctgatgtacggcagcggtttgcgcgtgagcgagatacacggcttgaatgcagatgatgtctatttggacgaggcgtgggtacacgttaccggcaaagggcgcaagcagcggcaggtgccgctgaccggcaaaagcgtggaagccctgaaaaactatctgccgctgcgtcagacggcatcggacggcaaagccctgtttaccggcaggaacggcacgcgcctgagccaacgccaaatccaaaaacgtttggcgcaatgggcggcgcaaaacggcgacggcaggcacgtttcgccgcatatgatgcgccacagctacgccggacacctgttgcaggcttcgcgcgacatccgggcggtgcaggagctgctcgggcacagcagcctttcgaccacgcagatttacaccaaactcgatttcgaccacatcgcccgcctgtatgacgaagcccacccgcgcgccaagcggcaggacgaatga

SEQ ID NO: 37408 - DNA, 627 bp, Neisseria meningitidis
atgaggaaaatccgcaccaaaatctgcggcatcaccacactggaagacgcagcggccgccgcagcggcaggtgcggatgccgtcgggctggtctttttccaaggcagcagccgggccgtcgatattgcccgcgccaaaaaaatcaccgccgcactgccgccgtttgtcagcgttgtcgcccttttcgtcaacgaaagcgcgcaaaacatccgccgcatccttgccgaagtgccgatacacatcatccaattccacggcgacgaagacgacgcattctgccgccagttcgaccgcccctatatcaaggccattcgtgttcagacggcatcagacatccgaaacgccgccgaccgcttccccgacgctcaggcactgctgttcgatgcctaccacccttcggaatacggcggcaccggacaccgcttcgactggacgctgctggcggaatattcgggcaaaccgtgggtgcttgccggcgggctgacccctgaaaacgtcggcgaagccgtccgcatcaccggagcggaagcggtcgacgtatccggcggcgtggaagcgtctaaaggcaaaaaagacccagccaaagtcgccgcctttatcgcaaccgccaaccgcctatcccgttaa

SEQ ID NO: 37409 - DNA, 1272 bp, Neisseria meningitidis
atgttccaatggctttatgatgtattgtggctgcttgcgccgatatggatacggcgttatttggacaaacgctccggaagtgccccggcatatcgggcgcatcgggacgagcgtttcggcaagccgtatccgaatcccgttaccggcgcggtttggatacacgccgtttcggtcggagaaacgcgtgccgcccagcccttgatacgcgagttgcggcagcgttttcccgatgcaccgctgctgatgacgcagatgaccccgacgggacgggaaaccgcgcaagttctgtttcccgatgcgcaatgccgctatcttccgtatgacaaaaaaacgtgggtacggcagtttttgcgcgaacaccgcccgatgttcggcattttgatggaaaccgaaatctggcccaatctgatgaaggaatgccggcgcacgggtgtgccgctgtttttggcgaatgcgcggctgtcggaaaaatcgctgaacggttatctgaaagtccgccgcctgatccgtcctgccgccgcttcgctgacgggttgtctggcgcagacggaggcggatgcggcgcggttggcgaaattgggcgcggcatccgtgcaggtgtgcggcaataccaaatacgacctgatgccgtcggaacagatgaaaacgctggcggggcagtttgaaaaacgcatcggagaccggcaggttgccgtgtgcggcagcacgcgcgtttatcggggtgaagacgaggcggaaaaactgctggcggcgtggcaacaatatcgcggcgatgcgctgctggtcgtcgtgccgcgccatcccgagcattttcagacggcatttgaaacggcaaaacgcttcgggtttaaggttcagcggcgcagcgacggtttgccggtcgaacccgatacgcaggtgtggataggcgacagtatgggcgagctgtatgcgtattacctgtgcgccgatgtcgcttttgtcggcggcagtctggtcgattcgggttgtcagaacatcatcgaaccgctttcctgcggcgttccgacgatattcggcttttcgacctacaatttttccgaagcctgccggcacgccttggcatcgggtgcggcggttcaagtcgaatcggcggacgcgtggcgggaagccgttgaaaaaaccttatctgctgaggggggcggaatgcagatgcaggcgcgcgtggacggctttatcgcacaacatcgcggagcgggcgcgagaatcgccgaggcggtacgggaagcggtatgcggacatcggggacgatag

SEQ ID NO: 37410 - DNA, 525 bp, Neisseria meningitidis
gtgttggacagggaaggctatcgccccaatgtcggtattatcctgattaacgaacgtaacgaagtcttttggggcaagcgcgtgcgcgaacattcttggcagtttccgcaaggcggcatcaagccgggcgaaagccccgaaaccgcgatgtaccgcgagctttacgaagaagtcggacttctgccgcaacacgtcaaaatcgtcgggcggacgcgcgactggctgcgttacgacgtgccgaacaactgggtgcgccgcgaatggcgcggatcttatcgcgggcagaagcagatttggtatctcctgcgcctgaccggccgggattgcgatgtcaacctgcgcgccacccgccaccccgaatttgacggctggcgttggcatcaatattgggcgcccgttgacgaagtcatcgagttcaaacgcgacgtttatttgggggcgttgaaagaactctcttcccgcttcctgcgcggtatggaaagttatgaagactttgccgcccgccaaccttccggcaaccggtaa

SEQ ID NO: 37411 - DNA, 249 bp, Neisseria meningitidis
atgatggtttttgacgatattgccaaacggaaaatccgttttcaaacccgccggggattgttggagttagatttaatcttcggcaggtttatggaaaaagaattcgagcatttgagcgataaagagctgtccgagttttccgaaatccttgaatttcaagatcaagaattgcttgccttgattaacgggcattcggaaacggacaaagggcaccttatcccgatgcttgaaaaaatcagacgggcatga

SEQ ID NO: 37412 - DNA, 531 bp, Neisseria meningitidis
atgaacgcaatccgaactttccaaaaccgcacgcccgaaatccacgaaagctgtatgatagacgaagcgtgcgtcgtcatcggcgaagtgtcgcttgccgaagacgtttccgtgtggccgtgcgccgtgttgcgcggcgatgtgaacagcatcaccgtcggcgcgcgcagcaatatacaggacggcagcgtcctgcacgtttcccacaaaaccgccgccaaacccgaaggatcgccgctggttatcggcgaagacgttaccgtggggcacaaagtgatgctgcacggctgccgaatcggcaaccgcgtcttggtcggtatgggcagcaccgttttggacgatgctgtgattgaggacgaagtgatgattggcgcgggcagcctcgttccgccgcgtaaacgtttggagggtggctatctttatgtcggttcgccggtcagacaagtgcgcgtgctgaccgatgaggaaaaagcctttttgaaatattccgccgcgcattatgtgaagctgtcgaaacagtacgggatgtga

SEQ ID NO: 37413 - DNA, 639 bp, Neisseria meningitidis
atgtccaaactgaccccacgcgaaatcctgaccgccggcgcagttgtgcctgtgatggcgattgacgacttaagcaccgccgtcgatttgtcctacgcccttgtcgaaggcggcatccctaccctcgaaattaccctgcgtacacccgtcggcctcgacgccatccgcctgattgccaaagaagtgcccaacgccatcgtcggcgcgggtacggtaaccaatcccgaacagctcaaagccgtcgaagacgcaggcgcggttttcgccatcagcccggggctgcatgaatccctcgccaaagccggccacaacagcggcatccccctgattcccggtgttgccaccccgggcgaaatccaactggctttggaacacggcatcgacaccctcaaactcttccccgccgaagtcgtcggcggcaaagccatgctcaaagccctgtacggcccttacgccgatgttcgcttctgcccgacaggcggcatcagcctcgccaccgcgcccgagtacttggcactgcccaacgtcctgtgcgtcggcggctcttggctgacaccgaaagaagccgtgaaaaacaaagactgggacaccatcacccgcctcgccaaagaagcggcggcgttgaaacccaaagcctga

SEQ ID NO: 37414 - DNA, 1068 bp, Neisseria meningitidis
atgggcggtaaaacctttatgctgatggcgggcggaacgggcggacatattttccccgcgctggcggtggcggattcattgcgcgcgcgcggccatcatgtgatttggctgggcagcaaggattcgatggaagagcgtatcgtgccgcaatacggcatacgcttggaaacgctggcgattaaaggcgtgcgcggcaacggcatcaaacgcaagctgatgctgccgtttactttgtatcaaaccgtccgcgaagcgcagcggattatccgcaaacaccgtgtcgagtgcgtcatcggcttcggcggcttcgttaccttccccggcggtttggcggcgaaactcttgggcgtgccgattgtgattcacgagcaaaacgccgtggcaggtttgtccaaccgccacctgtcgcgctgggcgaagcgggtgttgtacgcttttccgaaagcgttcagccacgaaggcggcttggtcggcaaccccgtccgcgccgatattagcaacctgcccgtgcctgccgaacgcttccaagggcgtgaaggccgtctgaaaattttggtggtcggcggcagtttgggcgcggacgttttgaacaaaaccgtaccgcaggcattggctttgctgcccgacaatgcgcgtccgcagatgtaccaccaatcgggacggggcaagctgggcagcttgcaggcggattacgacgcgctgggcgtgcaagcggaatgcgtggaatttattaccgatatggtgtccgcctaccgcgatgccgatttggtgatttgccgtgccggcgcgctgacgattgccgagttgacggcggcgggattgggtgcgttgttagtgccgtatcctcacgccgttgatgaccatcaaaccgccaacgcgcgttttatggtgcaggcggaggcgggattgctgttgccgcaaacccagttgacggcggaaaaactcgccgaaatcctcggcagcctgaaccgcgaaaaatgtctcaaatgggcggaaaacgcccgtactttggcattgccgcacagcgcggacgacgttgccgaagccgcgattgcgtgtgcggcgtaa

SEQ ID NO: 37415 - DNA, 324 bp, Neisseria meningitidis
atggatattgtgcaacttgggccggcggaattgaaggcgtggatggacgaagggcggatgttttgtttgttggacgtgcgtacggatgaagaaacggcggtttgttcgctgccaaatgcgctgcatatcccgatgaatctgattccgctgcggcagaacgagctgccggacgatgtgccgcttgtggtgtattgccatcacggtatccgcagcctgcatacggcgatgtatctggcggacgcgggttttgaaaacctgtacaaccttcagggcggcatcgatgcatgggcgaccgagattgacggcaacatgatgcgttattga

SEQ ID NO: 37416 - DNA, 216 bp, Neisseria meningitidis
ttggatgcgggcgaatttagccatttccgtatcaatcacagcacacattttgccgaacgacaaaaccatattaatggaactgagaacttttggaaccaggcaaaacgtcatttacgcaagtttaacggcattcccaaagcgcattttgagctgtatttaaaggagtgcgaatggcgttttaacaacagtgagataaaagttcttgttccattttaa

SEQ ID NO: 37417 - DNA, 342 bp, Neisseria meningitidis
atggtagaacgtaaattgaccggtgcccattacggtttgcgcgattgggtgatgcaacgtgcgactgcggttattatgttgatttataccgttgcacttttagtggttctattttccctgcctaaagaatattcggcatggcaggcattttttagtcaaacttgggtaaaagtatttacccaagtgagcttcatcgccgtattcttgcacgcttgggtgggtatccgcgatttgtggatggactatatcaaacccttcggcgtgcgtttgtttttgcaggttgccaccatcgtttggctggtcggctgtctcgtgtattcagttaaagtgatttgggggtaa

SEQ ID NO: 37418 - DNA, 501 bp, Neisseria meningitidis
atgtcccaatatttcaccctcttccggattgaacccgctttcgatatcgacaccgaaaacttggaacaaacctaccgcgccttggccgcccgtttccatcccgataaattcgcttcagcttccgcctttgagcaaaagcaggcagtgatgatgtcttccaccatcaacgatgcctaccgcaccttgaaaaaccccatcgaccgcgccgcctacctgctgaaaacatcgggcatcgatgccgacgcgccggagcataccgctttcgcccccgaattccttatgcagcaaatggaatggcgcgaaacgctgatggaggcacgggcaggcaacgaccttgaatccttgaaaaatctcgacaacgaaatccgcgacgaacaagaaaaactgttctgcggtctgaaacagtcgtttgcccgacaagattacgacacagccgcacaacaagtccgccaaggcaggtttctcgacaaactccgcaacgaaatttcctcggcattataa

SEQ ID NO: 37419 - DNA, 747 bp, Neisseria meningitidis; identical to SEQ ID NO: 36980

SEQ ID NO: 37420 - DNA, 273 bp, Neisseria meningitidis
atgggcagtctgttcctgccgggtggcgcactgttgtttctgagcgtggtttcgaccactttacccgcacgtttgggaatgcctttgctgctggtttctcccgccggcgtgttggacggggcggcggaagccttggcgattgcggcgttcctgatgctggtcgcgcgtccgccggcagtgttcggcggtttgtggaaattcaattacagcctgcgtgaaaaggcgtatatcagttggttgggtttggcggagccgtgccgatttcgccggtga

SEQ ID NO: 37421 - DNA, 594 bp, Neisseria meningitidis
atgaagaaaatcggactgttcggcggcactttcgacccgatacacaacgggcatctccacatcgcccgcgcctttgccgacgaaatcggcttggacgcggttgttttcctgccggcaggcggcccgtatcacaaagacgcagcctccgcttccgccgccgaccgccttgccatggtcgaactggcgacggcagaagacgcgcgttttgccgtcagcgactgcgacatcgtccgagaaggtgcaacctatactttcgacaccgtccaaatcttccgccagcagttcccgtccgcgcaactctggtggctgatgggcagcgacagcctgatgaagctgcatacttggaaaaaatggcagatgctcgtgcgcgaaaccaatatcgccgtcgccatgcggcagggcgacagcctgcaccaaaccccgcgcgaactgcacgcatggctgggcaatgcccttcaggacggcagcatccgcatcttgtccgccccgatgcataacgcgtcgtcaacggaaatccgccgcgccggtgtttcagacggcatcccacctgccgccgcacgctacatccgcgaacacggtttgtatgaaaaataa

SEQ ID NO: 37422 - DNA, 780 bp, Neisseria meningitidis
atgttttttgtcctttcccctgcgaaaaaccttaacgaaaaagaccctgcccctgtcagcgagtttacccaacccgacctgctggcagagtccgacattctaatgcagcagctgcgcgagcttgcgccgcaacagattgccgaactgatgcacgtttccgacaaaattgccctcttaaacgcgcagcgcaatgcagaatggaacacgccgtttacgccggaaaacgccaaacaggcggtctttatgttcaacggcgatgtttacgaaggtatggatgcaaacacattggatattggacagatacgctatctgcaaaaccatgtccgcctgctgtccggtctgtacggtcttcttcgcccgttagacctgatacagccctaccgtttggaaatggggacggcatttgccaatttgcgcggcaagaatttgtatgagttttggggagacatcattaccaaccttttaaatgacacgcttgcccaagcaggcagcaatacgcttgtcaaccttgcctcacaggaatatttcaagtccgtcaacacgaaaaaacttcgggcgcggctgattacaccgatatttaaagatgagaaaaacggtaaatataaaatcatcagtttctatgccaagcgcacgcgcggattaatggtgcgttatgcggcagaacacaatattaccgatcctgaaatgctgaaaaattttaattacgaaggctacgtattcaatgacgcggcttccaatgaaagcgaatgggtttttatgcgttcggaacaaataaagtga

SEQ ID NO: 37423 - DNA, 489 bp, Neisseria meningitidis
atgaccgtactgaccgtcatcctcgccctcgccctgatagccgtcggcacggcgggcatcgtttaccccgccctgcccggattggcattgatgtttgccggaacatggctgcttgcctactccggcggctaccaaatctacggcgcaggtgttttgtggacggtcggactcatcagccttgccggcatactggcggactatgtggcaggcatattgggggtaaaatataccggagcgggcaggctcgccgttcgcggcgcattggtcggcagcatcgtcggcatatttttctcccttcccggactaatactcggcccctttatcggcgcggcggcaggcgaactcatcgacagacgcaatatgcttcaggcaggtaaagcgggcttgggtacgctgttggggcttatcgtcggtacggcgttcaaaatcggctgcgccgtatccatcttgtttatcctgttggtgaaatacatcgcctacctgttttaa

SEQ ID NO: 37424 - DNA, 237 bp, Neisseria meningitidis
atgtcaaacatcgaacaacaagttaaaaaaattgttgctgaacaactgggcgtaaacgaagccgacgtgaaaaacgaatcttctttccaagacgacttgggcgcggattctttggacaccgtggagctggttatggctttggaagaagcattcggctgcgaaatccccgacgaagatgccgaaaaaatcaccaccgtccaactggctatcgactacatcaatgcccacaacggctaa

SEQ ID NO: 37425 - DNA, 726 bp, Neisseria meningitidis
atgccccgattccacctgcccgaaaacctttccgtcggacaaaccgtcgccctgcccgacaacatcgtccgccacctcaacgtcctgcgcgtccgccccaacgaaaacatcaccctcttcgacggcaaaggcaaggcacacgccgcacggctgaccgttttggaaaaacgccgcgccgaagccgaaatcctgcacgaagacacaaccgacaacgagtccccgctcaacatcacgctcatccaatccatatcttccggcgaacgtatggactttaccctgcaaaaaagcgtcgaactcggcgtaaccgccatacagcccgtcatcagcgaacgctgcatcgtccgcctcgatggggaacgcgccgccaaacgcctcgcacgctggcaggaaatcgtcatctccgcgtgcgaacaaagcggcaggaacaccgttccccccgtactgcccatcatcggctaccgtgaagcactcgacaaaatgccgtctgaaagcaccaagctgattatgagcatcaaccgcgcccgcaaactcggcgacatacgccaaccgtccggcgcaatcgtctttatggtcgggcccgaaggcggctggacagaacaggaagaacaacaggcatttgaagctggctttcaggcggttacactcggcaaacggattttacgcacagaaaccgccccactcgccgccctcgccgccatgcagacgctttggggcgatttcgcataa

SEQ ID NO: 37426 - DNA, 708 bp, Neisseria meningitidis
atggaaaaaatgagttttgaaatttaccgttacaacccggatgttgatgccaagccttatatgcagcgttacgagttggaattggaaccgaccgacgtgaaacttttggacgctttagtgcgcttgaaagcacaagacgataccttgtctttccgccgctcctgccgcgaagggatttgcggttctgacggtatgaacatcaacggcaaaaacggcttggcgtgtttgaccgatctgcgtggcttgaaacagccggttaaaattcgtcctctgccaggtctgcctgttatccgcgacctgattgtggatatgacccagttcttcaaacaataccattccgtcaaaccttatgttgtcaacgataatccgattgatgcggacaaagagcgtctgcaaactcaggaagagcgtaaagagttggacggtttgtacgagtgtattttgtgcgcctgctgttcgactgcctgcccgtcattttggtggaaccctgataaattcgtcggtccgtccggtttgctgaatgcttaccgtttcattgcggacagccgtgataccatcactaatgagcgtttggataatctgaacgacccataccgtttgttccgttgccacaccattatgaactgcgtagacgtatgtcctaaacacttgaatccgacccgagccatcggtaagattaaagagattatgttgaaacgggccgtttaa

SEQ ID NO: 37427 - DNA, 174 bp, Neisseria meningitidis
atggacaaacagaaaaatgcggcgttttcgaccgagcttgttgaaaaattgaaactcaagcgagcccttgggcggattcaacgatttcaagtaaagattcaaggtgttcccgctgaacggaatcaggctcaaatttctaaatcgggaaactctttcatttcagacggcctttaa

SEQ ID NO: 37428 - DNA, 3987 bp, Neisseria meningitidis
atgtctgtcgttttgcccttgcgcggcgttaccgccctttccgatttccgtgtcgaaaaactcttgcaaaaagccgccgcactcggtctgcccgaagtcaaattaagcagcgaattttggtatttcgtcggcagcgagaaagcattggatgccgcgactgtcgaaaaactgcaagccttgttggcggcgcaaagcgttgaacaaacgccaaaagcgcgcgagggcttgcatttgtttttggtcacgccccgtttgggtacgatttcgccgtgggcttccaaggcgaccaatatcgcggaaaactgcggtttggcaggcatcgaacgcatcgagcgcggcatggcggtgtggctggaaggtgcgcttaccgatgaacagaaacagcaatgggcggcgttgctgcacgaccgcatgaccgaatccgtattgcccgattttcagacggcatccaaattattccaccatctcgaatccgaaaccttctctaccgtcgatgttttgggcggcggtaaagaggctttagtcaaagccaataccgaaatgggtttggcactctccgccgacgaaatcgattatctggttgaaaactatcaggctttaaaccgtaatccgtccgatgtggaactgatgatgttcgcgcaggcaaacagcgaacactgccgccacaaaatcttcaacgccgacttcatcctcaacggcgaaaaacagccgaaatccctcttcggtatgatacgcgacacgcacaacgcgcatcccgaaggcacggtcgtcgcttataaagacaattcgtccgtgattgaaggcgcgaaaatcgagcgtttctatccggatgcggcggaaaaccaaggctaccgtttccacgaggaagacacgcatatcatcatgaaagtggaaacgcacaaccacccgaccgccatcgcgccgtttgcgggcgcggcgacgggcgcgggcggcgaaatccgcgacgaaggtgcgacgggcaaaggttcgcgcccgaaagcaggcttgaccggctttaccgtctccaacctcaacatccccgacctcaaacagccttgggaacaagcctacggcaaacccgaccatattgcttcccctttagacatcatgatcgaaggccccatcggtggcgcggcgttcaacaacgaattcggacgccccaacctcttgggctacttccgcacctttgaagaaaaatttgacggtcaggttcgcggctaccacaaaccgattatgattgcgggcggcttgggcagcattcaggcgcagcagacgcataaagacgaaatccccgaaggcgcgttgctgatccaactgggcggcccgggtatgcttatcggcttgggcggcggcgcggcttcttcgatggataccggtacaaacgacgcttctttagacttcaactccgtgcaacgcggcaaccccgaaatcgaacgccgcgcgcaggaagtcatcgaccgctgctggcagctcggcgacaaaaacccgattatctccatccacgacgtgggcgcaggaggtttgtccaacgccttccccgaactcgtcaacgatgccggacgcggcgcggtattcaagttgcgcgaagtgccgttggaagaacacggtttaacgcctttgcaaatctggtgcaacgaatcgcaagagcgttatgtgttgtcgattttggaaaaagatttggatgccttccgcgccatctgcgaacgcgaacgctgcccgtttgccgtagtcggcacggcgaccggcgacggccatttgaaagtacgcgacgatttgttctccaacaaccctgtcgatttgccgttgaacgttttgctcggcaaaccgcccaaaaccacgcgcaccgacaaaacggttacgccgtatgcgaccgaagggaatccctttgggaaaaaaccgtttaatgccggcgatatcgacattaccgaagccgcctaccgcgttctgcgcctgcctgccgtagcggctaaaaacttcctgattaccatcggcgaccgcagcgtcggcggcatgacccaccgcgaccaaatggtcggcaaataccaaacccccgtagccgactgcgccgtgaccatgatgggcttcaacacctatcgcggcgaagcgatgtctatgggcgaaaaaccggccgtcgccctgtttgacgcgcctgcttcgggcagaatgtgtatcggcgaagccatcaccaacatcgcagcggtcaacatcggcgacatcggcaatatcaaactttctgccaactggatggcggcgtgcggcaacgaaggcgaagacgaaaaactctaccgcaccgtcgaagcggtttccaaagcctgtcaggcattggatttgagcatccccgtgggcaaagacagcctgtcgatgaaaaccgtttggcaggatggcgcggacaagaaatccgtcgtctcgccattgagcctgattatctccgcgttcgcgccggtggaagacgtacgcaaaaccgttacgcccgaactgaaaaacgtcgaagacagcgtattgctgtttatcgatttgggcttcggcaaagcgcgtatgggcggctcggcgtttggtcaggtgtacaacaatatgagcggcgacgcgcccgatttggacgatacaagtcgtctgaaagcgttttacaacgtgattcagcagcttgtcgccgaagacaaactcttggcgtatcacgaccgcagcgacggcggtttgtttgccgttttggtagaaatggcgtttgcggggcggtgcggcttggatatagatttaaatttattgcttgcacaaacatttattaccaaccataccgctctgtctcaatcattgcggactgaagaggtaaaagcgttggctgaatggcaagaaaccattgcccgcacattatttaatgaagagttgggtgctgttatccaagttagaaaacaagatgttgccgatattatcaatttattctatcaacaacagctgcatcataatgtctttgaaatcggtacgttaactgatgagaacacgttaatcatccgcgacgggcaaacgcaccttatttctgacaacctaatcaaactgcaacaaacctggcaagaaaccagccatcaaatccaacgcctgcgcgacaaccctgcctgcgccgacagcgagtttgccctgattggcgacaacgaacgcagcgcattgtttgccgacgtgaagttcgacgtgaacgaagacatcgccgcgccgtttatcaacagcggcgcgaaacccaaaatcgccatcctgcgcgaacagggcgtaaacgggcaaatcgaaatggccgccgcgttcactcgcgccggtttcgatgcctacgacgtgcatatgtccgacctgatggcaggccgcttccgccttgccgacttcaaaatgctggcggcgtgcggcggcttcagctacggcgacgtactcggcgcgggcgaaggctgggcgaaatccatcctgttccaccctgccttgcgcgaccaatttgccgccttctttgccgatccggacacgctgacattgggcgtgtgcaacggctgccagatggtcagcaacctcgccgagattatcccgggtgcagaggcatggcctaaattcaaacgcaacctgagcgaacagtttgaagcacgcctgagcatggttcacgttccgaaatcagcgtcgctgattctgaacgaaatgcaaggctccagcctgcctgtcgtggtcagccacggcgaaggccgcgccgacttcgcgcttcacggcggcaatatttccgccgatttgggcatcgcgctgcaatatgtggacggtcaaaaccaggttacccaaacctatccgctcaaccccaacggctcgccgcaaggcatcgccggcattaccaacgccgacggccgcgtgaccatcatgatgccccaccccgaacgcgtgtaccgcgccgcgcaaatgagctggaaaccggaaggctggacggaactgtccggctggtaccgcctctttgccggcgcacgtaaagccttgggctaa

SEQ ID NO: 37429 - DNA, 306 bp, Neisseria meningitidis
atgcgcgtatctaaaataattggaagtatgttgcttgttacagcggttcagaccgtattttcggcaaatgtttacgcgtgccgccataatggtaaaaccagttacagccaaactccgggaaaacattgtaccaacgcgggtttggggcgggatcgggtgtacagttcggttagaccggcagtaaaagacagggcggaagacgcaggggtcggcgattattcggacacggtgagggacgaacacgtccaaaatccgagagagaatacgcataaggatgcttcgaataccggtgcaaagacgcattga

SEQ ID NO: 37430 - DNA, 360 bp, Neisseria meningitidis
atgagattaaaattaaaaaattatgattgttctgactttgatttggaagatttcccacaagacaagttagaaaatttttgtatacttttgacattatcaataggttttgatgaaagtaatggtgctgattatttttatgtttatatatatagcaccgaatggttactttcaaatatacatagaccgatgtcattaaaaaactcaattgttacaaaccgttttaatattgaacacatattaaaattgataaatgatatattggaaatatgtaattcaacgtctgaagataagtctatatcaaatttggcaaaatattttgactgggaatttgacgattataatctaaatatccaagactaa

SEQ ID NO: 37431 - DNA, 1185 bp, Neisseria meningitidis
atgaccgaaccgacctcccgccgtcgttttctgaaaacctgcaccgccgccgccggcgcgggactgcttcaggcttgcggcacatccgccacatccgttccgccccttccctcttcccattctgttgtgaaagcccgaaccgtgcctctccaaacgccacgccgtcaaagttcggacggcaaccttctgcgcgttgtcgcttcgtcaggctttgccgaagacaccaaccgcgtcaacacagccttaacccgcctttacaatgccggttttaccgtaaccaaccaacaggcgggcagccgccgcttccaacggtttgctggtacggacgcacaacgtgtcgccgatttccaagaggtcgcttccggccgcgtcgccacgcctaaagtgctgatgggcttgcgcggcggttacggtgcggcgcggattctgccgcatatcgattttgcttcgctcggcgcaaggatgcgcgaacacggcacgctgtttttcggattcagcgacgtatgcgccgtccagctggcattgttggcaaaaggcaatatgatgagttttgccggcccgatggcttatagcgattttggcaaacccgcccccggtgcgtttacgatggatgcctttatcaagggtgcaacccaaaaccgcctgaccgttgatgttccttatatccaacgcgccgatgtcgaaaccgaaggcatattgtggggcggcaacttaagcgtcctcgcctcgctcgccggcacgccttatatgcccgacatcgacggcggcattttgttcctcgaagatgtcggcgaacagccctaccgcatcgaacgtatgctcaatacgctgtatctttcgggtattttgaagaaacagcgcgccatcgtgttcggcaatttccgtatggaaaaaattcgagatgtctatgatccgtcttatgatttttccgccgttgccaaccatgtttcgcgcacggcgaaaatccccgtgctgacgggctttcccttcgggcacattgccgacaaaatcactttccctctgggcgcgcacgcccgaatccgtatgaacggaaacagcggttattcggtcgcgtttgaaggctaccccacactcgatgcgtccgccctgactttggataccctgctcccaccgccggatttgcccatcttccccgaaagcggtgttgccgatatttcggaataa

SEQ ID NO: 37432 - DNA, 351 bp, Neisseria meningitidis
ttggtttgcgccatcgcccaagatgccgaaaccaaacgtgttttaatggtggcgtggatgaacgccgaagccctgcaaaaaaccgtcgaaaccggctttgcccactattacagccgttcgcgccaaaaacaatggatgaagggcgaagagtcgggacacacgcaaaaagtccgcgaactgcgcctcgactgcgacggtgacgccattgtgatgctcatcgcccaaaacggcggcatcgcctgccacaccgggcgcgaaagctgcttttacaaagtctggcgcggcggcgcgtgggaaaccgccgatgccgtcctgaaagacgaaaaagagatttacggcagcacgcactga

SEQ ID NO: 37433 - DNA, 954 bp, Neisseria meningitidis
atgaatcacaaaaagatagtcgttctggatgcggatactttgcccggccgggtttttcattttgattttccgcacgagcttgcggtttacggtacgacaggtgcggatgaaacggcagaacgggtgcgcgacgcacatattgtcattaccaataaggtaatgatttccgccgacattattgcggctaatccgcagttggagctgattgccgtcagtgcgaccggtgtgaacaatgtcgatattggggcggcaaaggcggcgggcgttgcggtatgcaatgtccgcgcatacggaaacgaatcggttgcggaacacgcctttatgctgatgattgccttgatgcggaatttgcccgcctatcagcgtgatgttgcggcaggattatgggagaagtcgccatttttctgtcattacggcgcgccgattcgggatttgaacggtaaaacgctggcggttttcggacgcggcaatatcgggaggacgctggccggatacgcgcaggcattcggtatgggggtggtgtttgccgaacacaaacacgcgcccgacgtgcgcgaaggctatgtttcctttgaagatgcggtacggactgccgacgtgttgtcgctgcactgtccgctgaacgcccaaactgaaaatatgataggcgaaaacgaattgcggcagatgaagcccggtgcggttttgattaattgcgggcgcggcgggctggtggatgaaaacgcgctgcttgccgcactcaaatacgggcagatcggcggggcgggtgtcgatgttttgacggaggagccgccaaggggcggcaatcccctgctgaatgcacgacttcccaatctgattgttacgccgcataccgcgtgggcaagtcgtgaggctttggacaggctgtttgatatattgttggcgaacattcacgcctttgtgaaaggagaggcacaaaatcgggtggtttga

SEQ ID NO: 37434 - DNA, 783 bp, Neisseria meningitidis
atgaatccagcccccaaaaaaccttctcttctcttctcttctcttctcttctcttctcttctcttctcttccgcagcgcaggcggcaagtgaagacggcagccgcagcccgtattatgtgcaggcggatttagcctacgccgccgaacgcattacccacaattatccggaaccaaccggtgcagacaaagacaaaataagcacagtaagcgattatttcagaaacatccgtgcgcattccatccacccccgggtgtcggtcggctacgatttcggcggctggaggatagcggcagattatgccagttacagaaaatggaaagaaagtaattcttctactaatacagaaaatagcgagactcaacagaaccgcataaagattgaaacaggacatcagggaaacggcagcttccacgccgcttcttctctcggcttatccgccatttacgatttcaaactcaacgataaattcaaaccctatatcggcgcgcgcgtcgcctacggatacgttaagcatcaggttcattcagtggaaagcaaaaccaagactgttacccctaaaccaaatggaggccctgtcaaagaaggtccgacccccaaacctgcctatcacgaaagccacagcatcagcagcgtgggtcttggtgtcatcgccggtgtcggtttcgacatcacgcccaagctgaccttggacaccggataccgttaccacaactggggacgcttggaaaacacccgcttcaaaacccacgaagtctcattgggcatgcgctaccgcttctga

SEQ ID NO: 37435 - DNA, 168 bp, Neisseria meningitidis
atgtttgccaaacattatcaattcatcgcactcggcatcatgctgcttctttatatgttgattctctatacgaccgatttttccaatctgacgtattggatgctgttttttatctgttttattacaggaaaaatattagctcgtttgttagagaaaagctttaaataa

SEQ ID NO: 37436 - DNA, 1260 bp, Neisseria meningitidis
atgaaacagaccgtcctcaaaaataacctgcaaaacctgcttgaaagcgcagaaaatatcctgctgcttcaaggccctgtcggcgatttttttctgcgccttgccgactggctgactgcaaacggcaaaaccgtacataaattcaactttaatgcaggcgacgactatttttatccgcccactcaagcgcataccgttgtttttaacgacaactacgatgcctttcctgagtttttgcaagaatacatcactcaacatcacatccaggccgttgtctgctttggcgacacacgcccttatcacgtcattgcaaaacgcattgcaaacgaaaaccaagccagtttctgggcgtttgaagaaggctatttccgcccctactacatcaccttagaaaaagacggcgtcaacgcattttccccgttgccgcgccgtgccgacttttttcttgaacaattccctaagcttgcccagcaagaatataaagcgccaacgccggtacacggcggttttacgcccatggcaaaaaacgctatccgttactatatcgagttgttccgcaatccacgcaaataccccgactacatccaccaccgcgcacccaatgccggccattacctcaaaccgtggtcgctctccatcctcaagcgtttgaactactatattgaagacatccaaatcgccaaacgtgtggaagcaggcaaatacggcaagttttttattgttcccttacaggtattcaacgacagccaagtccgtatccattgcgactttcccagcgtccgcagcttcctgctccatgttttgagttcatttgccgagcacgcgcctgccgataccaacatcatcatcaagcatcatccgatggaccgcggttttatcgactactggcgcgacattaaacgctttatcaaagaacaccccgaactcaaaggccgcgtgatttatgtccatgatgtccccctgcccgttttcctgcgccacggtctcggcatggttaccatcaacagcaccagcggcctgtccggactgattcacaatatgccagttaaggttctcggccgtgcctattatgatattcccggtattactgaccaaaataccttggcagaattttggaatcatccgacaccgcctgacaaagagctgttccatgcctaccgaatgtaccacctcaacgtgacccaaattaacggcaacttctacagtcaggtcttttttcctaacaaaaaaacctccgactcttccactccagcaacctga

SEQ ID NO: 37437 - DNA, 237 bp, Neisseria meningitidis
atgcgtattttggatatttttaaaaacccggcgacaggcaatgtgtcgcactcgaaactgtgggcaaacgttgcctgcgcggcggggacgtttaagtttgtgatgctgcccgatccgtcggcggagatttgggcggtgtatttgggcattgtcggcggctatgcggtggcgcgctcgtttgtcagcgtcaaacgtcaggaggtcgagaatgaatctcgtgaaactgctggcgaataa

SEQ ID NO: 37438 - DNA, 243 bp, Neisseria meningitidis
atgactaatttaaaattagatttctactctgaagttattataaaagattcttgccctaatgatttgttagaaaatggtgagactattaaaggaaaaaaaggagtggtattaggtataagcgaagaagatggtataatctatggctatactattttactttttgatataaaatattgtatatatatagataagaaatatattataccgactggaaaaaaattctctcgcgatgatttttattag

SEQ ID NO: 37439 - DNA, 546 bp, Neisseria meningitidis
atgaaacactatgccttactcatcagctttctggctctctccgcgtgttcccaaggttctgaggacctaaacgaatggatggcacaaacgcgacgcgaagccaaagcagaaatcctacctttccaagcacctaccctgccggttgcgccggtatacagcccgccacagcttacagggccgaacgcattcgacttccgccgcatggaaaccgacaaaaaaggggaaaatgcccccgacaccaagcgtattaaagaaacgctggaaaaattcagtttggaaaatatgcgttatgtcggcattttgaagtctggacagaaagtctccggcttcatcgaggctgaaggttatgtctacactgtcggtgtcggcaactatttgggacaaaactacggtagaatcgaaagcattaccgacgacagcatcgtcctgaacgagctgatagaagacagcacgggcaactgggtttcccgtaaagcagaactgctgttgaattcttccgacaaaaacaccgaacaagcggcagcacctgccgcagaacaaaattaa

SEQ ID NO: 37440 - DNA, 324 bp, Neisseria meningitidis
atgattgttgacgaaaaatctacttcagatgtactgaaacaatatcaagaactagggtttgatttgacaaaacctatgataatagagttttttataggaggttctcaaaagaatctgcaatcaatagaaagccgactcatttcttatcggcaagattttcaaatcagtattgagcaaaatgaattcggagaaatgtggacttgctattgttccgtcaatatcgtcccttcccttgaaaacattttagctattgaaactacgttatttggtattgcacaaaaaaatgattgtaattatgaaggttttggttcgtatgggaactaa

SEQ ID NO: 37441 - DNA, 126 bp, Neisseria meningitidis
atgcaggttctgtcttcactcaaaaccgccaaacaacgccaccgcgactgtcagattgtcagacgtaaaggcaaagtttacgtcatctgcaaaagcaatccgcgttttaaagcgcgccaacgctga

SEQ ID NO: 37442 - DNA, 549 bp, Neisseria meningitidis
atgaacctctccaaccactttctcgtcgccatgcccgatatggaagacgcgtttttttcacaatcggtcgtctatatctgcaaacacgatgaagacggcgcactcggcatcgccatcaacaaaccctctccgattacgatggacatgattttttccgccaccggcaaaaacatccccatgcggatgcagcacgacagcgtgatgatgggcgggccggtgcaagtcgatcgaggttatgtcgtgcataccccgatcggcaactggcaaagcagtatcggcgtttcagacaatatcgcgctaacttcttcccgagacgtgattgaaaatatttcacgcgaaggtgcggttgacaaagccttgatcagcataggctattcaagctggggaaaaggccagctcgaacgcgaacttgccgacaatgcgtggctgactgttcccgccgacgaacacatcctgttcgacatcccctacgaacaccgttacgccgccgcattcgccaaactcggcatcgaccccctggctttgcacggaaaggcgggacatgcataa

SEQ ID NO: 37443 - DNA, 657 bp, Neisseria meningitidis
gtggcttcagtatttttagaaggagaagcagtcgaggtcggtaatattttctgtatcggcaggaactatgccgcccatatcgaagagttaaaaaacgaaataccttccgaacctgtggtgtttatgaagccgtcaggcagcattttgaatagcggcggtacaatcttgctgcccgagtttagtagggatgtgcagtttgagtgcgaactcgtgttgctggtcggtaaggattcagacggcatgggcgagggtaaagatattttgggatgtgtggcggggtacggcgtgggtttggatttgaccgcgcgagacatccaatgccgtctgaaggcgcaggggctgccctggctgaaggcaaaagggttcaggcattccgcgtgcgtgtcggattttgcggcggcaggcagaatcggcaatcccgagaagatgttgttttcattaaaacaaaacggcgtattgaaacagcgcggggataccggtttgatgatttacccgattcgggaaattttacacaaactggcggcagattacggtttggggaaaggggatttggtgtttaccggaacgccctccggcgtgggcgcaatcggtgcgggggacaatttggcattggagctggacggcttggtgcacgcctctttcacggtagggtgttaa

SEQ ID NO: 37444 - DNA, 2784 bp, Neisseria meningitidis
atggcgaataataaaacgttgtttgaagtgattgaaaatgaacgtaaagcggttaaaaaatacaagcctgaattacttgaaatgccagaatttacgtccaaaaacttaaaatatgatttttttgaatggcaaaaatctgcccttgaaaactttttgatttttgaccgcacttcaaagctagacgatttccctgatttaaaaaataagccaacgcatttgctgttcaatatggcaacaggtgcaggcaaaacgatgatgatggcggcattgattttgtattattttgaaaaagggtatcggcattttctgttttttgtgaatcaaaacaatatcgtggataaaacggaaaataattttattgacccgacacacgcaaaatttttatttaccgagaagattttgcagggcgatacggtaattcccattcgcaaagtggaaacgttcagcccacattcagacggcattgaaattaaatttaccagcattcaaaagctgtataacgatattcacaccgaacgggaaaaccaaaccacattggcggatttgcacgaattgaatcttgtgatgctgggcgatgaagcacaccatttaaacgcgcaaaccaaaggcaaaaaacaaggcgagttggatttggaagtggaattaaaagccaatgcaggcaatgccgaaattgaacgcaaaggctgggagcatatggttttggaattgttactcaataaaaatggcaatcccagccaaaatgtgctgttggaatttaccgccacgctgcctgaaaatgctgacgtgcaacaaaaatacgcggataaaatcatcacaaaatttggcttaaaagaatttttgcaaaaaggttataccaaagaaatcaatttggtatccagtacgctgggcaagaaagagcgggtgttgcacgctttattatttgcttggtatcgccatcaaatcgctttgaaatatggcattgccaatttcaagcctgtgatgttctttagaagtaagacgattgatgaatcaaaagcggattatctggcatttttaaattgggcagaaaatgtgcaggcggttgatttttcgtttttaactacattttcaacaagcttgaacgatagcgatagcgataacgccaacgaacaaggcaaaacccgcactgaacaagccctaaaatttatgcaggaaaaaggcgttgagtttgcacatttggcagattgggtaaaacaaaattatcaaaaacacaatgtgattattaccaactccgaaaccaacaaaaccaaaaccgaaaaaaccgacagcgaaacagaaaaattgctgaataatttggaagcggctgataatccgattcgtgccatttttacggtggacagattaaccgaaggttgggacgttctgaatttgtttgatattgtgcgtttgtatgaagggcaaaacggcggcggttcaaataaaaaatcaggcaaaacggctgccgccaccgtatcggaaaagcagttgattggtcgtggcgtgcgttattttccatttgcgtttgaaggtaaacagccgaataaacgcaaatttgacaacgatatgcaacacgaattgcgtatcttggaagaattgttttattacacgcacgatgagcaatcccgctatatttcagaactgaaaaacgagttgcgaaaagacggttatttgcctgaaaaagacgatgataaggtattggcaacatttaaactcaaatctgaatttgccgctaataaggattttagagaattgttaatttgggcgaataaaaaaatccccaacccaaacgccaaaaccaataatgcaaacagcctgcaagccaatccgcaaacgctttcattccaagttcacggcaatcaactgttgcaggaaacgcaatttacagccgatgaaaatgatgaaaaagtcaagcaacttggcacgcaaaataattttactcaaaccataaaaatgagtgaaatggagcggcacattttcaataaagccctgcatatcaaagggaaaaatagtcaatctttattccattttgaccgcctgcaaagcaaactcaatattcaaaatcgcaatgaattgcaaaataaattgttgaaagactggcaaattgaatttttaggattagggcaagacaaacaggttcgcctggacgataaacttgcaggctgcctgaaaatcttggaaatggttgaaaaacatctgaatgaaagtgatatgccgtttatcggtacaaaagaatttacacctaaaaaattatgggaaattttcggcacgccaaaacaaaaatgggtcaaaaaagatgatgtaaaaacgactattgccacgcaaaatgattggtatgtgatgaataattttgccggaacgggtttggaagaagcgttaattcaatttatttcagcgcgtttgggcgatttgaaatctcaatatgacgttcatttaatccgtaatgaagaagtgtttaaattgaataactttgccgatggcgaaggatttatgccggactttattttattgctgaaagataaacaaaaatcttcttccaatggtgtgaacgactttttgcattaccaaattttcattgagcccaaaggtgagcatttagtggaaactgatggatggaaagaagaatttttagaagccatcactgtggaatatgggatggataagatcctgcaaaaagatacaccgcattatcgtttgatcggtttaccgttttttactgatcatcagaaaaatggacaatttacggagtcattccctttaggtgcggcatcgcttgaaaaaatgaagtag

SEQ ID NO: 37445 - DNA, 513 bp, Neisseria meningitidis
atgaaaaactttaacggcaaactcatcctcatcggactgatgggcgcgggcaaaaccacgctgggccggcaaatggcgcagcggctggattaccgtttttacgacagcgatcacgaaatcgccgcagccgccggcgttcccatccccaccatatttgaaatggaaggcgaacagggattccgttcgcgcgaaaccgccatactcaaaaagctggttatcctgccccatatcgtcctgtccaccggcggcggcgcggtgttaaaagaagaaaaccgcgcccttatccgcaaaagcggcacggtcgtctatctgcacgccccgcccgaaaccctgctcgaacgcacgcgctgcgacaacagccgtcctttgctgcaagttgccgatcctttggcgaaattacgtgaactctacgccgcacgcgaccccgtttaccgccaaaccgccgactttaccgtagaatcggcaaactgccgggaaaccgtgcaaaccctgctcaaacgcttatcccgataa

SEQ ID NO: 37446 - DNA, 1047 bp, Neisseria meningitidis
atgaaaatgcaggcagttgttgtgaataaaaatgtagcgggcgatgtggaaatagtcgaacgcgaggttcgcccgttggaatacggcgaggcgttggtcgaagtcgaatattgcggcgtgtgccacaccgacctgcacgttgcggcaggcgactacggcgaaaaaccgggccgcgtgctgggacacgagggcatcggtttggttaaagaagttgccgacggtgtgaaaaatctgaaagtcggcgaccgcgtcagcatcgcctggctgttccaaagctgcggctcgtgcgaatactgcaataccggccgcgaaaccctgtgccgctctgtattgaacgcgggctacaccgccgacggcggtatggcgacccactgcatcgtgagtgccgattacgcggtcaaagtccctgaaggtttggatcctgcgcaagcttcgagcattacttgtgccggcgtgaccacttataaagccattaaagtttccggcgttcgtccgggacagtggattgccatctacggcgcgggcggtttgggcaacttgggggtccaatacgcgaaaaaagtattcggcgcgcacgttgtcgccatcgacatcaacgacgacaaactggcgtttgccaaagaaaccggcgcggatttggttgtcaacgccgccaaagaggacgctgccaaagtgattcaggaaaaaaccggcggcgcacacgctgcggtcgtaaccgccgtatctgctgccgcattcaactctgccgtgaattgcgtccgcgcgggcggacgtgtggttgccatcgggctgccgccggaatcgatggatttgtccatcccgcgtttggttttggacggcatcgaagtggtcggctctttggtcggcacgcgcaaagatttggaagaagccttccaattcggcgcggaaggtttggttgtgcctaaagtcgagttgcgtgctttggatgaagcgcctgccatcttccaagaaatgcgcgaaggtaaaattaccggccgtatggtgattgatatgaaaaaagaatgcggctgcggccatcaccactga

SEQ ID NO: 37447 - DNA, 693 bp, Neisseria meningitidis
atgaacgaaatcctcaggcagcccagcgttctgcttttcctcacgcttgccgtgtacgcgcttgcgattatcgtgcgcacgcgcacgggcaatatcttctgcaaccccgtactcgtcagcactatcgtgctgattgcctacctgaaaatcctcgacatcgattatgcggtgtaccacaacgccgcgcaattcattgatttttggctgaaacccgccgtcgtcgtgcttgccgtgccgctctaccaaaaccgccgtaaaatcttcaaccagtggctgcccgtcatcgtttcacagcttgcgggcagcgttacgggcattgttacggggatgtattttgccaaatggctgggcgcggaacgcgaagtcgtcctctcgctcgcgtccaaatctgttaccaaccccatcgccattgaaatcacccgctccatcggcggcattcccgccattaccgccgccaccgtcatcattgccggtctggtcggacagattgccggttacaaaatgctgaagaacacagtcgtcatgccctcgtccgtgggtatgtcgctcggcacggcttcgcacgcgatggggattgccgcctcgctcgaacgcagccgccgcatggcggcatacgcgggactggggctgacgttcaacggcgtactgaccgcgctgattgcgccgctgcttatccccgttttgggattttga

SEQ ID NO: 37448 - DNA, 573 bp, Neisseria meningitidis
ttggaaaaagcagccgaaaacaatatgcccaaagacaatgtgcaacgcgccatcgacaaaggcacgggcaacttggaaggcgtggaatacatcgaattgcgctacgaaggctacggcatcggcggcgcggctttgatggtggactgcctgaccgacaacaaaacccgcaccgttgcggacgtacgccacgcgtttaccaaaaacggcggcaacttgggtaccgacggctgcgtggcgttcaacttcgtgcatcagggctatttggtattcgaacccggcgttgacgaagacgcgctgatggaagcggctttggaagccggtgcggaagacgtggttaccaacgacgacggttccatcgaagtcattaccgcgccaaacgattgggcgggcgtaaaatccgctttggaggcggcaggttacaaatccgttgacggcgacgttacgatgcgcgcccaaaacgaaaccgaactctccggcgacgatgccgtcaaaatgcaaaaactgattgacgcgctggaagacttggacgacgtgcaagacgtttacacttccgccgtattgaatttggactga

SEQ ID NO: 37449 - DNA, 1179 bp, Neisseria meningitidis
atgacaggcagaacaggccgcaacggcagtacccaagcgcaaccggaacgcgtcatgctggtgggcgtaatgttggacaaagatggtacgggcagcagtgccgcccgtctgaacggttttcagacggcattggcggaagctgtcgagctggtcaaggcggcgggcggcgattccgtgcgcgtggagactgccaaacgcgaccgtccgcacaccgcgctgtttgtcggcacgggcaaggcggcggagctgtcggaagcagttgccgcagacggcatcgatttggtcgtattcaaccacgaacttacgcccacgcaagagcgcaacctcgaaaaggagctgaagtgccgcgtattggacagggtggggctgattctggcgattttcgcccgccgcgcccgcacgcaggaaggcaggctgcaagtcgagttggcgcaattgagccatttggcgggacgcttgatacgcggttacggccatctgcagagccagcgcggcggtatcggcatgaaagggccgggcgaaaccaaactggaaaccgaccgccgattgatcgcccatcgaatcaacgccttgaaaaaacagcttgccaacctcaaaaaacagcgcgccctgcgccgcaagtcccgcgaatcgggcacaatcaaaacgtttgcgctggtcggctataccaatgtcggcaaatccagcctgttcaaccggctgaccaagtcgggcatatatgcgaaagaccagcttttcgccacactcgacaccacggcgcggcggctgtacatcagtcccgaatgcagcatcatcctgaccgataccgtcggattcgtcagcgatctgccgcacaaactgatttccgccttttccgccacgctggaagaaaccgcgcaagccgatgtgctgctgcacgtcgtcgatgccgccgctccgaacagcggacagcagattgaagacgtggaaaacgtactgcgagaaatccatgccggcgatattctgtgcatcaaggtgtacaacaaaaccgacctgctgccgtctgaagaacaaaacacgggcatatggcgcgacgctgcgggaaaaattgccgccgtccgcatttccgttgctgaaaataccggtatagacgcactgcgcgaagccattgccgagtattgtgccaccgcaccaaacacagacgaaaccgaaatgccatga

SEQ ID NO: 37450 - DNA, 729 bp, Neisseria meningitidis
ttgagccacgccgtcctgcccggtgccgccgtcggctacatgtttgccggcttaagcctgcccgccatgggtttgggcggcgtagccgcaggtatgctgatggcactgcttgccggactcgtcagccgcttcaccaccctgaaagaagatgccaactttgccgccttttatctcagcagcctcgccatcggtgtagtcctcgtcagcaaaaacggcagcagcgtcgatttgctccacctccttttcggctccgtacttgccgtcgatattcctgccctgcaactcatcgccgccgtatccaccctcacactgcttacccttgccgtcatctaccgcccgctcgtactcgaaagcatcgaccccctgtttctcaaatctgtcggcggcaaaggcgggctttggcacgtcctctttctcgtcctggtcgtcatgaacctcgtatccggctttcaagccctcggcacactcatgtccgtcggacttatgatgctgccagccattaccgcccgcctatgggcgaagcacatgggcgcactcatcctcctatccgttctgacagccctgctgtgcggcttgagcggactgctcatttcctaccacatcgaaattccttccggtcccgccatcatcctctgttgcagcgtcctttatctcttttccgtcatactcggcaaagaaggcggcattctgaccaaatggctcaaaaaccaccgccaccacaccacctga

SEQ ID NO: 37451 - DNA, 1083 bp, Neisseria meningitidis
atgccgtctgaagccgcttcagacggcattttgccgctttaccctacccgcactatttttcagaaaccgatcatgcttccattccttccagaaccctccctttcctatacgcaacaaaaccgtaccgccgttttgctgttgaacctcggcacgcccgacgcgccgaccgcgcagacggtacgaccttatctgaagtcctttctgaccgaccggcgcgtcgtcgaactgcccaaatggctgtggtatcccattctgcatggtctggtactgacgttgcgccccaaaaaaagcgcgcacgcctatgaaaaaatctggtttaaggaaggttcgcccttagaagtttacacagcacgccaagctgccgcgcttgccgaacgtatgcccgacctcatcgtccgccacgccatgacctacggcaatccttcggtggcagacgtattgtcggaactgaaggcgcaaggcgcgggcagactgctggtcatcccgatgtacccgcaatatgccgcttccagcagcggcgcggcagtagataaggtgtgcgaacaattactgctgcaacggaaccaaatgagcgtccgcaccgtttcgcgcttttatgacgataccggctacattgatgcgatgaaaaaccacatcctccgatattgggcggaacacggacgtgggaaaaaactgatgttgagttttcacggcgtaccgcagaagcaccacgacctcggcgacccctatcccgacgagtgccgccacaccgccaaactgcttgccgaagcactggaactggccgaagaccaatatgtcgtatcgttccaaagccaattcggcagggcaaaatgggttacaccgagcacgcaggatttgttcggcaaactgcccaaacagggggtaaccgagctggacgtattctgcccgggctttttggcagactgtttggaaacactggaagaaatcgccctgatggggcgggaacagttttatgaagcaggcggcaaaagctaccgctatatcccctgcctcaacgacaaccccgactggatagacgcactcgtcgcacttgccgaagaaaaccttggcggctggcgttga

SEQ ID NO: 37452 - DNA, 411 bp, Neisseria meningitidis
atgattgaatttgtccgagccaaaaaacggctgctttgggcatttgtgcttttgcttgtgtggacgtgcggttaccgatacgccgccgacaaggccgaagcggaacaaaccgccctgattgccacctatcggcattcttctatggttgcggcggaacaatatgccttgcagcttaaaaaagcgcaggacgaaaggcagcggtggtacgacttttcccaaaaacaaggaagaaagcccgtgaaaaaacagtatccgccgcaaacgaaaaaagccggctatctgaaaaccaaggaagaactgcttgcggaattggcttgccttacagcggaaatggctgccctaaaaaagcccgatgccttaatccatgggaaagaagtgcggcagaaagaacgcaactcgtcgcagggttaa

SEQ ID NO: 37453 - DNA, 1410 bp, Neisseria meningitidis
atgacagcacaaaccctctacgacaaactttggaacaaccacgtcgtccgcgaagaagaagacggcaccgtcctgctctacatcgaccgccatttggtgcacgaagttaccagccctcaggcatttgaaggcttgaaaatggcggggcgcaagctgtggcgcatcgacagcgtcgtctccaccgccgaccacaacaccccgaccggcgattgggacaaaggcatccaagacccgatttccaagctgcaagtcgatattttggacaaaaacattaaagagtttggcgcactcgcctattttccgtttatggacaaaggtcagggcatcgtacacgttatgggccccgaacaaggcgcgaccctgcccggtatgaccgtcgtctgcggcgactcgcacacttccacccacggcgcattcggcgcactggcacacggcatcggcacttccgaagtcgagcacaccatggcgacccaatgtattaccgcgaaaaaatccaaatccatgctgattgccgttgacggcaaattaaaagcgggcgttaccgccaaagacgtggcactttacatcatcgggcaaatcggcacggcgggcggcacgggttacgccatcgagtttggcggcgaagccatccgcagcctttctatggaaggccgcatgactttatgcaatatggcgatcgaagccggtgcgcgctcaggcatggttgccgtcgaccaaaccaccatcgactatgtaaaagataaacccttcgcacctaaaggcgaagcatgggacaaagccgtcgagtactggcgcacgctggtgtctgacgaaggtgcggtattcgacaaagaataccgtttcaacgccgaagacatcgaaccgcaagtcacttggggtacctcgcctgaaatggttttagacatcagcagcaaagtgccgaatcctgccgaagaaaccgatccggtcaaacgcagcggtatggaacgcgcccttgaatacatgggcttggaagccggtacgccattaaacgaaatccccgtcgacatcgtattcatcggctcttgcaccaacagccgcatcgaagacttgcgcgaagccgccgccatcgccaaagaccgcaaaaaagccgccaacgtacagcgcgtgttaatcgtccccggctccggtttggttaaagaacaagccgaaaaagaaggcttggacaaaattttcatcgaagccggttttgaatggcgcgaaccgggctgttcgatgtgtctcgccatgaacgccgaccgcctgaccccggggcaacgctgcgcctccacctccaaccgcaattttgaaggccgtcaaggcaacggcggacgtacccacctcgtcagccccgctatggcagccgccgccgccgttaccggccgctttaccgacatccgcatgatggcgtaa

SEQ ID NO: 37454 - DNA, 600 bp, Neisseria meningitidis
ttgctgctttcatgccgtctgaagcacgtttcagatggcatcggtttacatcagataaggataaaaatgggtatttacgattttcaaatgaaagatgcagaaggcaatgcggttgatttgtcaggctatcgcggcaaggttctgctgattgtcaacacggcaacgcgttgcggtctgaccccgcaatacgaggctttgcagaagctgtatgcacaatataccgcagaaggcttggagattttggattttccgtgcaaccagttccgcgaacaggctcccgaaagcagcggagaaattgcccaagtgtgtatgatgaagtttggcacgaagtttaagattttcgacaaaatcgaagtcaatggagcaaataccgcgcccttgtatgcctacctgaaatccgtcaaaccgcaagataaaggcaatcatctgtttaaagatttcgtgttgaagctcgcagctttgggagagaagcgcgacgaaggcgacatcaaatggaactttaccaaattcctcgtcaaccgcgacggcgaagtggtcgagcgttttgcgcctagtgttacgcccgaagaaatcgaagccgatattcgggcattgctgtaa

SEQ ID NO: 37455 - DNA, 867 bp, Neisseria meningitidis
gtggaaaatgttgaaacacatagcccaacccaccgcaagcgtctgctcggcacgttttccctggtcggactggaaaacctttggatgctggtattatatccagtgtttggcggccgggcgatcaatgccgtgattgcgggggaggtgtggcaggcgttgctgtacgctttggttgtgcttttgatgtggctggtcggtgcggcgcggcggattgccgatacgcgcacgtttacgcggatttataccgaaatcgccgtgccggtcgtgttggaacagcggcagcgacaagtcccgcattcggcggtaactgcgcgggttgccctgtcgcgtgagtttgtcagcttttttgaagaacacctgccgattgccgcgacatccgtcgtatccatattcggcgcgtgcatcatgctgctggtgctggaattttgggtcggcgtgtcggcggtgggcatacttgcgttgtttttatggcttttgccacgttttgccgccatcagcgaaaacctgtatttccgcctgaagaacagcttggaacgcgacaaccactttatccgaaaaggcgaccggcggcagctgtaccgccattacggactgcttgcgcgcctgcgtgtgctgatttccaaccgcgaagccttcggctatctctgcgtcggcacggcgatgggtattttgttcggctttgcttttgtgatgatgacgctcaaaggctacagcagcgcggggcatgtctattcggtcggcacttatctgtggatgtttgccatgagtttggacgacgtgccgcgattggtcgaacaatattccaatttgaaagacatcggacaacggatagggggattggaacggaacatcaaagccggaacttga

SEQ ID NO: 37456 - DNA, 312 bp, Neisseria meningitidis
atgtttaatcaaactcaaactgtaacttatcctgcaacttttttgggagccaaaaaattcaaaggtgaaattgatggctctaacattgacacttgttccgtattggttgcaacacctttaccggcacagtcgggtaatgctgttggatttacggcagcacaaatgaagttcggggatagtaagaatttctcaaggttagagaatctcaaatatccgtgcgaagttatggtaatggttgaaatgacttcgacaggtaaaggcatggttccgtcattaattgattttcaggtggcggaaaagccgaaaggttga

SEQ ID NO: 37457 - DNA, 210 bp, Neisseria meningitidis
atggctgaatcgcggcaaacacgccttcaagtcaaatgtccgacctgtcaaacggcagtagtatggaaaccggaaaacgcattccgccccttctgttcgcaacgctgcaaactgatcgacttgggcggatgggcagatgaggaatatacggttacagcccaagaagaaggtttattggaaatatccgaacccgacggcgcataccgctga

SEQ ID NO: 37458 - DNA, 696 bp, Neisseria meningitidis
atgaaactgaaaaccttagctttgacttcattgaccctgttggcattggccgcttgtagcaaacaggctgaaaccagcgttccggcagacagcgcccaaagcaacacatccgctccggcaacccctgccgcattgaccgaaggtatcaattacaccgtattgtccaatccgattccgcaacagcaggccggcaaaatcgaagtattggaattcttcggctacttctgcccgcattgcgcccatcttgagccggtcttgagcgagcacatcaaaacgtttaaagacgatacctatatgcgccgggagcatgtcgtgtggggtgatgaaatgaaacctttggcacgtttggcggccgcagtggaaatggccggtgaatcagataaagccaacagccatattttcgatgcgatggttaatcaaaaaatcaatctggccgataccgataccctgaaaaaatggctgtccgagcaaacagcgtttgacggcaaaaaagtattggctgcatttgaggctcctgaaagccaagcgcgtgcggctcaaatggaagagttgaccaataaattccaaatcagcggcacaccgactgtgatcgtcggcggcaaataccaagttgaatttaaagactggcagtccggtatgaccacgattgaccagttggtggataaagtacgcgaagagcagaaaaagccgcaataa

SEQ ID NO: 37459 - DNA, 396 bp, Neisseria meningitidis
atggctaaagcaaacacagcttcacgtgtacgtaaaaaagtacgtaaaaccgtgagtgagggtattgtgcacgttcatgcatctttcaacaataccatcattacaatcactgaccgtcaaggcaatgcgttgtcttgggctacctctggcggcgctggttttaaaggttctcgtaaaagtacaccatttgcagcacaagttgcagcagaagcagctggtaaagttgcccaagagtatggcgttaaaaatttagaggttcgtattaaaggtccaggtccaggtcgtgaatcctctgtacgtgctttgaatgctcttggtttcaagattaccagcattactgacgttaccccgttgcctcataacggttgccgtccgcctaaaaaacgtcgtatttaa

SEQ ID NO: 37460 - DNA, 147 bp, Neisseria meningitidis
ttgccgaacacgatggccgctttaccactatacaacggaatcgattgcaaatctttcccactgttcttgaaagaatgcgaatttcgatttaacttcggcacaccgtctcaacagcttaaaatcctgcgggattggtgtggaatttag

SEQ ID NO: 37461 - DNA, 687 bp, Neisseria meningitidis
atgtttgatttcggtttgggcgagctggtttttgtcggcattatcgccctgattgtcctcggccccgaacgcctgcccgaggccgcccgcaccgccggacggctcatcggcaggctgcaacgctttgtcggcagcgtcaaacaggaatttgacacgcaaatcgaactggaagaactaaggaaggccaagcaggaatttgaagctgccgctgctcaggttcgagacagcctcaaagaaaccggtacggatatggagggtaatctgcacgacatttccgacggtctgaagccttgggaaaaactgcccgaacagcgcacgcctgctgatttcggtgtcgatgaaaacggcaatccctttcccgatgcggcaaacaccctattagacggcatttccgacgttatgccgtccgaacgttcctacgcttccgccgaaacccttggggacagcgggcaaaccggcagtacagccgaacccgcggaaaccgaccaagaccgcgcatggcgggaatacctgactgcttctgccgccgcacccgtcgtacagaccgtcgaagtcagctatatcgatactgctgttgaaacgcctgttccgcataccacttcgctgcgtaaacaggcaataagccgcaaacgcgatttgcgtcccaaatcccgcgccaaacctaaattgcgcgtccgtaaatcataa

SEQ ID NO: 37462 - DNA, 564 bp, Neisseria meningitidis
atgaaactcatcattctcgaccgcgacggcgtcatcaatcaggaccgcgatgacttcgtcaaatccgttgacgagtggatacctgtcgaaggcagcatggatgcggtggcatttctgacgcaggcaggctacaccgtcgccgttgccaccaaccaatccggcatcgggcgcaaatattttaccgttcaaaacctcaccgaaatgcatgccaaaatgcaccgcctcgtccgtcaggcaggcggcgaaatcaacggcatctggttctgccctcataccggcgccgacggctgcggctgccgcaagcccaaaccgggtatgattgaagacatcctcgaacgcttcaacgcccaagcttcggaaacttggctggtcggcgacagcctgcgcgatttgcaggcaatcgatgccgtcggcggcaaacccgcgctggttctgaccggaaaaggcaaaaaaacgctctcccaacacggacacgaattgcccgaacacacacaggttttcgataccttgctcgatttctcacaatacatcatgcaggaaaacgccgcaccgcaagccgactga

SEQ ID NO: 37463 - DNA, 1428 bp, Neisseria meningitidis
atgaacgagaactttaccgaatggctgcacggctgggtcggcgccatcaacgatccgatgtggtcatacttggtttatatgcttttgggtacggggcttttcttcaccgtaaccacgggctttgtccaattccgcctgttcgggcgcagcatcaaagaaatgctcggcggccgcaaacagggggacgaccctcacggcatcacgccgtttcaggcatttgtaaccggccttgccagccgcgtgggcgtgggcaatatcgcgggcgtggcaatcgccatcaaagtcggcgggccgggcgcggtgttttggatgtgggtaaccgccttaatcggtatgagttcggcgtttgtcgaatcttcgctggcgcagctctttaaagtccgcgactacgacaaccaccatttccggggcggccctgcctactacatcactcaagggctggggcagaaatggctgggcgtgttgttcgccctgagcctgattttctgtttcggctttgtgtttgaagcggttcagaccaataccattgccgataccgtcaaagcggcgtggggttgggagcctcattatgtcggcgtcgccctggtgattttaaccgcgccgattatcttcggcggcatcaggcgcatatctaaagcggcggaaatcgtcgtccccctgatggcggttttgtacctctttatcgcgcttttcatcattttgaccaatattccgatgattccggacgtgttcggtcagattttttcgggcgcgttcaaattcgacgcggcagcaggcggcttactcggcggtctgatttcgcaaacgatgatgatgggcatcaaacgcagcctgtattccaacgaggcgggtatgggttccgcgccgaacgccgccgccgccgccgaagtgaaacaccctgtttcgcaaggtatgattcaaatgctgggcgtgtttgtcgataccatcatcgtttgttcttgcaccgccttcatcatcttgatttaccaacagccttacggcgatttgagcggtgcggcgctgacgcaggcggcgattgtcagccaagtggggcaatggggcgcgggcttcctcgccgtcatcctgtttatgtttgccttttccaccgttatcggcaactatgcctatgccgagtccaacgtccaattcatcaaaagccattggctgattaccgccgttttccgtatgctggttttggcgtgggtctatttcggcgcggttgccaatgtgcctttggtctgggatatggcggatatggcgatgggcattatggcgtggatcaaccttgtcgccatcctgctgctctcgcccttggcgtttatgctgctgcgcgattacaccgccaagctgaaaatgggcaaagaccccgagttcaaactttccgaacatccgggcctgaaacgccgtatcaaatccgacgtttggtaa

SEQ ID NO: 37464 - DNA, 864 bp, Neisseria meningitidis
atgaataacgctttcgcattacccgccatccaaagcggcaacggcagcctcgaacaatacatccacaccgtcaacagaattcccatgctgacccaagaggaagaaacacgccttgccgaacgccaacacaaaggcgacctcaacgccgccaaacaactcatcctgtcccacctgcgcgtcgtcgtttccatcgcgcgcggctatgacggctacgggctgaatcaggcagacctgattcaggaaggcaatatcggactgatgaaggcggtcaaacgctacgagcccggtagaggcgcgcgtctgttttcatttgccgtacactggattaaagccgaaatccacgagtttattttgagaaactggcgtttggttcgcgttgccaccaccaaaccgcaacgcaagctgtttttcaacctgcgcagcatgcgtaaaaacctcaacgccctgtctcccaaagaggcacaagacatcgccgacgatttgggtgtcaaactttccgaagttctggaaatggaacagcgaatgacgggacacgacatcgccatcatggcagacaacagcgacgacgaggatagtttcgcccccatcgactggcttgccgaccacgattccgaaccgagccgacaactatcgaaacaggcgcattacgccctgcaaacagaaggtttacaaaacgctttggcgcaactggatgacaggagccgccgtattgtggaaagccgctggcttcaagacgacggcgggctgacgctgcaccagcttgccgccgaatacggcgtatctgccgaacgcatccgccaaatcgaagcaaaagccatgcagaaactgcgtggtttcctgaccgaagaagccgaagcggtttga

SEQ ID NO: 37465 - DNA, 279 bp, Neisseria meningitidis
atgaatatccgaactgcttttgctttgtgcgccatcgccttatccgccgctgcggctgcctacgccaaagaaatcaaaatcgatgccaacaacacgccttattccgaagccgacgcgcaaaagctggcggcaacggcagtcggtatgggtgttaaggaacctatcagcctgaacggcggcagcggcagcattaccgtgtccggcagcagcgcgacgcagtgcgtgttcaaagtcggcaacggaggcgcattgcagattcaagggctaaactgcaagtaa

SEQ ID NO: 37466 - DNA, 1485 bp, Neisseria meningitidis
atgtcgaaacctgtttttaagaaaatcgcactttatactttgggtgcaatcagcggcgtggccgtcagtctggcggtgcagggttttgccgccgagaaggacaggcgggataacgaagtcctgccggtgcaatccatccgcacaatggcggaggtttacggtcaaatcaaggcaaactactatcaggacaaacccgatgccgatttgtttgaaggtgcgatgaagggtatggtggccggtttggatccgcattccgaatatatggataaaaaaggttatgccgagataaaggagtccaccagcggcgaatttggcggcttggggatggaaatcgggcaggaagacggatttgtcaaagtggtttcgccgattgaggacacgcctgcggaacgggcgggggtgaaaagcggcgatttcattgtgaaaatcgataatgtttcgacacgcggcatgacggtcagcgaagcggtgaagaaaatgcggggcaagccgggtacgaagattactttgacgctgtcgcgcaaaaatgccgacaagccgatagtcgtcaacctgacccgtgccattattaaagtgaaaagcgtccgccatcacctgatcgaacccgattacggctatatccgcgtgtcgcagttccaagagcggacggtcgaaagcgtcaataccgccgcaaaagagctggtaaaggaaaataaaggaaaaccgctcaaggggctggtgttggatttgcgcgacgaccccggcgggcttttgactggcgcggtcggcgtgtcggcggcatttctgccgtctgaagcagtcgtcgtcagcaccaagggacgcgacggcaaagaccgcatggtactgaaagccattcctgaagattatgtgtacgggatgggcggcgattcgttggcgggcattcctgccgagttgaaaaccataccgatgacggtattggtcaattccggttcggcttccgcgtcggagattgtcgcaggtgcattgcaggatcataaacgcgcggtcatcgtcggtacgcagagcttcggcaaaggttcggttcagactttgattcctttgtccaacggcagcgcggtcaagctgacaacggcactgtattatacgccgaacgaccgttctattcaggcgcaggggattgttcccgatgtcgaagtaaaagataaggaacgcatttttgaaagccgcgaggcggatttggtcggacacatcggcaatcctttgggcggcgaggatgtgaacagtgaaacccttgccgtgccgcttgaaaaagatgcggataagcccgctgtaaaagaaaaaggtaaaaagaaaaaggacgaggatttgtcttcaaggcggattcccaaccctgccaaagacgaccagttgcggaaagctttggatttggtcaagtcgcccgagcagtggcagaagtctttggggctggcggcgaaaaagccggtttcaaataaagataagaaagataaaaaagataagaagtag

SEQ ID NO: 37467 - DNA, 771 bp, Neisseria meningitidis
atggactgcccgtccgaagaacagctcattcgcatgcgtttaaaagatgtgtctgatatttatgaattacagtttgatattgctgggcggtgcttaaccgtctatcacgataatcaagatacaacgattttacaagtacttgaaccgcttaattttgatagtcatatcatttccaccgaagtgattgttgataagatagtgtttaacaagcctgatgagcacttagaaaaaagattattatatcaagtgctcatgattaactttgtgttttttatcatagagtgttcggttggtatttttgctaattctatggggctgattgctgatagtctagatatgctggcggacagctttgtctatatattggcgctatcagccattggtatgacgctggcgtataaaaaacgtgtggcatttttggcggggataacgcagataatattggcgttatttggggtgatagaagtgattaggcgttttatcggtgctgagcagctgcccaattatcaactgatgattggcacggcatttttggcattgattgcaaactggctgtgcttatatctactgagcaaaaatcaaaataaagaaatccatatcaaagccagcatgatttttacatccaatgacattatcatcaatatcggtgtgatagcggcgggagcattgacgttattgactcattctagctatcctgatttaatcattggcatgattgtctttgtcattgtactatttggtgccagaaatattttaaaattggcaaaataa

SEQ ID NO: 37468 - DNA, 1665 bp, Neisseria meningitidis
atgcttctaacactttctttgcgtgattttgtcattgtcgaaaatctgaatctggattttcaaagcggctttaccgtattgaccggagaaactggcgcgggcaagtccattactttggatgcgattggtctgctgttgggcgataaagccgattacagccaagtccgcagcggcgcaaaagaagcgcagttgtcggcgttgtttgatatttcccatttacctgttttaaaagcagaattgtatgaacaggggcttttaaacgacggagaagaagaactcagtatccgccgcattatcgatgccaaaggcaaaagccgcagctttatcaacaatcaggccgctaccttggcgcaactcaaagccgtcggcagccagcttatcgacatccacgggcaaaacgcccatcattcgcttaatcaggaagccgctcagcgcgaattgttggacgcatttgcgggcagcagggcgcaggcggaaaccgtcaggcagctttatcaaaactgggcaaactcaaaaaaagcattgcaggaagcgcaggaacaggcagaaaacattgcactcgaacaagagcgtctggaatggcagtttaacgaattgaatcagttggacattaaacaaggcgaatgggaagccctcagccaaagccacgacagccttgcccattctgccgagctgttgcaggctgccgaagaagtcggaagcaagattgacggcgacaacggcatccaacgccatatctatcaatgtcaaaaactattggccaatctgcaaaacatcgagccgcgctttgccgagagcctgaatatgttggcaagcatcgaggccgaattgggcgaaatcagtgccaatatgcgcgatgtggcaggtcgcagcgacatcaaccccaatgaattggcggcacaggaacagcgtatgggcgaactgatggggatggcgcggaaataccggatcgagcctgaagagttgcctgccaagttggcagaaatcgaagaacgcctgcaagctgccgccgatttggacgcgctcgagcataatgttgcccacaattttgccgaatatcaggaagctgcccacatcctttctgccatgcgccatcaggcggcagagcgtttgagcggcgaaacgaccgagcatatgcaacaccttgccatgaaaggtgcacgtttcgacatcgtcctgttgccctcgtcgccgacggcacacggtttggagcaggttcaatttcaagttgccgccaacaaaggcaatccgccccgtccgctgaataaagttgcctccggcggcgaattggcgcgtatcagccttgccttacaggttgttgccagccaatatacccaagttcccaccctgatttttgatgaggtcgataccggtattggagggggagtggctgaaatggtcggcaaggcattacgtgcgttgggcagaaaacatcaggtgcttgccgttacccaccttccccaagtcgcatcctgcggagaaaaccactggcgggtgcgcaagcacagcgagggagagcaaaccgtcagcgaaatcagtatattggatgaaatccaacggatcgaagaggttgcccgtatgttgggcggagaagtcattaccgatacgacgcggcaacatgcggcagaattgctgcaacttgcgtcgaaaaatagtttattttaa

SEQ ID NO: 37469 - DNA, 1281 bp, Neisseria meningitidis
atggaaaactcattgaaagaagccgccctcaagttccacgaattacccgttccgggcaaaatttccgttaccccgaccaaatctttggcgaccgacaaagatttggcgttggcgtactctccgggcgtagccgctccttgtatggaaatccatgccgatccgcaaaatgcctacaaatacaccgccaaaggcaacttggtcgccgtcatttccaacggtacggccgttttgggcttgggcgacatcggcgcgctggcgggcaaacccgtgatggaaggtaaaggcgtattgttcaaaaaattcgccggtgtggacgtgttcgacatcgaaatcgatgaaaaagacccgcaaaaactcgtggacatcatcgccgctttagagccgaccttcggcggcatcaacctcgaagacatcaaagcacccgagtgtttctacatcgaacgcgaattacgcaaacgctgcaaaatccccgtattccacgacgaccagcacggcacggccatcattaccgccgccgccgtattgaatgccctgcgttttaccggccgtaaaatcgaagaagcgactttggtgtgttccggcgcaggtgcggccgcgattgcctgcttgaaccaattgctggatttgggcttgaaacgcgaaaacgtgaccgtttgcgactccaaaggcgtgatttaccaaacccgcgaagacaaagaccgcatggatgagtctaaacagttctacgccattgaagacaacggccagcgcgtgcttgccgatgccgtcaaaggcaaagacatcttcttgggcctctccggcgcgaacctgctgacgcctgaaatgctgaacaccatgaacgaaaaacccatcgtgttcgccatggccaacccgaatccggaaattctgccgccgctggcaaaagaaacccgtccggacgtggttatcggtaccggccgttccgacttcccgaaccaagtcaacaatgtattgtgcttcccgttcatcttccgtggcgcgttggatgtcggcgcgaccaccatcaacgaagaaatgaaacgcgcctgcgtgtatgctttggcggatttggcgatggaagaagtgaccgaagaagtggttgccgcttacggtaagaaatttgaattcggcgcggaatacctgattccgactccgttcgattcccgcctgctgccgcgcgtcgctacggctgccgccaaagcagcgatggaaagcggcgtggcaacccgtccgattgccgactttgaagcctacgccgccaagctgggcgaatggaagctgtaa

SEQ ID NO: 37470 - DNA, 231 bp, Neisseria meningitidis; identical to SEQ ID NO: 37019

SEQ ID NO: 37471 - DNA, 423 bp, Neisseria meningitidis
atgaataaaaaccgtaaattactgcttgccgcactgctgctgattgcctttgccgccgtcaagctcgttttgttgcaatggtggcaggcgcagcagccgcaagccgtggcggcgcaatgcgatttgaccgagggttgcacgctgccggacggaagccgcgtccgtgccgccgccgtttcaaccaaaaaaccgtttgatatttatatcgaacacgcgcccgtcggcacggaacaggtcagcatcagcttcagtatgaaaaatatggatatgggtttcaaccgctatatgttcgagcggcaaccgtcggggacttggcaggcagtacgcatccgcctgcccatctgtgtcgaaggcaggcgcgattttacggcggacattacaatcggcagccggacatttcagacggcatttaccgccgaataa

SEQ ID NO: 37472 - DNA, 219 bp, Neisseria meningitidis
atgatgacggaatcccatggttacctatcaaataatttacctgttaaaatcataaatgatattatttatgcaacccagttagtcgaagatttggttttaggaaaaataaaaattgttgattttttaaaatcatataacaatttttattgttggcttggttttgatgagttgcctcaatctgagaaaataaaattcctaagctatctcaatatattatga

SEQ ID NO: 37473 - DNA, 378 bp, Neisseria meningitidis
atgtgtgagttcaaggattttagaagaaacatcccttgttttgaagagtatgacgaaaattcatttattggcaaatggtatgatgacggggtgtgggatgatgaagaatattggaaattggagaatgatttaatcgaggttagaaaaaaatatccttatccgatggatataccaagggatattgtgattggaatcggtaccattattgattttttaatggttccaaattgggagcttttcgaaattaaagcttccccttggctacctgatagcgtgggaattcatgaacgttatgaaagattcacaacaatgctccgttatatttttaccgagaaagacatagtcaacgtgcgatttgattattacaacaaaaaatag

SEQ ID NO: 37474 - DNA, 372 bp, Neisseria meningitidis
atggctattactaaagaagacattttggaagcagttggttctttgaccgtaatggaattgaacgacttggttaaagcttttgaagaaaaattcggtgtttctgctgctgctgttgcagttgcaggtcctgctggtgccggtgctgccgatgctgaagaaaaaaccgaatttgatgtcgttttggcttctgccggtgatcaaaaagtcggcgtgattaaagttgtccgtgcaattaccggtttgggtctgaaagaagctaaagacatcgttgacggcgcacctaaaaccattaaagagggtgtttctaaagctgaagccgaagacatccaaaaacaactggaagaagcaggcgctaaagtcgaaatcaaataa

SEQ ID NO: 37475 - DNA, 1116 bp, Neisseria meningitidis
atgaaagtaggtttcgtcggctggcgcggtatggtcggttcggttttgatgcagcgtatgaaagaagaaaacgacttcgcccacattcctgaagcgtttttctttaccacttccaacgtcggcggcgcagcccctgatttcggtcaggcggctaaaacattattagatgccaacaatgttgccgaactcgccaaaatggacatcatcgttacctgccaaggcggcgattacaccaaatccgtcttccaagccctgcgcgacagcggctggaacggctactgggttgacgcggcatcttctctgcgcatgaaagacgacgcgattatcgtcctcgaccctgtcaaccgcaacgttatcgacaacggcctcaaaaacggcgtgaaaaactacatcggcggcaactgcaccgtctccctgatgctgatggctttgggcggcctgttccaaaacgatttggtcgaatgggcaaccagcatgacctaccaagccgcttccggcgcaggtgcgaaaaacatgcgcgaactcatcagcggtatgggcgcggttcacgcccaagtggcggacgaacttgccgatcctgccggctcgattctcgacatcgaccgcaaagtatccgatttcctgcgcagcgaagactatccgaaagccaacttcggcgtaccgctcgccggcagcctgattccgtggattgacgtggatttgggcaacggccagtccaaagaagaatggaaaggcggcgtggaaaccaacaaaatcctcggccgcagcgacaatccaaccgtgattgacggcctgtgcgtccgcgtcggcgcgatgcgctgccacagccaagccatcactctgaagttgaaaaaagacctgcctgtttccgaaatcgaaacgattttggcaggcgcgaatgactgggtgaaagtcatccccaatgaaaaagaagccagcatccacgagctgactcctgccaaagttaccggcacgctgtccgtccctgtcggacgcatccgcaaactgggcatgggcggcgaatacatcagcgcgttcaccgtcggcgaccagctcttgtggggcgcggccgagccgctgcgccgcgtattgcgtatcgtgttgggcagcctgtaa

SEQ ID NO: 37476 - DNA, 177 bp, Neisseria meningitidis
atggctataactgttgaaaaactaaaagaaaattttgccaaaaacggccagacgctggcgcagtgggcaagagagaacggctttaagccgcgcgatgtgtatctggtggtcggcggacagcgcaaaggcaattacggcaaggggcatgaaattgccaagaagctgggactgaaataa

SEQ ID NO: 37477 - DNA, 429 bp, Neisseria meningitidis
atgatatctatttttaaagcttattacgatgtttatgaatttaatggggaactattaaaaagatgtatatttttagatgaagaaaatgaagaaaataatgaaataattaaagatagaatatatgaatacttaatttatgttttaacaggagacctttatctacaaaaagacatagatgaaaatttagaatttatccatcaagcagaaaataatcccaatgaagtttattcaggaggtggacaaggtttttgctgggatatttctgctgaaaaagtagttttctataacaacgaatttgatgaagaagacggctggcctgatttaagctgttcgctgcatacttttaaaactactttaattgcttggaatgcttttttgcaattgcctaaaagtattcattcagtggtggaaaccgtgattgaggaataa

SEQ ID NO: 37478 - DNA, 447 bp, Neisseria meningitidis
atggctattgcgaacaataaaaaagcatttcacgattttttcattgaagaccggattgaagccggtttggtcttggaaggctgggaagtcaaagcaatccgcgccgcgcgcgtacagcttaaagagagttatatctattggaaaaaagacgcgttttatctggtcggctgccatattacggctttgcccacagcctcgacacacattaaaccagatgccgtacgtccgcgcaagctcttgttgaaccagtcggaaatcaacaaattaatcggcaaaaccgaacgtgccggctacaccatcgtgccgctggatttgcatttttcgcgcggaaaaatcaagatggaaatcggtttggcaaaaggtaagaaacagcacgacaaacgtcagagtatgaaagaggcggattggaaacgcgagaaacagcggttgattaagcatacgcgctga

SEQ ID NO: 37479 - DNA, 1620 bp, Neisseria meningitidis
atggacaatctcgtatgggacggcgttcccgacatccgcacactcgaccaaaccatccgcaaacacgcacacccgctcaacctgattgtctgcctccccgataatcagattcccgattttcaaaccgcacaagatgcttcggacgcggaatgccgtctgaagcaccgtttggatcaagcaacgcagtgcctccagttcgacagcatcaacctcatcgaacacatcctgcccgatgtccgcttctggctggttcccccttcacgcacccgccgcctgcacgaacacttccaccacatttcctggcagaccgaagccatcccgcaaaccgaaagtaagcccgacaaaccctggtttgcacttccacaaacatccgaacggcaaaaaccggaacacatcctcgttatcggcgcgggcatatccggcgcggcaaccgcccacgccttagcatcatacggcatttccgttaccgtattggaagcccgaaaagccgcccaagccgccagcggcaaccgccaagggctgctctacgccaaaatctcgccacacaataccgaacaaaccgaacttttgctcaccggctacggctacaccaaacgcctgctcggacacatcctgcccgaatccgaaacctggggcggcaacggcatcatccacctcaattacagccgcaccgaacaacaacgcaatcacgaattgggtttgcaaaaacaccataaccacctctaccgcagcatcacgcaggcagaagccgaaaaaatcgccggtatcccactgtccgtcccatacgaccacccttcatgcggactctactggcaacacggcgtatggctcaatccacccgcattcgtccgcgccctcctcaaccatccgctcattggactacacgaagacacaccgttaaccgacatttcccacgacggggaaaagtggattgcaagcacgccaaacggcatattttccgccacacacatcatctactgcaccggcgcgcacagctcctgcctgcccgaaaccaacctcgccgccctgcctctcaggcaaatacgcggacaaaccggcctcacaccatccaccccgttttccgaacaactgcgttgcgccgtttcaggcgaaagctacatcagcccgtcgtggcacggactgcactgctacggcgcgagttttattcccaacagcagccataccggatggaacgaagccgaagaagcctcaaaccgccaagcattggcacagcttagccccgccctcgccgaatcattgtttgccgccaacccaatcccccaaaaacaccaagggcacgccgccatgcgctgcgacagccccgaccaccttcccctagtcggcgcactcggcgacattgccgctatgcaacaaacttacgccaaactcgcgctggacaaaaactatcgcatcgacgccccctgcccgtacctgcccaatgcctacgccaacaccgcccacggcacacgcgggcttgccaccgcccccatctgcgccgccgccgttgcagccgaaatcctaggcttgccccatcccctctcaaaacgcctgcgccacgccctacaccccaaccgcaccatcatccgcgccatcgtcagaaggaaggatctaaccccttaa

SEQ ID NO: 37480 - DNA, 921 bp, Neisseria meningitidis
atgcctaatccgctttacagacagcatatcatctccatttcggatttgtcgcgcgaacagttggaatgcctgcttcagacggcattgaagctgaaggcgcatccgcgcggcgacctgttggaaggcaaacttatcggttcgtgctttttcgagccgtccacgcgcacgaggctgtcgtttgaaacggcggtgcagtgtttgggcggcaaggtcatcggcttttcggacggcgcgaataccagtgcgaaaaaaggcgagacgcttgccgataccgcccgcatcatttccggctacaccgacgctatcatccaacgccaccccaaagacggcgcggcgcgcgtggcagcggagttttcgcgcgtccccgttatcaacgccggcgacggcacgaaccagcaccccagtcagaccttgttggatctggtaacgatttatgaaacgcaggggcgtttggacaagctcaaaatcgcgatggcgggcgacttgaaatacgggcgcaccgtgcattcgctttgtcaggcgttgaaacgctggggctgcgaatttgccttcgtctcgccgcccagcctcgcgatgcccgactacattaccgaagagttggacgaagccggctgccgataccgtatcctcggcagtttggaagaagcggcggaatgggcggatatcctgtatatgacccgcgtccagcgcgaacgtttcgacgaacaggaatttgccaaaatccaaggcaaattcaacctcgaagcgtctatgctcgcccgcgccaaaccgaacctgcgcgtgctgcaccccctgccgcgcgtggacgaaatccatcccgatgtcgatgccacgccgcacgcctattatttcgagcaggcgaccaacggcgtttatgcgcgtatggcgatattgtcgctggtgttgaacgaagaagtgtga

SEQ ID NO: 37481 - DNA, 1335 bp, Neisseria meningitidis
gtgggcgaacctgaaaacaaatcatccgaacccgtacgcgagatacaggcatcaaaagaaatgccgtctgaaacctcttccccacgcaaagaaaacgaaacagaagtacacattcctgccgctccttttatcgtcaaacagtccggcagcaacgctttggcagtctgcgccctggtattggcggcattgggtttgggtacaagtggttttttgtttgtccaaggacagaatgtcttgaaaaaccaagagctggcattcaaccaaaaaatcgacaaagccgccttgggcgagtcggaaaacgccgccctgttgaaagacaacctcaaccggcaagccgccatacaatcagagctcgaccgtttggacggaaacgtcaaagcaaacggcgaacaaatcttggaaatgcaaaaatcctatcgcgagttgaccaaaggacgcgccgattggctggtggacgaaaccgagaccatactcaatctggcggcgcaacagctggtgttgaccggcaatatccaaacggcagtcggcgtattggagcatatcgacagccgcctgtcccgtttcgatcaggcagagcttctgccgatcaaacaggcagtcagcagcgacttggcggaactgaaaaaccgtccctatgtcgatatttccggcacggcattgcgcctcgacaggctggaaaccgccgtatccggactgccgctgattttggacggcgtattgaagccgggcgtacaggtgaagaacgaagccgcttctgcttcatggtggcagaacgtatgggaaaaatccctcggcacattgaaggggctggtcgaaatccgccgtttggaaaacaacgatgccatgctgatttctcccgaacaggcatattttgtgcgtgaaaacctgcgcctccgccttttggatgcgcggactgcattaatgcagcgcaacagcgaagtctatcagggcgatttgaacaatgccgaagccgccgtcagacagtatttcgatgccaagtctcccgccacgcagtcgtggctgaaagaactggcggaattgaaggcgttggatgtgcgcatgacggcggatgacggtttgaaaaacagcctaaatgccgtccgcgcctatcgcgacggtacgcgcatgacggcggcggaaaatcaagaagcagaacaggcggcttccgaaccggcaaacgaaaacacagcttccgaaccggctgccgcatcggatgtgaagaccatagaagcaccgtccctgccttcggaacgcaaaccggaacagcctgcaaaaaaacagcccgtaccggaaaaggcagggcgttcgccgtccgctaaaggagaacgcgcatga

SEQ ID NO: 37482 - DNA, 519 bp, Neisseria meningitidis
atggctaaaacccgaatcaaacagcccgccatcgaagcggcacaagacaaaacggaagttactgcatttatccgccaaatcggcgacttgcagcgcgaagtcaaacgcctggaaaccgaagccggagacaaaaaagcggctatcgaagaagaatatgccgccaaagccgcgccgatgtgtgccgaaatcatgagcctgaccgaacgtgtggccgcctactgcgaagcgcataaggacgagctgacggaaaatggtaaaaccaaaaccgtggactttaccaccggcctgattaaatggcgcatccgtccgccatctgtcaaggtaacgggcgtggccgccgtcctggcgtggctctcggaaaaatccgcctttgccgagtttgtccgcactaaaaaggaaatcgacaaagacaccatcctgaatcaaaaagagtgtttttcagacggccaagttccggggattaagattgtgagcggcgtggaggattttgtgattgagccgagcgaacaaattctataa

SEQ ID NO: 37483 - DNA, 630 bp, Neisseria meningitidis
atgaacctttttcaaaacgccaaattcttcacgacggtaaaccatctcaaagacctgccggacacaccgctcgaaattgcctttgtcggcaggagcaatgccggaaaatccagtgccatcaataccctgaccaaccatgtccgtcttgcctacgtttcaaaaacacccggacggacgcagcatatcaacttcttcgagctgcagaacggcaattttatggtcgatttgcccggctacggttatgcccaagtccccgaagcagtacgcgcacattgggtcaatctgctcggcgactatctgcaacagcgcaaacagcttatcgggctggttttgattatggatgcccgccatcctttaaaagaactcgacatccgtatgctggactttttccacacgaccggcagaccggttcacatcctgctgtcaaaagccgacaaattatccaaaaacgaacagataaaaaccctgtcccaagtcaaaaaactgctcaaaccttattccgacaggcaaaacatcagcgtacagctgttttccagcctgaaaaaacaaggtattgacgaggccaaccgaactgtcggaagctggtttgacgcagcagatgccgccgcttcctctccaaaggaaaactga

SEQ ID NO: 37484 - DNA, 381 bp, Neisseria meningitidis
ttggccgaaggtcaaaaatcagccgttaccgagtattacctgaatcacggcatatggcccgccaacaacaattctgccggcgtggcaacctccgccaacatcaaaggcaaatatgttgagaaagttgaagtcaaaaacggcgtcgttaccgccacaatgctttcaaccggcgtaaacaacgaaatcaaaggcaaacaactctccctgtgggccaagcgtcaagacggttcggtaaaatggttctgcggacagccggttaagcgcgccaacgccaacggcgccaccaacgccaccgccgacggcgttaccgccgacagcggcaagcagatcgacaccaagcacctgccgtcaacctgccgcgacgcatcatctgccagctaa

SEQ ID NO: 37485 - DNA, 1800 bp, Neisseria meningitidis
ttggaggttggtgcaaaacctgcttttttcgcgttacaatctgcacccgatttacttttgaatttgcctgtttggaaaaatacttttatgaaagccagccaattctttatctctactttaaaagaagcccctgccgaagccgcgcttgccagccacaagctgatgattcgcgccggtctgattaaagccaacgcgtccggcctttatacttggatgccgatggggctgcgcgtgttacgcaaagtcgaaaacgtcgtgcgcgaggaaatggcgcgcgcgggcagcgtggagctgctgatgccggtggtgcagcctgccgagctgtggcaggaatccggccgctgggaattttacggtaaagaactgctgcgcctgaaagaccgccacgaccgcgatttctgcatgggcccgacctgcgaggaagtcatcgccgacatcgtgcgcaaagaaatcaacagctacaaacagctgccgaaaaacttttaccacatccaaaccaaattccgcgacgaagtgcgcccgcgtttcggcgtgatgcgcgcgcgcgagttcgtcatgaaagacgcttattccttccatgccgactacgcctcgcttcagacgacctatgatgccatgtatgactcttactgccgcatcttcacccgtctgggcttggcattccgccccgtcgccgcagacaccggcagcatcggcggtacgggttcgcacgagtttcaagtgttggcggaaagcggcgaagatgttattgcgtacagcgacacttccgattacgccgccaatatcgagttggcaccgaccttgccgcttaaaggcgaacgcgccgctgctcaggctgtgttgaccaaagtacatacaccaaacgtcaaaaccattgagtctttggttgaattcctgaatattccggttgaacaaaccctcaaatccatcgtggtcgaaggcgaaaacgaaggcgaaatcgtcttattactgttgcgcggcgaccatgagttcaacgacatcaaggcagaaaaactcgcaggcgtgagatcgccattgacgatggcaagtcctgccgcgattgtcgaacagttcggcgcaaacggcggctcgctgggtccggtcagctttgcaggtaaagtttatgccgattttgctactgaaaaaggagcggactgggtcatcggtgcgaacgaagacggctaccactacaccagcttcaacttcgggcgcgatgccgccgagcctgaattcgtcgatttgcgtaatgtggtcgaaggcgacgaaagccccgacgggcaaggccgtctgaaactcgcgcgcggcattgaagtcggacacgtcttccagttgcgcgacaaatatactaaagccatgaacgtcagcttcctcgacaacaacggcaaatcgcaaattatggaaatgggctgctacggcatcggcatcacccgcgtcgttgccgccgccatcgagcagaataacgacgaaaaaggcatcatctggaccaaagcaatggcgccgtttgaagtcgttatcgtgccgatgaactacaaaaaatcagacaccgtacgcgaagccgccgacaaaatctatgccgaattgctggcggcaggcgcggatgtgctgctggatgaccgcgacgaacgcgcgggcgtattgctgaacgactccgagctgttgggcatcccgcaccgcatcgtcatcggcgaccgcgccttgaaagaaggcaatgtcgaatacgccgaacgccgcaacaacgaagcgcaggcagttgcaatcggagaaattgttgcgcgtgtaacagcttcattaaatgcgtaa

SEQ ID NO: 37486 - DNA, 1197 bp, Neisseria meningitidis
gtgaccgtcggttatggcttcagtgccagtggcgattacagccaaagcaaaatccgagccaatcatgcttcggtaaccgagcaaagcggtatttatgccggagaagacggctatcaaatcaaggtcggaaaccatacagacctcaaaggcggcatcatcaccagtacccaaagcgcagaagacaagggtaaaaaccgattcagcacaggcacactcgccggcagtgatattcaaaattacagccaatacgaaggaaaaagttttggattgggcgcaagtgcgtccataagcggcaaaacactgggacagggcgcacaaaataagcctcaaaacaaacacctgacaagcgtggccgataaaaacggcgcaagttcatcagtaggctacggcagcgacagcgacagcgacagccaaagcagcatcacaaaaagcggcatcaatacccaaaacattcaaatcaccgacgaagccgcacaaatccggctgacaggaaaaacagcggcacaaaccaaagccgatattgatacaaacgtaaccacagacaccgccgaacgacattcgggcagcctgaaaaacgtatttgacaaagatagagtgcaaagtgaactggatttacaaagaaccgtcagccaagattttagtaaaaatgttcaacaagccaataccgagattaaccaacatttagacaaactcaaagcagacaaagaagcagccgaaacagcagcagccgaggcattagccaatggcgatatggaaactgccaaacacaaagcccatgaagctcaagatgcggcagcaaaagcagataattggcaacaaggcaaagtcattctcaacatgttagcctcaggtttagctgcgccgacccaaagcggagcgggcatcgctgcggctaccgcatcgccagccgtatcgtatgcgattggacagcactttaaagatttagccggtcaaaacgcgaatggcaaactaaccgccagtcaagaaaccgctcacgttcttgcccacgcggtattaggagcagcggttgcagcagcaggaggcaacaatgccccggcgggagcattgagtgcgggcgggtcggaagcggctgcgccttacatcagcaaatggttatatggcaaagaaaaaggaagtgacttaacggcggaagagaaagagactgagacctttgcaaaattccccaaaatcccctaa

SEQ ID NO: 37487 - DNA, 795 bp, Neisseria meningitidis
gtggcagaagagctggcgcgttcggacaaacgggtcggtgtcgtgcatggcggttttgcttcgtttcagacggcattggacggtttgggtatcggcaaggtggacggtgcgctgtttgatttggggatttcgtctccgcaaatcgatgacggcagccgcggtttcagctttcgtttcgatgcccctttggatatgcgtatggatacgatgcgcggtatgtctgccgcagagtggatagcggttgcgtcggaacaggatttgcacgaggtaatcaagaattatggtgaagagcggtttagccgccagattgcgcgcgccattgttgcgcaacgggcggaaagtccaatcgatacaacccgcaagctggcgcagatcgtggcacaaaacgtccgtactcgcgagcgggggcaggatcctgcgacgcgcaccttccaggcaatccgcatctttattaaccgcgagcttgaagaagtaggggcagtattgccgcaggtcatgtgtcgtctgaaagagggcggacgtttggcggtcattgctttccattcgttggaagaccgcattgtgaagcagtttgtcaaaaaatattcgcaacacgcgcccctgccgcgctgggcggcggtcagggaagcggatttgcccgagccgcccctgaaaatcgcgggcagggcattaaagccgggtgaggcggaaattgccgccaatccgagggcgagaagtgcggttttgcgtgtggcggagcggactgccggtccgataccggaacaatcacagagaaaaacgtctgaatggcaatga

SEQ ID NO: 37488 - DNA, 1041 bp, Neisseria meningitidis
atggatatttcagattttgattttaccctgcccgaaaagctgattgcccagcatccgcccgaagtgcgcggcagcagccgccttttggttgcgttgcccgatatgccgctgcaagaccgggtgttcggcgatttgccggattatgtcgaggcgggcgacgttttggtgttcaacaacaccaaagtcatgaaggcgcggctgtttgggcagaaagacagcggcggcaggatcgaagccctgatcgagcgtgttttagacagtcataccgcactggcgcacatccgttcgtccaagtcccccaagcccggtatggggctggtgtttgaaggcggcatccgcgccgtgatggtcgggcgtgagggcgaactgttctgcctgcgttttgaaggcggagagaccgtttacgaacttttggaacagaacggacacctgcccctgccgccttatatcgaacgtgccgccgatgcggacgacgacagccgttatcaaaccgtttatgccaaatatcagggcgcggtcgccgcgccgacggcgggcctgcattttacggaagaacttttgcgccgtctgaaagacaaaggcgcggtaaccgcagaagtaaccctgcacgtcggtgcgggaacgttccaacccgtgcgcgtcgataaaatcgaagaacacaaaatgcacagcgaatggtttgaagtgccgtctgaaaccgccgccgccgttgaggcggcaaaagcccgggggaacaaagtctgggcggtcggcacgacttccatgcgcgccctcgaatctgccgcgcgtgcgacgggtcgtctgaaagcggggcagggcgacaccgatattttcatcacgccgggctaccgttttaatgttgtcgacagactggttaccaattttcatttgccgaaatcgacgctgctgatgttggtcagcgcgttttcgggtatgggtcatatccgcgccgcgtatcgtcatgcggtcgaacgcgaataccgtttcttcagctacggcgatgcgatggttttggggcggaacgaaggggtggtacgttag

SEQ ID NO: 37489 - DNA, 699 bp, Neisseria meningitidis
atgaaatccagacacctcgccctcggcgttgccgccctgttcgcccttgccgcgtgcgacagcaaagtccaaaccagcgtccccgccgacagcgcgcctgctgcttcggcagccgccgcccccgccggactggtcgaagggcaaaactataccgtccttgccaacccgattccccaacagcaggcaggcaaggttgaagtccttgagtttttcggctatttctgcccgcactgcgcccacctcgaacctgttttgagcaaacacgccaagtcttttaaagacgatatgtacctgcgtatcgagcacgtcgtctggcagaaagaaatgctgccgctggcacgcctcgccgccgccgtcgatatggctgccgccgacagcaaagatgtggcgaacagccatattttcgatgcgatggtcaaccaaaaaatcaagccgcaaaatccggaagtcctcaaaaaatggctgggcgaacaaaccgcctttgacggcaaaaaagtccttgccgcctacgagtcccccgaaagccaggcgcgcgccgacaaaatgcaggagctgaccgaaaccttccaaatcgacggtacgcccacggttatcgtcggcggtaaatataaagttgaatttgccgactgggagtccggtatgaacaccatcgaccttttggcggacaaagtacgcgaagaacaaaaagccgcgcagtaa

SEQ ID NO: 37490 - DNA, 216 bp, Neisseria meningitidis
gtgtttaagctcggcgtttatgcctgtctcggactgtttgccggctgggtgctgctgctgatcgtgcaactctggttttcttttatcgaagcggaattgttcttcaaaatcacactgactatggcggggctgtttgtcatcatcctcgccgccctgctggtatgcggccagtatttttccgaaaagaaaatgaaagacgacgggtttatcaactga

SEQ ID NO: 37491 - DNA, 435 bp, Neisseria meningitidis
gtggcaaagaaaattatcggctatattaaactgcaaattcctgcaggtaaagccaatccatctcctccggttggtcccgctttgggtcagcgcggtttgaatattatggaattttgtaaggcattcaatgctgcaacccaaagtatggagcctggcttgccgattccggttgtgattactgcatttgcagataaatcgttcacatttgtgatgaaaaccccgccagcttctatcttgttgaaaaaagctgccggtttgcaaaaaggtagttctaatcctctgaccaataaagtgggtaaattgacccgtgctcagttggaagaaattgctaaaactaaagagcctgatttgactgctgctgacttggatgcggctgtccgtactatagcaggttctgctcgctcaatgggcttggatgtggagggtgttgtataa

SEQ ID NO: 37492 - DNA, 1035 bp, Neisseria meningitidis
atgcaaaccctgaccattatccgccccgacgatatgcacctgcacctgcgcgacggcgacgcgctcaaagccgttgtgccttataccgccagacagatggggcgcgccgtgattatgcccaatctcaaaccgcctgtcgtcagcgttgccgacgcgcttgcctacaaagcgcgcattatggcggcgttgcccgaaggcagcgcgtttgagccgttgatgacgctttatttgactgataacgccacgtccgaacttgtacgcgaagccaaagccgccggcatcgtcgccttcaaactctatcctgccggcgcgacgaccaattccgattccggcgtaaccgacctgttcaaactcatccccgttttggaagaaatggcaaaacagggcattttgttcctcgttcacggcgaagtaaccgaccccgaaatcgacatcttcgaccgcgaagccgcctttatcgggcgcgtgatgaaacccgttttggcgcaagtgccgaatcttaaagtcgtgttcgaacacatcaccaccgccgaagccgcccgcctggttttggaagcaggcgacaacgtagccgccaccgttaccccgcaacacctcctgctcaaccgcaacgacctcttggtcggcggcgtgcgcccccatcatttctgcctgcccgtactcaaacgcgaaacccaccgtcaggcattggttgccgccgttaccggcgagaaggcgcacaaattcttcctcggcaccgactccgcgccgcacgccaagtccgccaaagaaaacgcctgcggctgcgccggtatgttcagcgcgatgaccgccgtcgagctttacgccgaagtgtttgaaaaagcaggcgcgttggacaaactcgaagcctttgcctcgaaaaatggcgcaaggttttacggcattccggaaaacgccggcacgatcaccctcgtcaaacaaagccaaaccgtccccgcaagtgttccctacggcgacggcgaacttgtcccgatgcgcgcgggcggcgaaatcggctggacggtacagtattga

SEQ ID NO: 37493 - DNA, 2277 bp, Neisseria meningitidis
atggcacaaactacactcaaacccattgttttatcaattcttttaatcaacacacccctcctcgcccaagcgcatgaaactgagcaatcggtgggcttggaaacggttaccgtcgtcggcaaaagccgtccgcgcgccacatccgggctgctgcacacttcgaccgcctccgacaaaatcatcagcggcgacaccttgcgacaaaaagccgtcaacttgggcgatgctttggacggcgtgccgggcattcacgcctcgcaatacggcggcggcgcgtccgctcccgttattcgcggtcaaacaggcaggcggattaaagtgttgaaccatcacggcgaaacaggcgatatggcggatttttctcccgatcacgccattatggtagataccgccttgtcgcaacaggtcgaaatcctgcgcgggccggttacgctcttgtacagctcgggcaatgtggcggggctggtcgatgttgccgatggcaaaatccccgaaaaaatgcctgaaaacggcgtatcgggcgaactcggattgcgtttgagcagcggcaatctggaaaaactcacgtccggcggcatcaatatcggcttgggcaaaaactttgtattgcataccgaaggcttgtaccgcaaatcgggcgattacgccgtaccgcgttaccgcaatctgaaacgcctgcccgacagccatgccgattcaaaaacaggcagcatcgggctgtcttgggtgggcgaaaaaggctttatcggcgcggcgtacagcgaccgccgagaccaatacggcctgcctgcccacagccacgaatacgatgattgccacgccgacatcatctggcaaaagagtttgattaacaaacgctatttgcagctttatccgcacctgttgaccgaagaagacgtcgattatgacaatccgggtttgagctgcggcttccacgacgacgataatgcacacgcccatacccacaacggcaaaccatggatagacctgcgcaacaaacgctacgaactccgcgccgaatggaagcagccgctccccggttttgaagccctgcgcgtgcacctgaaccgcaacgactaccaccacgacgaaaaagcaggcgatgcggtcgaaaacttcttcaacaacaaaacgcaaaacgcccgtatcgagttgcgccaccaacccataggccgtctgaaaggcagctggggcgtgcaatatttacaacaaaaatccagtgctttatctgccatatccgaagcggttaaacaaccgatgctgcttgacaataaagtgcaacattacagctttttcggcgtagaacaggcagaatgggacaacttcacgcttgaaggcggcgtacgcgtggaaaaacaaaaagcttccatccagtacgacaaagcattgattgatcgggaaaactactacaagcagcccctgcccgacctcggcgcacaccgccaaaccgcccgctcgttcgcactttcgggcaactggtatttcacgccgcaacacaaactcagcctgaccgcctcccatcaggaacgcctgccgtcaacgcaagagctgtacgcacacggcaaacacgttgccaccaacacttttgaagtcggcaacaaacacctgaacaaagagcgttccaacaatatcgaactcgcgttgggctacgaaggcgaccgctggcaatacaatctggcactctaccgcaaccgcttcggcaactacatttacgcccaaaccttaaacgatggacgcggccccaaatccatcgaagacgacagcgaaatgaagctcgtgcgctacaaccaatccggcgccgacttctacggcgcggaaggagaaatctacttcaaaccgacaccgcgctaccgcatcggcgtttccggcgactatgtacgaggccgtctgaaaaacctgccttccctacccggcagggaagatgcctacggcaaccgtcctttcatcgcgcaggacgaccaaaacgcccctcgcgttccggctgcgcgcctcggcgtccacctgaaagcctcgctgaccgaccgcatcgatgccaatttggactactaccgcgtgttcgcccaaaacaaactcgcccgctacgaaacgcgcacgcccggacaccatatgctcaacctcggcgcaaactaccgccgcaatacgcgctatggcgagtggaattggtacgtcaaagccgacaacctgctcaaccaatccgtttacgcccacagcagcttcctctctgatacgccgcaaatgggccgcagctttaccggcggcgtgaacgtgaagttttaa

SEQ ID NO: 37494 - DNA, 552 bp, Neisseria meningitidis
atgccgtctgaacgccgaccgtttcaaacggcatttttatcgaacaggaaaaccgtcggtaaacttgcagagcgtgtgcaatcccgatatgatggtttgcataaatttaaacatatatgttccgcagctatggcactgattaaagagccgttggacaaagcgaaacaaaggaacgaagaacttgaagcggcagaagaagcggcggcgcaggaggcattgggtcgggagcaggaagccgcccgcgtatccgaatgggaagaacgctacaagttgtcgcgcagcgagttcgagcagttctggaaaggattgccgcaaactgtacagaataaactgcaagcttcgcagaaaacatggaaaagcggtatggacaaaatctgtgccaacaatgcgaaagccgaaggtgaaacgccaaacggcataaaagtcagcgaactggcatgcaaaacggtggaaaccgaagcacgcttggaagagctgtacaaccgtaaaaaagcccttatcgacgaaatggtcagggaagcggacaagaaagaactgccaaagcggctctga

SEQ ID NO: 37495 - DNA, 1125 bp, Neisseria meningitidis
gtgtgcggattatgccataaaacggtgcccgccccaatcgcgggcgcgtccggagattggaaatcctgcttaaaaaatgtacaatgtcgcacttttttgaaacgcggacccattatgcacatcggcggctattttatcgacaaccccatcgcacttgcgccgatggcgggcattaccgacaaacccttccgccgcctttgccgcgagtttggcgcgggttgggcagtgtgcgaaatgctgaccagcgacccgacgctcagaaatactagaaaaaccttgcaccgcagcgattttgtcgatgaaggcggcatcgttgccgtgcagattgccggcagcgatccgcagcagatggcggatgcggcgcgttacaacgtcagcctcggggcgcagcttatcgacatcaatatgggctgtcccgccaaaaaagtgtgcaacgtccaagccggcagcgcgctgatgcagaacgagccgctggttgccgccattttggaagccgtcgtccgtgcggcaggcgtacccgttaccctcaaaacccgtttgggctggcacgaagaccatcaaaacctgcccgtcatcgccaaaatcgccgaagattgcggcatcgccgcccttgccgtccacggacgcacgcgcacgcaaatgtacaaaggcgaggcgcgttacgaactcatcgccgaaaccaaatgccgtctgaacatcccggtctgggtcaacggcgacatcacttcgccgcaaaaagccgccgccgtcctcaaacaaaccgccgccgacggcatcatgatagggcgcggcgcgcaaggcagaccgtggttcttccgcgatttgaaacattacgccgaacacggtgttttaccgcctgccttgagtttggcagaatgcagtgccgccattttgaaccacgtccgcgccatgcacgcgttttatggtgagaccgccggtgtgcgcattgcacgcaaacacataggctggtacatcgacgaaatgcccgacggcgaacagacacgtcgtgaaatcaaccgcttggacagtgcggcggcgcaatacgacatgcttgcaggttatcttgaaagacttgccggaaaaaccgaccgttgggcgtgcgcctaccgcccaaatgccttctga

SEQ ID NO: 37496 - DNA, 876 bp, Neisseria meningitidis
atggcttacctgttaatcagcatcgtgttcagcgtgtcggtttccattttgctgaaaatggcaaggaagaaaaaaatcgacatcgcgcaggcggtcgccgtcaattatgtggtcgcggtcatactgaccctgctggtattgaagccggatgtcggcaatatcggcgcatttttgccgacgtggccgctgtttgccgcattaggcgtgctgctgccgtccgtattcgtgataatgggcaaatccgtagaatccgccggtatcgtcaaatccgacgcggcgcagcgtttgtcgctgtttttgccgattgttgccgctttaacgctgtttggcgaaaaactcagcgaaggcaaactaatcgggctgtgcctcgcctttgccgcactgttctgcctgctttggaaacacagcggtggcaaaaaatcaggaagcgcgtggcggcaggcggcattgctgctgggcgtgtgggcaggttacggcattatcgatatcctgttcaaacagcttgccaaaagcggaacggcatttgcgggcaacctgctggttgcatttgtgctggcgggtgtgctgatgtttgcctgcctgtttgccaaatcggtcagatggcgcgcagagagtgtggtcggcggcatactcttgggcggtttgaattttatgaatatcgtaacctacatcaccgcgcaccaaatgatgaaggacaatccgaccttggtttttgccggtatgaatatcggcgtgattgttttgggtacgctttcgggcgcattgttttttaaggaaaaaatcaacacaatcaatacggcgggaatcgtgttggcactgtgttctatcgcctgcctgttttattggggggaagtcaaggtactgttcggcatataa

SEQ ID NO: 37497 - DNA, 2028 bp, Neisseria meningitidis
ttgtccctgtctgaatttatagaacgccgaacgtcatttaatccgatggttattttgacgactttgttttttgtgtgtgttttggtggtattggttttaaccgtgccggatcaggcgcagatgtggctcgatcgggcaaaagaagtcatttttaccgagttcagctggttttatgttttaacgttttccatttttctgggtttcctgctgatactctcggtcagcagtttgggaaacatcaggctcggacgggatgaagatgtgccggaattcggcttcctgtcgtggctggcgatgctgtttgcggccgggatgggcgtgggtctgatgtttttcggcgtggcagagccgttgatgcattatttttcggacattacggccggcacgccggaacacaggcagcagcaggcattgctgcacacggtgttccattggggcgttcacgcttggtcggtgtacggtacgattgcattggctttggcttatttcggtttccgctacaagctgccgcttgccctgcgttcttgtttttaccccctgttgaaagaaaaaatttccggaaggttcggcgatgccattgatattatggcgttgcttgctacttttttcggcatcatcaccacattggggttcggggcttcgcaactgggcgccggattgcaggaaatgggctggattgccgaaaacagcttcagcgtgcaggttttgattatcgccgccgtcatgtccctcgccgtcgtttcggcaatatccggcgtggggaagggcgtgaaggtgttgagcgagttgaacctgagccttgcgtttttgctgctgttttttgttttggcggcgggtcccactgtttacctgttgtcggcattcggcgacaacatagggaactacctcggaaatctggtgcgcctcagttttaaaacttatgcgtacgaacgggaacacaagccgtggtttgaatcttggacggtgctttattgggcgtggtggtgttcttgggcgccgtttgtgggtttgtttatcgcgcgcatttcaaaggggcgcaccatccgcgagtttgtcttcggggttttgctcatccccggcctgttcggcgttttgtggtttaccgtcttcggcaatacggcgatttggctgaatgacggggttgcggggggagtgctcgaaaaaatgacctcctctccggaaacgctgctttttaaattctttaattacctccctctgcccgaactgacgagcatcgtcagcctgctggtcatttctctgttttttgtaacttctgccgattccgggatttatgtcctgaacaatattacctctcgggacaaaggcttgagcgcgccacggtggcaggcggttatgtggggcgtgctgatgtctgccgttgccgttttgctgatgcgctcgggcggactcggcaacctgcagtctatgaccctgattgtttccctgccgtttgccctgctgatgctgataatgtgtttcagcctgtggaaaggattgagtgcggataagaaatattttgagacccgggttaaccctaccagtgtattttggacgggcggcaagtggaaagaacggctggtgcagataatgagccagacgcaggagcaggatattttaaaattcctcaaacataccgcatcgcccgctatgcacgagttgcaacgggagctttcggaagaatacggcttgagcgtccgggtcgataagatgtttcatcaggacgagcccgcaatcgagttcgtcattcggaaagagacgatgcgcgattttatgtacgggattaagtctgtcgggcaggatgtatccgaccagttgattaacgacggcaagctgccgcatatccggcaccagacaacttacaaaccctacgcttattttttcgacgggcgcgtcgggtacgatgtgcagtatatgaacaaggacgagctgattgccgacattttgaaaaactacgaacgttatttgatgttgttggatgatgtcggtcaggaactgatggcgcacgagcaggtggaattggcagagtaa

SEQ ID NO: 37498 - DNA, 663 bp, Neisseria meningitidis
atggattcccgaaaatttaccgaagcatccaaacggcggttgagcgaattgttggatgccaaaagcgaacaaggcaacacgatgcgttgcgacgaggttcaaggttttatgacggcgctgttgagcgggccggacaaattgacaccgctcgactggctgcccgaagtgttgggcgacgaatcgcaatttaccgccgccgaacgttccgaaatcgaacggctggttttggcaatggcgatggaaacaaccgccgcgatgtcggataaaaaactgcccgatttgtggctgtatgaaaacgaagacggcggcagcgatttttacacatggtgcaatgcttatctttacggtttggatattgtgccgaccgattggtttgaagccgtcgatgatgaagcgtttgaagagttgttttatcccatcatggcattgggcggtatttacgacgaagaggacaacggcactatccgtctgcaattcacagaaggcgagctggcggaactggaatccgagttgccttatgcattggcggatatctaccgctactggcaggcggtcatcaacaagccgcaaaccgtccgcagggaaggcgaaaaaacaggcaggaacgatccctgtccgtgcggcagcggcagaaaatacaaggcgtgttgcggtaagaattga

SEQ ID NO: 37499 - DNA, 735 bp, Neisseria meningitidis
atgagcgcaaacgtcagccgccttgttgttcaaaacctgcaaaagagttttaaaaaacgccaagtcgttaaaagcttctcccttgaaatcgaaagcggggaagtcgtcggcctgctcgggcccaacggtgcgggtaaaaccaccagcttctacatgattgttggactcattgccgccgatgcgggcagcgtgatgctggacgggcaggaattgcgtcacctgcccatacacgaacgcgcccgcctgggtgtcggctacctaccgcaggaagcctctattttccgtaaaatgaccgtcgaacaaaacatccgcgccattttagaaatcagtaccaaagacaaaagccgcatcgacggcgaagttgaaaaactgcttgccgacctgaatatcgagcgtttgcgcaataatcctgccccatctttgtcgggcggcgaacgccgacgcgtcgaaatcgcccgcgtacttgccatgaaaccgcattttattttgttggacgagccttttgccggcgtcgatcccatcgccgtcatcgacatccaaaaaatcatcggatttctcaagtcgcgcggtatcggcgtattaattaccgaccacaacgtacgcgaaaccctcagcatctgcgatcgggcctacattatttcagacggcacggtgttggcatcgggaaaacctgatgatttggtcggaaacgaacaggttcgttctgtttatctgggtaagaacttcaaatattga

SEQ ID NO: 37500 - DNA, 582 bp, Neisseria meningitidis
atgaacctgcgcgatgatttgcaactgatttacgaccggatacccgaaggcagccgcgtcttggacttgggctgcggcgacggcgaactgcttgccgcattggtcgaacacaaaaaatgcagcggctacggcatcgaaatcgacaccgacagcgtgattgccgcgatgtcgcgcggcgtgaatgttatccaagccgatttggaagaaggtttaaccgcattcaacgatcaaagttttgatgtgattgtgttgagccaaaccatccaagcgatgcagaataccgaaaaaatcctgcgctgcctgatgcgcgttgccaaacaggcgattgtcagcttcccgaatttcggctactggcgcaaccgtgtccaaatcgcactcggcggacatatgccggtttccgaacgtatgccctaccattggtacgacacgcccaatatccattggtgcacgctcaaagactttgatttgttgtgcgccaaaaacaacatccgcgtcctcgaacgcgccgtgatgacgggcaacagacaggtcaaacatttccccaaccttttgggcagcctggcgttttaccgcgtcgggtaa

SEQ ID NO: 37501 - DNA, 849 bp, Neisseria meningitidis
atgttaagcaaaatcagcgaatcactggcaaacctttccggtgcggaacgcaaagtcgccgaatgtgcattggcggaacccaaatggttcgtccatgccgccgttgccgaaattgccgaacgtgcgtccgtcagccagccgaccgtcatccgattctgccgcagcttgggttataaagggctgcccgagttcaagctcgccttgtccgccagcatcggtcatgagggtatgccctatgtccacgaagaactcaacgccgacgacgatatggcaagcgtggtcgagaaagtgttgggcaatgccgccgcctcgctgttgggcgaacgccgcttcctgaaagagtcggagctggaaaacgccattgccacgctgatgcacgcccgtcgcgtcgagttttacggtgtcggcaattccggcattgtggcacaggacgcgcagcataaatttttccgtttcggcatgtccaccgtcgcctatgtcgatacgcacacgcagctgatggcggcatctgttttgagcgatcaggatgttttggttgccatttccaacacgggttcgtctatcgaacttttggatgcggtcagcatcgccaaagaaaacggcgcgtctgtcatcgcactgacccgcaacgattcgcctctggcgcaacttgccgactgcgtgttgagcgttgccacacaggaaaatgccgaactctacacgcccatggtttcccgcctcttgcagcttgccgtcatcgacattctcgccatcggacttgccctgcgcttgggcgatgctgccagcctgcaattgcagaaaagcaaaaaaagcatacacaacaagcacatcgattacgacaaagattga

SEQ ID NO: 37502 - DNA, 279 bp, Neisseria meningitidis
ttgctatgcactcaaacagatggggataacgcgcaaaaaaagaccaccacttacaaagaacaagacccggccaaagtaacgcattatttgacacagccggccgaattttccgactaccaacgtgtttatttggatgaaacaggatttgaccgctacctgttccgtccctatgcccgcagcctgaaagggcaaatagtgaaagcgcagataagtggaaaaagatatagtggattaacaaaaatcaggacaaggcgacgaagccgcagacagtacaaatag

SEQ ID NO: 37503 - DNA, 564 bp, Neisseria meningitidis
gtgcaggataaaaacaacctctgctggctcgatatggaaatgacggggcttaatcccgaaaccgaccgcattatcgaagtcgcgatgattattaccgactcggatttgaatgtattggcgcaatccgaagtttacgccgtccaccaaagtgacgagctgctcgacaatatggacgagtggaacaccgccacacacggcaggacggggctgacgcagcgcgtacgcgaatcgtcgcataccgaagccgaagtcgaacagaaactgctggactttatgtcggaatgggtacccgaacgcaccacgccgatgtgcggcaattccatccaccaagaccggcgttttatggtcaaatatatgccgaaactggaaaactacttccactaccgcaacctcgacgtttccacgctcaaagagcttgccaaacgctggaatccgcccgttgccaaaagcgtggtcaaacgcggttcgcacaaggcattggacgacattttggagagcatcgaagaaatgcgccactaccgcgaacactttctgatttccgccccgagagccgaagcgcaataa

SEQ ID NO: 37504 - DNA, 678 bp, Neisseria meningitidis
atgcaagctgattttaaccgtcccgtcctggctatcgataccggtacttcccatttgtcgctcgcgctgcgcgccgacggcgaaacccgcctgttccatcaggaggccggcagccgccaatccgaactgattctgccggaaatccgcacgttgtttcacgatgtaggcattaccgccgccgatttgggggcgattgtttatgcgaaaggccctggcgcgtttaccggactgcgtattggcattggcgtggcgcaaggtttggcaacgccgtttgatacccctttaatcggcgtaccctcgctcgatgccgccgcctcactgccgccgccgcaaagctgcatccttgccgctacggacgcgcgtatgggcgaagtgttttatgcatggttcgatacgctgaactgccgccgtttgagcgattatcaggtcgggcgggcggcagacatccggctgccggagggatgcgccttttcagacggcatcggcaatgcgttcgcgctggaaaaccgtccgcccttctcaggcaaacccgatatgccgaccgctgccgacttcctcaatctggcggcagaaggcggttttcccgccgtcgctgcggcacacgccgagctgctctacgtccgcaacaaaatcgccctgactgccaaagaacaggcggaacggagggcgcgtccgtga

SEQ ID NO: 37505 - DNA, 849 bp, Neisseria meningitidis
atggacttcaaacaatttgattttttacacctgatcagtgtttccggttgggagcatctggctgaaaaggcgtgggcgttcgggctgaaccttgccgccgcgctgcttatttttttggtcggaaaatgggcggcgaaacgcattgtcgctgtgatgagggcggcgatgacgcgcgcgcaggtcgatgccacgctgattagttttttgtgtaatgttgccaatatcggcttattgattttggtgattattgccgcattgggcagattgggcgtttccacaacatccgtaaccgccttaatcggcggcgcgggtttggcggtggcgttgtccttgaaagaccagctgtccaattttgccgccggcgcgctgattatcctgttccgcccgttcaaagtcggcgattttatccgcgtcggcggttttgaaggatatgtccgagagattaaaatggtgcagacttctttgcggacgaccgacaacgaagaagtcgtgctgcccaacagcgtggtgatgggcaacagcatcgtcaaccgttccacactgccgctgtgccgcgcccaagtgatagtcggcgtcgattacaactgcgatttgaaagtggcgaaagaggcggtgttgaaagccgccgtcgaacaccccttgagcgttcaaaacgaagagcggcaggccgccgcctacatcaccgccttgggcgacaatgccatcgaaatcacattatgggcttgggcaaacgaagcagaccgctggacgctgcaatgcgacttgaacgaacaagtggtcgaaaacctccgcaaagtcaatatcaacatcccgttcccgcaacgcgacatacacatcatcaattcttaa

SEQ ID NO: 37506 - DNA, 936 bp, Neisseria meningitidis
ttggatgaagacgaaacccgaatacctctctgcctgcccgccttcaacaaaatcctgcaatacggctcgctgcaccgccaaagctgcacggcttcggcattttacgcgcgttatttgtggtgcggcagactggcggaacgcgcggcgcaaagcctgaatatgccgtctgaagccgtcgcgctcgccacgcccgtctggcaaaagatggggatgcatcaggcaaatgtgctgacggcggaatatctgaacgtcggtacggatgaagcggaacggctctgccgcgacctgtcggcgttttacggcgatattccgtggcgtttcgttcccgtcctgcctgaattatggctggtttcccttccccgcgcgtaccgctggggcgcgaagcccgttttggacttgggcggattgttgggcacggacgatcagccggacggagaagatgcgttggaatggctgcgcgtccaaaccgaaatccaaatgtggctggcggcacaccccgtcaaccataaccgcaaaaaacgcgggctgcccgagttgaacggcttatggctttgggacagtctgcacggaagcagtcaaggcggcacgcttttcgccgatacggtttggagccgtttccaccccgaccgccgcgcattgcccgacaacttccgcgcctatgaagaaacggcggcacacctgcccgacacgcaccatatcctgtttatggacgatttgcgcctgaccgccctgacaggggacagggagcggtatgcatcggttttacagcagtgggaagaacactggttcgcaccgatctacgaagccgtccgtaccggcaaaatcaaacggctggacatcaccacggacggacaacacggcggtacgctgaccttcaaacccgccgacaggtggaaattttggcgcggcgcgaaaacctttgacggaatctggtga

SEQ ID NO: 37507 - DNA, 1257 bp, Neisseria meningitidis
atgaaagtgcttgttttaggtgcgggtgttgccggcgtgtcttccgcgtggtatctggcagaggcaggacatgaagtaacggtcatcgaccgcgccgagggtgtggcgatggaaaccagttttgccaacgcaggccagctttcttacggctataccacgccttgggctgcacccggtatcccgaccaaagcgctgaaatggctgtttaaaagccatccgcctttgctgtttcgccccgacggcagcctgtatcaaatcgaatggctgtggcaaatgctgcaaaactgcacggcagcgcactatcaaaccaataaagagcgcatggtcaggatttccgaatacagccgtgaaatgttccgccgttttgaagcgcaaaccggcatgaattttgaggaacgcaaaaaagggacgttgcagattttccgccaaaccaaagaagtcgaagcggcagaacaagacattgccgttttggaacgctacggcgtgccgtaccgccgtctgaaacccgaagaatgtgcagaatttgagcctgcgctggcacgcgttaccgccaaaattgccagcggcctgcacctgcctgcagatgcaaccggcgactgccgcctcttcactgaaaacctatacaaattgtgtcaggaaaagggcgtacggtttcatttcaaccaaaccatcagccgcatcgaccacaacgggctgcgcatcaaaaccgttgaaaccgaaacagggcggtttgaagcagatgccgttgtctgcgcgctcggttgtttcagcaggacggttttggcgcagttggatctcaatctgcccatttatcccgtcaaaggctattccttgaccctgccggtcacaaattccgacggcgcgccggtgtccaccgttttagatgaaagctacaaagtcgccatcacgcgctttgacaacagaatccgcgtcggcggtatggcggaattgtcgggctacgaaatcaaactgcccgaaaaacgccgcgaaaccttggctttggtcgtcaacgacttgttcccggaaggcggcgatttgagccaagcatcgttctggagcggcctcaggccgatgacgcccgacagcacgccgttaatcggtcgcacccgctttgacaacctgtttctgaataccggccacggtactttaggctggaccatgtcgctgggttcggcaaaattaaccgccgatatcgtgagcggcaaagacaccgaaatccgcagcgacgatttgagcctgtcgcgttatcaggcttaa

SEQ ID NO: 37508 - DNA, 2220 bp, Neisseria meningitidis
gtgttccgtcgttggtttttgccgtgttgggttgtcggtgcggcggcttcgtttgcgctgccggtcgtgccgcattggctgttttggctggcggcttttgcggtttttgctgtgtttgcaaggcgttttgcgtttgccggtctgatgctgtgcgtgttggcgggcgcggcttacggcgtattcaggacggaggcggcattgtcttcccaatggtgggcagaagccgtttcaggcgtgcctttgacggtggaagtggcggatatgccgaggtcggacaggcggcgtgtgcagtttgcggcaaaggctgtggacagcggtggtcggacgtttgatttgctgctgtcggactacaaacggcgcgaatgggcggtcgggagcagatggcggataacggcacgtgtgcaccctgtcgtcggggagttgaacctgcgcggtttgaaccgtgaggcgtgggcattatccaacggaataggcggcgcggggacggtcggtgcggacagggttttgctgcatggcggaagcggttgggggattgcggtttggcgcagccgcatcagccgtaattggcagcaggcggatgcggacggcgggctttcagacggcatcgggctgatgcgcgcgttgagcgtgggcgaacagtcggcattgcgccccgaattgtggcaggcgttccggccgttggggctgacgcatttggtcagtatttcgggtttgcacgttacgatggtggcggtaatgtttgcgtggctggcgaagcggctgcttgcctgttccccgcgccttcctgcccggccgcgcgcgtgggttttggcggcggggtgtgcaggcgcgctgttttacgcgctgcttgccggtttttccgtgccgacgcagcgcagcgttttgatgttggcggcgtttgcgtgggcttggcgcaggggaagattgtcggcgtgggcgacgtggtggcaggcgttggcggcggtgctgctgttcgacccgtcggcggtcttgggtgtggggacttggctgtctttcggtttggtggcggccctgatatgggcgtgctcggggcgtttgcacgagggaaaacggcaaactgctttgcgcgggcagtgggcggcttcggtgttgtcgctggttttgctcggttatctgtttgcttcgctgcctttaatcagccctttggtcaatgcggtggcaattccgtggttttcttgggtattgacgccgctggcgttgctgggttcggtcgtgccgtttgcgcctttgcaacagttgggggcatttttggcggaatatactttgcggtttttggtgtggcttgccgatgtgtcgcccgagtttgccgttgcctccgcacctttgccgctgttggtgttggcggtgtgtgccgctttgctgttgctgctgccgcgcggcttgggtttgcgtccgtgggcggtgttgctgttggcagggtttgtgttttaccgttcacccggcgtgccggaaaatgaggttgcggttacggtttgggatgcggggcagggtttgtcggtgtcggttcagacggcaaatcatcatcttttgtttgacaccggaacggcagcggcggcgcagatggggattgtgccgagcttgaatgcgtcgggaatcaggtatttggattatttggttttgtcgcatcacgacagcgaccacgacggcggttttcaggcagtcggcaagataccgaacggcgggatttatgccgggcagccggaattttatgagggggcgcggcattgtgcggaacagcgttggcaatgggacggcgtggattttgagtttttgatgccgtctgaacgcaaaaacatcgatgataatgggaaaagttgtgttttgcgtgttgtggcgggcggtgcggcactgctggtaacgggcgatttggatacgaagggcgaggaaagcctggtcggcaagtatggaggcaacctgtacagccaggttttggttttgggacatcacggcagcaatacgtcctcgtcgggcgtgttcctcaatgccgtctcgcccgaatatgccgttgcttcaagcggttatgccaacgcctacaaacatccgaccgaagcggtgcagaaccgtgtccgcgcacacggcatcaaactgctgcgtaccgatttgtcgggcgcactgcaattcggcttgggacgcggcggcgtgaaggctcaacgtttgagagggtataaattctattggcagaaaaaaccgtttgaatga

SEQ ID NO: 37509 - DNA, 354 bp, Neisseria meningitidis
atgaagcagattatcatcctacaatccgccgtattgtccatatgcgccgcagttgcctttgccgtatggggttttgccggattcctttcggcggtcggtggcggtttgtcctacctgcttcccacgtttgttgcagttttacttttaaaacttttcaggggaaaccccttcctgcaaagcaggatgttcgtcttcggagagattttaaaagtagtgctgtcgctgttgtccatgctcgccgtatttgctgtatggcatcaatcgctggtgttcgccccgtttctgatggggctgctcggtgtcagccatttggtttttttagtattgttgagagtgaaagattatggcaggtga

SEQ ID NO: 37510 - DNA, 1164 bp, Neisseria meningitidis
atgcgaaaaaaacttaccgccctcgtattgtccgcactgccgcttgcggccgttgccaatgtcagcctatacggcgaaatcaaagccggcgtggaaggcaggaactaccagctgcaattgactgaagcacaagccgctaacggtggagcgagcggtcaggtaaaagttactaaggccaaaagccgcatcaggacgaaaatcagtgatttcggctcgtttatcggctttaaggggagtgaggatttgggcgaagggctgaaggctgtttggcagcttgagcaagacgtatccgttgccggcggcggcgcgacccagtggggcaacagggaatcctttatcggcttggcaggcgaattcggtacgctgcgcgccggtcgcgttgcgaatcagtttgacgatgccagccaagccattgatccttgggacagcaacaatgatgtggcttcgcaattgggtattttcaaacgccacgacgatatgccggtttccgtacgctacgactctccggacttttccggtttcagcggcagcgtccaattcgttccggctcaaaacagcaagtccgcctataagccggcttatgtggatgagaagaaaatggttcatgcggctgttgtcggcaagcccggatcggatgtgtattatgccggtctgaattacaaaaatggcggatttgccgggagctatgcctttaaatatgcgagacacgccaatgtcggacgtgatgcttttgagttgttcttgctcggcagcacgagtgatgaagccaaaggtaccgatcccttgaaaaaccatcaggtacaccgcctgacgggcggctatgaggaaggcggcttgaatctcgccttggcggctcagttggatttgtctgaaaatggcgacaaagccaaaaccaaaaacagtacgaccgaaattgccgcgactgcttcctaccgcttcggtaatgcagttccacgcatcagctatgcccatggttttgacttgatcgaacgcggtaaaaaaggcgaaaataccagctacgatcaaatcatcgccggcgttgattatgatttttccaaacgcacttccgccatcgtgtctggcgcttggctgaaacgcaataccggcatcggcaactacactcaaattaatgccgcctccgtcggtttgcgccacaaattctaa

SEQ ID NO: 37511 - DNA, 816 bp, Neisseria meningitidis
gtggcaaaaattattgtagtaacttcaggtaagggcggtgtcggtaaaacgactaccagtgccagtattgcgacaggtttggcattacgcggatataaaactgcggtaattgattttgatgtgggcttgcgtaacctcgacctcattatgggttgtgagcgtcgtgtcgtttatgacctgatcaatgtcattcagggggaggcgacgctcaaccaagctttgattaaagataaaaattgtgaaaacctgtttattttgccggcttcccagactcgggataaagacgctttgacacgcgagggcgtagaaaaagtgatgcaggagctgtccggcaagaaaatgggctttgagtatattatttgcgactctcctgccggtattgagcagggtgcattgatggcgttgtattttgctgatgaagccattgtaacgaccaatcctgaggtttccagtgtgcgtgactccgacaggattttgggaattttgcaaagcaaatcccataaggcagagcaaggcggttcggttaaagaacatctgttgattacgcgttattctcccgaacgagtggcaaaaggcgaaatgctgtctgtacaggatatttgcgatattctgcatattcctttgctgggtgtgattcctgaatcccaaaacgtcttgcaggcatccaattccggagaaccggtcatccatcaggacagcgtggcggcttccgaggcatataaggacgttattgcccgtcttttgggcgagaaccgtgaaatgcgtttcttggaagctgagaaaaaaagcttcttcaaacgtctgtttggaggataa

SEQ ID NO: 37512 - DNA, 789 bp, Neisseria meningitidis
atgctcaccctgtacagcgaaactttcccttcgcggctgctgctcggcacagccgcctacccgacccctgaaatcctcaaacaatccgtccgaaccgcccggcccgcgatgattaccgtctcgctgcgccgcgcgggatgcggcggcgaggcgcacggtcaggggttttggtcgctgcttcaagaaaccggcgttcccgtcctgccgaacacggcaggctgccaaagcgtgcaggaagcggtaacgacggcgcaaatggcgcgcgaagtgtttgaaaccgattggattaaactcgaactcatcggcgacgacgacaccttgcagccggatgtgttccaacttgtcgaagcggcggaaatcctgattaaagacggcttcaaagtgctgccttattgcaccgaagacctgattgcctgccgccgcctgctcgatgtgggctgtcaggcgttgatgccgtgggcggccccgatcggcacgggtttgggcgcggttcacgcctacgcgttgaacgtcctgcgcgaacgcctgccctacacgccgctgattatcgacgcgggcttgggtttgccctcacaggcggcacaagtgatggaatggggctttgacggcgtgcttttgaacaccgccgtttcccgcagcggcgatccagtcaatatggcacgcgccttcgcactcgccgtcgaatccggacggctggcatttgaagccggaccggtcgaagcacgcgacaaagcgcaagccagcacgccgacagtcggacagccgttttggcattcggcggaatattga

SEQ ID NO: 37513 - DNA, 624 bp, Neisseria meningitidis
atgaaaatcatacacaaaggtttggtcgaatatctgccgacttttgaagcgatgaaaacctttaatgccggacggaatgccgacaccgaagacgaactgtgggtcgtcgaacacccgcccgtgttcacacaaggactggcgggaaaacccgaacacctgctgattcgcgacgacattcccgtcgtccaaatcgaccggggcgggcagattacctatcacgggcccgggcaattggtcgtttatacgatgattgatttcaaacggcgcaaaaccagtgttagaaacatcgtttccgcgcttgaaaacagcatcatcgccacattggcagaatacggcatcgaagcggcggcagaccccaaacgccccggcgtttatgtcggagaacgcaaaatcgcctcactggggctgcgtatcaaaaacggctccgtctatcacgggcttgcgctcaacgtcaatatggatttaagcccgtttacccacatcaacccctgcggctacgccggtatggaaatgacgcaaatcgcggattttgtccaaccctgccccacgccggacgaagtcgccgccaaactcaccgcacaccttgaaacacaattcacaccgaaagcagacaacaatgagtga

SEQ ID NO: 37514 - DNA, 468 bp, Neisseria meningitidis
atgactgaactgcaacaccccgtcctcgtcgtcgatgacgaaaccgacattctcgacctgatggaaatgaccctgatgaaaatgggcttgcgcgtccataccgcgtcaggcgttgccgaagccaaaaacaagctcgacagccaacgctattcgctcgtcctgaccgatatgcgtatgccggacagctcggggctggaagtcgtccaacacatcaacagccgcctgctcgatacgccggttgccgtcatcaccgccttcggcaacgccgatcaggcacaggaagcgttgcgttgcggcgcgttcgaccccgataccatgcagatacaggactatctcgaccaaatcgaacgcgacatcatcgaacaaaccctcaaacaaaccgaaggcaaccgcacgcaggccgccaaacgcttgggcatcagcttccgttccatgcgctaccgtatggaacgcctcaacatcggctga

SEQ ID NO: 37515 - DNA, 195 bp, Neisseria meningitidis
gtgggcatcaatgccaaccctaattgtgctgatgaagcaggaaaactgatatgggaaaacgaccccaataaaaattggtgggctaaccgtatggatgatattcgcggcatcatccaaggtgcggttaatcctttaatttacaaggtaagcaagcaaaagattatttacaacaacaaactcatatcaggaacttag

SEQ ID NO: 37516 - DNA, 1527 bp, Neisseria meningitidis
ttggcgtatatttatgacggcttgtgcaacctgcgtttcgacgataccaatcctgaaaaagaaaacgacgaatacgtcaacgccatcaaagaagacgttgagtggttgggtttccattgggcaggcgagccgcgtttcgcttccaactatttcgaccagctttatgactacgccgtcggtttgattaaagacggcaaagcgtatgtcgatgatttgacgcccgaagaaatgcgcgaataccgcggtacgctgaccgaagcgggtaaaaacagcccttaccgcgaccgcagcgtcgaagaaaacctcgacctgttcacacgcatgaaaaacggcgagttccccgacggcagcaaaaccctgcgcctgaaaatcgacatggcatcgggcaacatcaatatgcgcgaccccgtcatctaccgcatccgccgcgcccatcaccacaacaccggcgacaaatggtgtatctacccgatgtacgactacacgcattgcatctccgatgccatcgaaggcatcacgcattccttgtgtacgctcgaatttgaagcacaccgtccgctgtacgactgggtgttggataacatccacgcgccgcatgccacccgtccgcgccaatacgagttttcccgtttggagcttttgtacaccattacctccaaacggaaattgaatcagttggttgtggaaaaacacgtttccggctgggacgatccgcgtatgccgactatttccggtatgcgccgacgcggctacacgcccgaaggcctgcgtctgtttgccaaacgcgccggtatttccaaatctgaaaacatcgtcgatatgagcgtgttggaaggcgcgattcgcgaagagttggaaaattccgccccacgcctgatggcggtgttgaacccgctcaaagtgaccctgaccaactttgaagccggcagaacccaaagccgccgtgccgcgttccatccgaaccacgaggaaatgggcgagcgcgaagtacctatttcacaaaccatctatattgaagccgacgactttgccgaaaatccgcccaaaggcttcaaacgcctgattcccggcggcgaagtacgcttgcgccacggctatgtcatcaagtgcgatgaagtcgtcaaagacgaagcaggcaatgtggttgaactcaaatgcagcatcgaccacgacaccttgggcaaaaatccagaaggccgtaaagttaaaggcgtgattcattgggtttccgccgaacacgccgccgaaatcaaagtccgtctgtacgaccgcctctttaccatcgagcgtcccgatgccgtgcgcggcgaagacggcgaatacctgccgttcaccgatttcctcaatccggaatccgtcaaggaaatcaccgcctacgccgaacctgccgccaaagatttgccggcagaaagccgttggcagttcgagcgtatcggctacttcgtaaccgaccgtaaagaccacggcaaagacacgccggtgtttaaccgcacggtcacgctgaaagattcttggcagcctaagtaa

SEQ ID NO: 37517 - DNA, 963 bp, Neisseria meningitidis
atgcccagtatctctgtccgtcgactgtttgacgacaaccaatacaagttacaacttgcctgggccgccggcaattcgggtgcggacaaccgtatcggcgtagaggcggacaagcccgtcctcgctttggtcggacacctgaatttcatccaccccaaccaaatccaagtggtcggtttggcggaatcggaatatctgaaccgtctcgaatcgggggaaacgggttatcagttcggcgacctgttcgacatttctatgtctttggttattgtggcaaacggcttgccggtttccccggggctgcgcgactattgccataaaaacgatattccactgctgacttccaaactcgaaagcccctatctgatggacgtgttgcggatttacctgcaacgcaccctggcggcatcgtccgtcaaacacggcgtatttctcgatgtgtttgaaatcggcgtgctgattaccggacattccggcttgggcaagagcgaattggcgttggaactgatttcgcgcggccacagcctgattgccgacgatgcggtcgagctgttccgcatcggtccagaaacattggaagggcgttgttcgcctatgctgcgtgattttttggaagtgcgcggcttggggatactcaatatccgccatattttcggcgaaacttccatccgccccaaaaaaatcctgcaactcattatcaatttggtcgaggcagacgacgagtatatgaagcagctcgaccggttgagtatccgcaccgaaaccgaatccatcctcaacgtcaacgtccgttcggttacgctgcccgtcgccgtcggacgcaacctcgccgttttggttgaggcggcggtacgcaattacattttgcagttgcgcggtaaggacagtacgcgcgaatttttggaacgccatcagacgcaacttaaagaaaacgaacagaatcatgaaaatcgtcctgattag

SEQ ID NO: 37518 - DNA, 402 bp, Neisseria meningitidis
atgagaaaattgaataatcacgatgttcataaacggtatcaagatcgtttagaagaggatgtagagttcactatcaactatgagcttcctttgagttgtttgtggtcaaccatcaaagacttttccagcgattttgaggaaaaaactgaagcgttctttattcttttcaaagagctgctgcgcagaggtcatctgaaactgcaacgcgacgggcaaattatcgggcatacgcccgaagaatgggaacaaatatttagggaagtatggtctgaatatgaaatcgaacccaatccacttcccggctatgccccgtttgatattggaatgtggcttacggtcgaggctcctgcctacgccgtatggatagatcccgaagacggtagcgaatactgggcgggataa

SEQ ID NO: 37519 - DNA, 654 bp, Neisseria meningitidis
atgaagataacgcactgcaaattaaagaaaaaagtacagaaagaactgctccgtttttttgtactcgaagttaccgcccgttctgccgccgatattttgggtatccatcccaattcggcagcactgttctaccgtaaaatccgcacggttatcaaccatcatttggccttggctgccgatgaggtttttgagggctctgtcgagccggacgaaagcgatttcggcggacggcgtaaaggcagacgtggtcgcggtgcggcaggaaaagtggttgttttcggcattctgaaacgcaacagacggatctataccgttgtggtggataatgccaagtctgaaacgttactccctgtcatcaaaaagaaaatcatgccggacagtattgtttataccgatagtctgagcagctatgacaagctggacgtaagcggttttatccatcaccgcatcaaccattctaaggagtttgcagaccgccagaaccacattaacggcattgagaacttttggaatcaggcaaaacgcgtcttgcgaaaatacaacggaatcgattgcaaatctttcccgctgttcttgaaagaatgcgaatttcgatttaacttcggcacaccgtcccggcagctaaaaatcctacaggattggtgtgggatttag

SEQ ID NO: 37520 - DNA, 1311 bp, Neisseria meningitidis
gtgctgactttagatgcgtttgagcaatgcttgaaggattgtttccctcaaggtctgaatggaaaaaaaacagcagtggcattaagcggcggcttggattccgtggtcttgctgcacctgcttgtccgcgctgggaaacgggcaggatttgtgccggaggcattgcatatccatcacggcttgagcccccgtgccgacgattgggcggatttctgccaaaattattgcgatatgctcggggtggggctggaaacggttaaggtctgcgtggaaaaaaacggtttgggcatcgaggcggcggcgcggcaaaagcgttatgccgcgtttgccgaaaaaggctttgacgttttggcgttggcgcaccacagggacgatcaaatcgaaacctttatgctggcagtcgctcgcggcggcggtttgcgcgctttggcggctatgcccaccgtccgcccttttggggaaaaaggcatcatctggcggcctttgctgcctttttcgcgccaagatatatgggattatgcccaaaaacacggtttgccgaatatcgaggatgaaagcaatagcgatacggcttatttgcgaaaccgcttccggcaccgtattttgcccgaactttcggcgcagattccccatttcgggcggcatgtgctgaacaatgtccgcgctttgcaggaagatttggctttgttggacgaaatcatcggtcaggactgccgttgggtttgcggagccggttatttcgatacggcgcggtggctgacgttttccccgcgccggaaaacccatattttgcggcattttttgaaggaaaacggcattcccgtgccgaatcagaatgcccttgccgacattgcccgggttttgacggaggcaaaaaccggacgttggaacgtgcaaggctttgaattgcatcattatgcaggcaggctgtttgtgttccgaccggaaaaaacggataaactgcggtttttgaaagacaggcagataagcggaaatttaagggaaatattggcggggcagggatttgttttaaaacgtcatccgttcggacttcccgggcatcttttggagcaggacggaatcttgcggacggttgcggcatcggacaggctggctgtcggcggtatccataaggatgtgaagaaaatccttcaggaaaagcgggttttgcccgcgctgcgcccgttttggccggtcgtcgccgacaaggacaaccgtccgctggcgttggcaaattacggtacggattttcaaatctcggtttcagacggcattttgcccgtccatccggattttcccgttttattttga

SEQ ID NO: 37521 - DNA, 1953 bp, Neisseria meningitidis
atgcgctttgcggtcgctttgctcagtctgctgggtattgcatcggttatcggtacggtgttgcagcaaaaccagccgcagacggattatttggtcaaattcggacctttttgggcgcagatttttggttttctgggactgtatgacgtctatgcttcggcatggtttgtcgttatcatgatgtttttggtggtttctaccagtttgtgcctgattcgcaatgtgccgccgttctggcgcgaaatgaagtcttttcgggaaaaggttaaagaaaaatctctggcggcgatgcgccattcttcgctgttggatgtaaaaattgcgcccgaggttgccaaacgttatctggaagtacaaggttttcagggaaaaaccattaaccgtgaagacgggtcggttctgattgccgccaaaaaaggcacaatgaacaaatggggctatatctttgcccatgttgctttgattgtcatttgcctgggcgggttgatagacagtaacctgctgttgaaactgggtatgctgaccggtcggattgttccggacaatcaggcggtttatgccaaggatttcaagcccgaaagtattttgagtgcgtccaatctctcatttaggggcaacgtcaatatttccgaggggcagagtgcggatgtggttttcctgaatgccgacaacgggatattggttcaggacttgccttttgaagtcaaactgaaaaaattccatatcgatttttacaatacgggtatgccgcgtgatttcgccagcgatattgaagtgacggacaaggcaaccggtgagaaactcgagcgcaccatccgcgtgaaccatcctttgaccttgcacggcatcacgatttatcaggcgagttttgccgacggcggttcggatttgacattcaaggcgtggaatttgggtgatgcttcgcgcgagcctgtcgtgttgaaggcaacatccatacaccagtttccgttggaaattggcaaacacaaatatcgtcttgagttcgatcagttcacttctatgaatgtggaggacatgagcgagggcgcggaacgggaaaaaagcctgaaatccacgctgaacgatgtccgcgccgttactcaggaaggtaaaaaatacaccaatatcggcccttccattgtttaccgtatccgtgatgcggcagggcaggcggtcgaatataaaaactatatgctgccggttttgcaggaacaggattatttttggattaccggcacgcgcagcggcttgcagcagcaataccgctggctgcgtatccccttggacaagcagttgaaagcggacacctttatggcattgcgtgagtttttgaaagatggggaagggcgcaaacgtctggttgccgacgcaaccaaagacgcacctgccgaaatccgcgaacaattcatgctggctgcggaaaacacgctgaacatctttgcacaaaaaggctatttgggattggacgaatttattacgtccaatatcccgaaagagcagcaggataagatgcagggttatttctacgaaatgctttacggcgtgatgaacgctgctttggatgaaaccatacgccggtacggcttgcccgaatggcagcaggatgaagcgcggaaccgtttcctgctgcacagtatggatgcgtacacgggtttgaccgaatatcccgcgcctatgctgctgcaacttgatgggttttccgaggtgcgttcgtcgggtttgcagatgacccgttccccgggtgcgcttttggtctatctcggctcggtgctgttggtattgggtacggtattgatgttttatgtgcgcgaaaaacgggcgtgggtattgttttcagacggcaaaatccgttttgccatgtcttcggcccgcagcgaacgggatttgcagaaggaatttccaaaacacgtcgagagtctgcaacggctcggcaaggacttgaatcatgactga

SEQ ID NO: 37522 - DNA, 588 bp, Neisseria meningitidis
atgccgtctgaaaaggctttcatacagcatttgcgtaccgcgtcatttcaagggctgcatcttcatcacttccatcaaaaagttggtaaatgcggggttgttgggtttgacatccatatttttccaacgctgctgccagccgcgcaaggcattctggatatacagcttggactgttccgtattgattgcgccccgctggctgtctatcgccgaacgcaggtagatttcatacatactgtcatcgacggcattgcgtccgaccaggcgttttctgaagttgttcagatattgcgccgcctgaaccttggtcattttaccgatacccacctgatagcccaagcgcgtcgcttcatcgctgattttggcaacatccgtccaatgcgaagaggcaaggcggaaaccttttgcaggtgcttccgttttgacggtattgataggattcacggggatttccgtcaatgtgggcacataaatagactggcagccggaaagaactgccgcaatggaaagagggataaggtattttttcatgcccccattataatcaagtttgccttgagaaaacaaattgttcggcaagaaaaataa

SEQ ID NO: 37523 - DNA, 2628 bp, Neisseria meningitidis
atgcccgccggccgactgccccgccgatgcccgatgatgacgaaatttacagactgtacgcggtcaaaccgtattcagccgccaacccacaggggatacatcttgaaaaacaacagacaaatcaaactgattgccgcctccgtcgcagttgccgcatcctttcaggcacatgctggactgggcggactgaatatccagtccaaccttgacgaacccttttccggcagcattaccgtaaccggcgaagaagccaaagccctgctaggcggcggcagcgttaccgtttccgaaaaaggcctgaccgccaaagtccacaagttgggcgacaaagccgtcattgccgtttcttccgaacaggcagtccgcgatcccgtcctggtgttccgcatcggcgcaggcgcacaggtacgcgaatacaccgccatcctcgatcctgtcggctactcgcccaaaaccaaatctgcactttcagacggcaagacacaccgcaaaaccgctccgacagcagagtcccaagaaaatcaaaacgccaaagccctccgcaaaaccgataaaaaagacagcgcgaacgcagccgtcaaaccggcatacaacggcaaaacccataccgtccgcaaaggcgaaacggtcaaacagattgccgccgccatccgcccgaaacacctgacgctcgaacaggttgccgatgcgctgctgaaggcaaacccaaatgtttccgcacacggcagactgcgtgcgggcagcgtgcttcacattccgaatctgaacaggatcaaagcggaacaacccaaaccgcaaacggcgaaacccaaagccgaaaccgcatccatgccgtccgaaccgtccaaacaggcaacggtagagaaaccggttgaaaaacctgaagcaaaagttgccgcgcccgaagcaaaagcggaaaaaccggccgttcgacccgaacctgtacccgctgcaaatactgccgcatcggaaaccgctgccgaatccgccccccaagaagccgccgcttctgccatcgacacgccgaccgacgaaaccggtaacgccgtttccgaacctgtcgaacaggtttctgccgaagaagaaaccgaaagcggactgtttgacggtctgttcggcggttcgtacaccttgctgcttgccggcggaggcgcggcattaatcgccctgctgctgcttttgcgccttgcccaatccaaacgcgcgcgccgtaccgaagaatccgtccctgaggaagagcctgaccttgacgacgcggcagacgacggcatagaaatcacctttgccgaagtcgaaactccggcaacgcccgaacccgctccgaaaaacgatgtaaacgacacacttgccttagatggggaatctgaagaagagttatcggcaaaacaaacgttcgatgtcgaaaccgatacgccttccaaccgcatcgacttggatttcgacagcctggcagccgcgcaaaacggcattttatccggcgcacttacgcaggatgaagaaacccaaaaacgcgcggatgccgattggaacgccatcgaatccacagacagcgtgtacgagcccgagaccttcaacccgtacaaccctgtcgaaatcgtcatcgacacgcccgaaccggaatctgtcgcccaaactgccgaaaacaaaccggaaaccgtcgataccgatttctccgacaacctgccctcaaacaaccatatcggcacagaagaaacagcttccgcaaaacctgcctcaccctccggactggcaggcttcctgaaggcttcctcgcccgaaaccatcttggaaaaaacagttgccgaagtccaaacaccggaagagttgcacgatttcctgaaagtgtacgaaaccgatgccgtcgcggaaactgcgcctgaaacgcccgatttcaacgccgccgcagacgatttgtccgcattgcttcaacctgccgaagcaccgtccgttgaggaaaatataacggaaaccgttgccgaaacacccgacttcaacgccaccgcagacgatttgtccgcattacttcaaccttctaaagtacctgccgttgaggaaaatgcagcggaaaccgttgccgatgatttgtccgcactgttgcaacctgctgaagcaccggccgttgaggaaaatgtaacggaaaccgttgccgaaacacccgatttcaacgccaccgcagacgatttgtccgcattacttcaaccttctgaagcacctgccgttgaggaaaatgcagcggaaaccgttgccgatgatttgtccgcactgttgcaacctgctgaagcaccggccgttgaggaaaatgcagcggaaatcactttggaaacgcctgattccaacacctctgaggcagacgctttgcccgacttcctgaaagacggcgaggaggaaacggtagattggagcatctacctctcggaagaaaatatcccaaataatgcagataccagtttcccttcggaatctgtaggttctgacgcgccttccgaagcgaaatacgaccttgccgaaatgtatctcgaaatcggcgaccgcgatgccgctgccgagacagtgcagaaattgctggaagaagcggaaggcgacgtactcaaacgtgcccaagcattggcgcaggaattgggtatttga

SEQ ID NO: 37524 - DNA, 912 bp, Neisseria meningitidis
atgatgcgcgaagtgctgttgtccgcctatcaggacaggcgcagggagcggatgtggaaaaacatctggcgcgccgtcagcaccctgattctggttgccctgattgcaggcattttccaaaaagacgaagccgcattgcagttggcgggcaacacgccgcataccgcagtcgtcaacctgtacggcgaaatcggcaacggtgtagaagaccaggtcaaaaaactcaaagacggtatggaggccgcctacaaaaacccgcaggcaaaagccatcgtcatccgcgccaacagccccggcggttcgcccgtcgtctccaacaccgcttttgaagaaatacgccgtctgaaagcgcaacatcccgacattcccgtttatctcgtggcggaggatatgtgtgcatccggctgctactatattgcggcggcggcagacaaaatttatgcggactcgtccagcatcgtcggcagcatcggcgttatcggcagcagttttgatgctactgaattaatggaaaaaatcggcgtgaaacgcagggttaaaattgcaggcagcaacaaaggcatgggcgatccgttttcgcccgaaacgcccgaacagtcgaaaatctgggaagaaatgctgaccggcatacacggcgagttcatcaaagccgtcaaaaccggacgcggcggccgcctcaaattccgacaatatcccgacgtgttcagcggtcgcgtgtacacaggcgcggatgcgctgaaagtcgggctggtggacggactcggcaatatttacagcgtggcgcgagacgtggtcaaagcccccgatgtggtggattacactccgaaggacgatttcggcagaatcttgggcagacgcttcggcgcagaactcaaagcaagcgtgcgcgaagccctgcaggccgtccggtag

SEQ ID NO: 37525 - DNA, 2277 bp, Neisseria meningitidis
atgacaacattacatttttcaggcttcccgcgtgtcggtgccttccgcgaattgaaatttgcccaagaaaaatactggcgcaaagaaatcagcgagcaagaattgctggctgttgccaaagacttgcgcgagaaaaactggaaacaccaagccgctgccaacgccgattacgttgccgtaggcgatttcactttctacgatcacatcctcgacctgcaagtcgctaccggcgcgattcccgcccgcttcggcttcgacagccaaaacctgtctttggaacaattcttccaactggcgcgcggcaacaaagaccaattcgctatcgaaatgaccaaatggttcgacaccaactatcactacttggtgcctgaattccacgccgataccgaattcaaagccaacgccaaacactacgttcaacaactgcaagaagcccaagctttgggcttgaaagccaaaccgaccgttgttggtccgctgactttcctgtgggtaggtaaagaaaaaggtgcggttgaattcgaccgtctgagcctgttgcctaaactgttgcctgtttacgttgaaatcctgactgcgttggttgaagccggtgccgagtggattcaaatcgacgagcctgctttgactgtcgatctgcctaaagaatgggtagaagcatacaaagacgtttacgctactttgagcaaagtaagtgccaaaatcctgttgggcacttacttcggttctgttgccgaacacgccgcattgctgaaagccctgcccgttgacggcctgcacatcgacttggtacgcgctcccgagcaaccggacgcgttcgccgactacgacaaagtcctgtctgtcggcgtgattgacggccgcaacatttggcgcgccaacctgaacaaagttttggaaactgttgagcctctgcaagccaaactgggcgagcgtttgtggatttccagctcttgctcgctgttgcacactccgtttgacttgtcagttgaagaaaaactgaaagccaacaaacccgacctgtactcttggttggcatttaccctgcaaaaaacccaagaattgcgcgttctgaaagccgcattgaacgaaggtcgtgattctgttgccgaagaactcgccgccagccaagctgccgctgattcacgcgccaacagcagcgaaatccaccgcgcggacgttgccaaacgcctggccgatttgcctgccaacgcagaccaacgcaaatcaccgtttgtcaaccgtatcaaagcgcaacaagcatggttgaacctgcctctgctgccgacgaccaacatcggttctttcccgcaaactaccgaaattcgtcaagcacgcgccgccttcaaaaaaggcgaactgtctgccgccgattacgaagccgcgatgaaaaaagaaatcgccttggtggttgaagagcaagaaaaactggacttggacgtactggtacacggcgaagccgagcgtaacgacatggtcgaatacttcggcgaactgttgagcggttttgcattcacccaatacggctgggtacaaagctacggctcacgctgcgtgaaaccaccgattatcttcggtgacgtaagccgtcctgaagccatgactgtcgcttggtctacttacgctcaaagcctgaccaaacgcccgatgaaaggtatgttgaccggccctgtaaccattctgcaatggtctttcgtccgcaacgatattccccgcgctaccgtgtgcaaacaaatcgcactggctctgaacgacgaagtattggatctggaaaaagcaggcatcaaagtcatccaaatcgacgaacctgccatccgcgaaggcctgcctttgaaacgtgccgattgggatgcctacctgaactgggccggcgaatctttccgcctgtcctctgccggttgtgaagacagcactcagatccacacccatatgtgctactccgagttcaacgacatcctgccggccatcgcagctatggatgccgacgtgattactatcgaaacttcacgttccgatatggaactcctgaccgcgttcggcaagttcaaatacccgaacgacatcggcccgggcgtttacgacatccacagcccgcgcgtaccgactgaagccgaagtggaacacctgttgcgtaaagccatcgaagtcgtaccggttgagcgtctgtgggtgaatcctgactgcggcctgaaaacacgcggctggaaagaaactctggaacaactccaagtgatgatgaacgtaacccgcaaactgcgtgccgaactggcgaaataa

SEQ ID NO: 37526 - DNA, 324 bp, Neisseria meningitidis
atgaacgcatttgcacaagcactttcctcggcactcgaccgctgcatcgccaccaacaccgtcgccaaacaaaaccagcccgtcggcttcctctaccgcgaagcccccgtttttgaaaacgacagcggctggcgtttcttcagcggcgacgagaccgacgaatacaccgacgacccggacaacttcagcatcgtcagcctcgccgatatcaccaaaaccaaccctgaaaccgccgcactgctctcccaacctgaaggcagcgcgtgggaattggcagaagacggcacattccaaaccgtcgccgactggcaacctaaggactga

SEQ ID NO: 37527 - DNA, 924 bp, Neisseria meningitidis
atgctgcaaagaactttggcgaaatccatcagcgttaccggagtcgggctgcattcgggcgaacgcgtcgcgctgaccctgcaccccgcgcctgaaaacagcgggatttccttccgccgtaccgatttggacggcgagatgggcgaacaaatcaaactgaccccttatttgatcaacgatacccgcctttcctccaccatcgttaccgacaaaggcgtgcgcgtcggcacaatcgaacacattatgtccgcgctgtccgcctacggcatcgacaatgcgctgattgagctgaacgcgcccgaaatcccgattatggacggctccagcctgccgtttatttaccttttgcaagatgcgggcgtggtcgatcaaaaggcgcaaaagcgttttttgaaaatcctcaagcctgtcgaaatcaaagaagcgggcaaatgggtgcgctttacgccgtatgacggctttaaggtaacgctgaccatcgaattcgaccatccggttttcaaccgcagctcgcccacttttgaaattgatttcgccggcaaatcctacatcgacgaaatcgcgcgcgcgcgcactttcggctttatgcacgaagtggaaatgatgcgcgcccacaatctgggtttgggcggcaatttgaacaacgccatcgtgattgacgacacggatgtcctgaatcctgaaggcttgcgctatcccgatgagtttgtgcgccacaaaatccttgatgccatcggtgatttgtatatcgtcggacatccgattgtcggcgcgtttgaaggctacaaatcgggacacgccatcaacaacgcactcttgcgcgcggttttggcagacgaaacggcttacgaccgggtggaatttgccgacagcgatgatttgcccgacgcatttcacgagctgaacatcagaacttgtggataa

SEQ ID NO: 37528 - DNA, 639 bp, Neisseria meningitidis
atgcaaaccgccattatcgattacggtatgggcaacctgcattccgtattgaaatccgtccggacggcggggcagcttgccggaaaaaataccgaaatctttttaagcggcgaccccgaccgcgtgtcccgcgccgacaaagtcatttttcccggtcagggtgcgatgcccgactgtatggcggcattaaaacgagacggtttggacgaggcagtcaaagatgccttaaaaaacaaaccgtttttcggaatctgcgtcggcgcgcaacttttattcgaccacagcgaagaaggaaacaccgacggcttgggctggttcggcggcaaagtcagacgctttgagcgcgacctccgcgacccgcagggatgccgtctgaaagtcccgcatatgggctggaacaccgtgcgccaaacccaaaaccacccgctgtttaaagatattccccaagacacgcgtttttacttcgtccacagctactatttcgcccccgaaaatcccgaaaccatattgggcgaaagcgactacccgtccccgtttgcctgcatcgtcggcaaagacaacgtattcgccacgcaatttcacaccgaaaaaagccacgatgccgggctgacgatgttgaaaaactttttaaactggtaa

SEQ ID NO: 37529 - DNA, 369 bp, Neisseria meningitidis
atgaaaccgttgaaacgacatcccgcccttatcgggctttcgcgtgaccaccaccattcgctttccctgtgcgtgcgtctgttgcggacgccggaagaacggcatcgggacgaactcgaaccgcatttttccgaattggaaacccattttcgcgaagaagaagccaagtttgccccaatttggcagaatgtcgcccccgaattgaaacaacgtttcgagaaagaccacgcccgactgcggcagatgatggcaagccccgaatacggtaacgcggcgtggaataccgcttttgccacaaccctgcgcgatcacgcgcgctttgaagaacgcgagctgtttcccgccgttgaaccgtttttgccggcatga

SEQ ID NO: 37530 - DNA, 813 bp, Neisseria meningitidis
atgtcggttgggcattatgagaattttcccgtcggttcgctgattttgccgcgcaggttgaggaagccggttcacgcggtgtacgcgtttgcacggacggcggacgatatggcggacgagggcagtatgccgtctgaagccaggttggcggggttggagggtttgcagcgcgagttggacgtgttggcatcgggcggccggtcggcgcatcctttgattgcacgattggatgccgaggcggttgtgccgttcggtttggatttgcagccgttttatgatttgctttctgcattttctcaggatgtggttaaaacaaggtatggaaatttcggcgagctggccgattattgtcggcgttccgccaaccctgtcggacgcattatgctggctttgtacgggaaaacggatgcggtgtgcgtggcgcaaagcgacggtatctgtacggctttgcaactggtgaatttttggcaggatgtggctgtggattggcaaaagggcagggtttatatcccgcaggacgatttgttgaaattcggtgtttccgaaggacagattgcggagggtagggcggatgcggcgtttcagcggctgatggcgtatgagtgccggcgcgcattccgtatgctgaaggcgggttcgcctttggcgcgcgaattgaaagggcgtatcggtttggaactccgtatgattgtgttgggggcgcagttgattttgcagaaactggacgcgtgccgatacgatgtgtttgcacaacgccccgttttggataagaaggattggttgattatgctgaaaaaggcgttgtggaaatga

SEQ ID NO: 37531 - DNA, 792 bp, Neisseria meningitidis
atggcaagacatccctaccgccgcctgcgtcctgcaaaatccagctttcccgaagtcggcatttccgaagaaggcaatatccgttcgcttcacttgggcagcgacaccatccaaagctcaatgaacctcgaccacccgtccgagctggtactctcttacagccgtgccatgatgggatggctgctgtttaccgacgctcttccgcagcatatcacccaaatcggcttgggcggcggttcgtttgcacgctggatagacacctacctgcccgacacgcgccaaaccgccgtggacatcaacccgcaggttatcgccattgcccgcaacctgtttgagttgcctttcgagggcgagaaatttgaaattattgaagcagacggtgcggaatatatcaaagtcttccgccacaacaccgatgtgattttggtggacgggttcgacggcgaacaaatcatcgatgcgctggttgaagaaccgtttttccgagactgccgaaacgcactctcttcagacggcatattcgtaaccaactggtggagcggcgacaaacgctaccaacgcttcatcgaacggttgttgagcgtttttgaagggcgcgtcttggaacttcctgccgaaagccacggcaatgtcgcggtaatggccttccaaagcagccccaaagagcaaaacatagacaaactcaaaaaacgtgccgacaaactgagcaacgcatacggattggacttccaccgtatgcttgccggcctgaaagcgtccaaccccaacaacggcaagcatttccacctttaa

SEQ ID NO: 37532 - DNA, 1026 bp, Neisseria meningitidis
atgtatccacttgcccgccgcatcctgtttgcactcgatgccgagaaagcccaccacttcacgctcgacgcgctcaacatggtttataaattgggtctgattcccgtaaccggcaaccgtaccaaacctgtaaaactgatgggtttggatttgcccaaccctgtcgggcttgccgccggactcgataaaaacggcgaatatatagacgcattgggcgcgctcggcttcggtttcatcgaaatcggcacggtaacgcccaacccgcagcccggcaacccgcagccgcgcctcttccgcgttcccgaatatcaaggcatcatcaaccgcatgggcttcaacaaccacggcatcgatgccatgattcaaaacatcgaaaaaagtaaattcagcggcgtattgggcatcaacatcggcaaaaacgctgtaacaccgattgaaaacgctgccgatgattatttaatctgcctcgaaaaagcctacgcacacgcaagttacattaccgtcaatatttcctcgcccaacactaaaaacctccgcgcgctgcaaggtggcgacgagttgagcgcattgcttgaggctttgaaaaacaaacaggcacagcttgcctctgtacacgggaaatacgtcccgctcgccgtcaaaatcgcccccgatttggatgaagcacaaatcgaagacatcgcccacgttgtcaaatccgtcgaaatggacggcatcatcgctaccaataccaccatcgacaaatcaagtctcggcagccatccgctcgcaggcgagcagggcggtttgagcgggctgcccgttcatgaaaaaagtaatcgggtgttgaagctgttggcagaccacatcgacggcaagctgccgattatcggcgtaggcggcattatggaaggcagggacgcggcagagaaaatccgcttgggcgcgaccgccgtccaagtgtacagcggattgatatacaaaggtccggcattggtcaaagaatgtttgaaggctttggcgcgatccgcccaaaatgccgtctga

SEQ ID NO: 37533 - DNA, 552 bp, Neisseria meningitidis
atggaattcctatctcttcacccttggtggtctttttttattatattaactattatccttagctatattggattctgtgcacatttccacattcaaaatggggcagttttcttttatagctatcgggatgtaactattgttttcttgacacctgtcatcctcatcgccctaagttatttaattaaaaataaagaaatcctatcagcttgtatcttatgtataactcttattgcattttcatgggcatggattataatctatcgacctaatactaaaaggttttttctttccctattgatagtatggggaaaattgttattaagtactattgtttgggcaattctcgccatatcacttggcttagctgtaataacagggaacagcaagcgtaaaaaatatgaacgacgtgaccgtcatgctgaacgtaatgaaaaagcttttataggtgcgctattagtaggtttcgaattatcaagaaatttattgaatttatgttgcctacacaaggatttttccaccccatctaaaaacattgaagtcaatcgctcttaa

SEQ ID NO: 37534 - DNA, 924 bp, Neisseria meningitidis
atgccgtccgaacacccgttttcagacggcatttccacactcaaccccaaagaaaccatgaacgacaccgcccaaattaccgccagctacggccgccgctacatcgtgcgcacgcccgacggcacaacctacgaagccagcacgcgcaaaaaacgcgtcgatttcgcctgcggcgaccgtgtccgcatcagccccgtcaacgccgaacaagttgtgattgaagattttttaccgcgccaaagcctgctctaccgccaagacgcgtggaaaaccaaactcattgccgccaacgttacccaactcctcatcgtaaccgccgccgtcccgagtccgagcgtgcggctgctacagcgcgccctgcttgccgccgaagccgccggcatccgcgccgtcatcgtcctgaacaaagccgacctgcccgaaaccgccctttggcgcgaaaaactcaaattctacgaaacgctgggttatcccgtcatcgaaacccgcgcactggaaaacgccggcagcctgcgccccgccctgcaagggcacagcaacatcctgctcgggcagagcggtatgggcaaatccaccctgaccaacgcccttttgggcagccaaaccgcccgcaccggcgacatttccgccgcactcgactcgggaaaacacaccaccacccacgcccggctttatgatttgaacggcgaaacccaactcatcgactccccgggtttgcaagaatttggtttacaccacctccaagccgccgatttgccgcgctatttccccgatttccgccaccttgtcgggcaatgccgcttccacaactgcacccaccgcgccgaacccggctgcgccttcaaagccgccgccgaaaccagggcggcaagccccgaacgcctcgcctttttgcagggcatcaccgacgaactgcccgggtaa

SEQ ID NO: 37535 - DNA, 642 bp, Neisseria meningitidis
atgaagataacgcactgcaaattaaagaaaaaagtacagaaagaactgctccgtttttttgtgctggaagttaccgcccgttctgccgccgatattttgggtatccatcccaattcggcagcactgttctaccgtaaaatccgcacggttatcaaccatcatttggccttggctgccgatgaggtttttgagggccctgtcgagccggacgaaagcgatttcggcggacggcgtaaaggcagacgtggtcgcggtgcggcaggaaaagtggttgtcttcggcattctgaaacgcaacggacgggtctataccgttgtggtggataatgccaagtctgaaacgttactccctgtcatcaagaagaaaatcatgccggacagcattgtttataccgatagtctgagcagctacgacaagttggacgtgagcgatttcattcattaccgcatcaaccattccaaggaatttgcagaccgtcagaaccacattaacggcattgagaacttttggaatcaggcaaaacgcgtcttgcgaaaatacaacggaatcgatcgtaaatctttcccgctgttcttgaaagaatgcgaatttcgatttaacttcggcacaccgtctcaacagcttaaaatcctgcgggattag

SEQ ID NO: 37536 - DNA, 234 bp, Neisseria meningitidis
atgtgcgcgaatttagccattttagcttcgctgaaacttcgttttcgtatcaatcacagcacacattttgctgaacgacaaaaccatattaatggaattgagaacttttggaaccaggcaaaacgtcatttacgcaagtttaacggcattcccaaagcgcattttgagctgtatttaaaggagtgcgaatggcgttttaacaacagtgagataaaagttcttgttccattttaa

SEQ ID NO: 37537 - DNA, 1929 bp, Neisseria meningitidis
atggcaaaagtaatcggtatcgacttaggtacaaccaactcttgtttggccatttccgaaaacggtcaaaccaaagttatcgaaaacgcagaaggcgcacgcaccacgccgtccgttatcgcttatttggacggcggcgaaatcctcgtcggcgcgcctgccaaacgccaagccgtaaccaacgctaaaaacactatttacgccgccaaacgtttgatcggccacaaatttgaagacaaagaagtccaacgcgacatcgaatctatgccttttgaaatcatcaaagccaacaacggcgacgcatgggtgaaagcgcaaggcaaagagctgtctcctcctcaaatttccgcagaagtcctgcgtaaaatgaaagaagccgccgaagcttacttgggcgaaaaagtaaccgaagccgtgattaccgttccggcctacttcaacgacagccaacgtcaagctaccaaagacgcaggccgtatcgccggtttggacgtgaaacgcatcatcaacgagccgaccgcagccgctttggcattcggtatggacaaaggcgacaacaaagaccgcaaagtagccgtatatgacttgggcggcggtactttcgatatttccatcatcgaaatcgccaacctcgacggcgacaaacaatttgaagtattggctaccaacggcgatactttcttgggcggtgaagacttcgaccaacgcttgatcgactacatcattgacgagtttaaaaaagaacaaggcattgatttgaaacaagacgtcatggctctgcaacgtctgaaagaagctgccgaaaaagccaaaatcgaattgtccagcggccagcaaaccgaaatcaacctgccgtacatcaccatggacgcaaccggcccgaaacacttggcgatgaaaattacccgcgccaaattcgaaagcctggttgaagacctgattgcccgctctatcgagccttgccgcaccgcattgaaagatgccggtctgagcactggcgacatcgacgacgtgattttggtcggtggtcaaagccgtatgccgaaagtacaagaagccgttaaagccttcttcggcaaagagccgcgcaaagacgtgaaccctgacgaagctgtcgccgtaggcgcagcgattcaaggcgaagtgttaagcggcggccgcagcgacgtattgctgctggacgtaacccctctgtccttgggtatcgaaaccatgggcggcgtgatgaccaagctgattcaaaagaacacaactattccgactaaagcgtcgcaagtgttctctaccgccgaagacaaccaaagcgcagtaaccatccacgtactgcaaggcgaacgcgaacgcgcttctgccaacaaatctttgggtcagttcaacttgggcgacatcgcacctgcaccacgcggtatgccgcaaattgaagttactttcgacatcgacgccaatggtatcttgcacgtttctgccaaagacaaaggcaccggtaaagcagccaacattaccatccaaggttcttcaggtttgagcgaagaagaaatcgaacgcatggtgaaagatgccgaagccaatgctgaggaagataaaaagctgactgaattggtcgcttcccgcaaccaagccgaagccctgattcactccgtgaaaaaatctttggccgactacggcgacaaactcgacgctgccgagaaagaaaaaatcgaagccgcactgaaagaagccgaagaagccgtgaaaggcgacgacaaaaccgccatcgatgccaaagccgaagcactgggcacagccagccaaaaactgggggaaatggtttacgctcaagcacaagctgaagcccaagcaggcgaaagcgaacaagccaatgcttctgcaaagaaagacgatgatgtcgtagatgccgactttgaagaagtaaaagacgacaaaaaataa

SEQ ID NO: 37538 - DNA, 900 bp, Neisseria meningitidis
ttgccgtctgaaaagaaaatgtgtatcgagatgaaatttatattttttgtactgtatgttttgcagtttctgccgtttgcgctgctgcacaagattgccgacctgacgggtttgcttgcctaccttctggtcaaaccgcgccgccgtatcggcgaaatcaatttggcgaaatgttttcccgaatggagtgaggaaaagcgtaaaaccgtgttgaaacagcatttcaaacatatggcgaaactgatgttggaatacggtttatattggtacgcgcctgccgggcgtttgaaatcgctggtgcgttaccgcaataagcattatttggacgacgcgctggcggtgggggaaaaagtcatcatcctgtatccgcacttcaccgcgttcgagatggcggtgtacgcgcttaatcaggatgtcccgctgatcagtatgtattcccatcaaaaaaacaagatattggacgaacagattttgaaaggtcgcaaccgctatcacaacgtcttccttatcgggcgcaccgaagggctgcgcgccctcgtcaaacagttccgcaaaagcagcgcgccgtttctgtatctgcccgatcaggatttcggacgcaacgattcggtttttgtggatttcttcggtattcagacggcaacgattaccggattgagccgcattgccgcgcttgcaaatgcaaaagtgatacccgccattcccgtccgcgaggcagacaatacagttacactgcatttctacccggcttggaaatcctttccgagtgaagatgcgcaagccgacgcgcagcgcatgaaccgttttatcgaggaacgcgtgcgcgaacatcccgagcagtatttttggctgcacaagcgttttaaaacccgtccggaaggcagccccgatttttactga

SEQ ID NO: 37539 - DNA, 246 bp, Neisseria meningitidis
atggtagttatccgtttggcacgcggcggctcgaaacaccgccctttctacaacgtcatcgttactgactcacgcagccgccgcgacggccgcttcatcgaacgcgtaggcttctacaaccccgtagccaacgaaaaacaagagcgcgtccgcctcaacgcagaccgcctgaaccactggattgcacaaggcgcgcaagtcagcgactccgttgcaaaactgattaaagaacaaaaagccgcctaa

SEQ ID NO: 37540 - DNA, 519 bp, Neisseria meningitidis
atgactacgcattttgtcgttatgggcgtatgcggctgcggcaagaccaccgccgcgctgtccctgcagaaacacctcggtcaatgtccccatgccgaaggcgacgagttccacacccaagccaaccgcgacaagatgggcgcgggtattccgctgaccgatgaagaccgctatccgtggttgggcaatctgcgcgactggatgacgcaacaggcgcaaaacggtgcgaaccacaccatcgtaacctgttccgccctcaaacgcggctaccgcgacattctgcgcggagccgaaggcaaagctgctttcatccacctcagtccgccgcaagacatcaacctcgagcgcatgatgtcgcgcaaaggacattacatgaaagcagggatgctcgattcgcaactggaaatcctcgaggaactgggcgaaggcgaatacggggtcaaaatcgccaaccccggcacgcccgaagcggtcgaagccgatattctgaactgggttgcctcggaaaacctgctttga

SEQ ID NO: 37541 - DNA, 1743 bp, Neisseria meningitidis
atgaaattttttcctgctccatgtctgttggttatcctggctgtcataccccttaaaaccttagctgccgatgaaaacgatgcagaacttatccgttccatgcagcgtcagcagcacatagatgctgaattgttaactgatgcaaatgtccgtttcgagcaaccattggagaagaacaattatgtcctgagtgaagatgaaacaccgtgtactcgggtaaattacattagtttagatgataagacggcgcgcaaattttcttttcttccttctgtgctcatgaaagaaacagcttttaaaactgggatgtgtttaggttccaataatttgagcaggctacaaaaagctgcgcaacagatactgatcgtgcgtggctacctcacttcccaagctattatccaaccacagaatatggattcgggaattctgaaattacgggtatcagcaggcgaaataggggatatccgctatgaagaaaaacgggatgggaagtctgccgaaggcagtattagtacattcaataacaaatttcccttatataggaacaaaattctcaatcttcgcgatgtagagcagggcttggaaaacctgcgtcgtttgtcgagtgttaaaacagatattcagattataccgtccgaagaagaaggcaaaagcgatttacagatcaaatggcagcagaataaacccatacggttcagtatcggtatagatgatgcgggcggcaaaacgaccggcaaatatcaaggaaatgtcgctttatcgttcgataaccctttgggcttaagcgatttgttttatgtttcatatggacgcggtttggcgcacaaaacggacttgactgatgccaccggtacggaaactgcaagcggatccagaagttacagcgtgcattattcggtgcccgtaaaaaaatggctgttttcttttaatcacaatggacatcgttaccacgaagcaaccgaaggctattccgtcaattacgattacaacggcaaacaatatcagagcagcttggccgccgagcgcatgctttggcgtaacaggtttcataaaacttcagtcggaatgaaattatggacacgccaaacctataaatacatcgacgatgccgaaatcgaagtgcaacgccgccgctctgcaggctgggaagccgaattgcgccaccgtgcttacctcaaccgttggcagcttgacggcaagttgtcttacaaacgcgggaccggcatgcgccaaagtatgcctgcaccggaagaaaacggcggcaatattcttccaggtacatctcgtatgaaaatcattactgccggtttggacgcagccgccccatttattttaggcaaacagcagtttttctacgcaaccgccattcaagctcaatggaacaaaacgccgttggttgcccaagataaattgtcaatcggcagccgctacaccgttcgcggatttgatggggagcagagtcttttcggagagcgaggtttctactggcagaatactttaacttggtattttcatccgaaccatcagttctatctcggtgcggactatggccgcgtatctggcgaaagtgcacaatatgtatcgggcaagcagctgatgggtgcagtggtcggcttcagaggagggcataaagtaggcggtatgtttgcttatgatctgtttgccggcaagccgcttcataaacccaaaggctttcagacgaccaacaccgtttacggcttcaacttgaattacagtttctaa

SEQ ID NO: 37542 - DNA, 264 bp, Neisseria meningitidis
atgtcattaatcgaatttttattcggcagaaagcagaaaacggcaaccgttgcccgcgaccgccttcaaatcatcattgcccaagagcgcgcccaagaaggtcaggctccggattacctgccgactttacgtaaagagttgatggaagtcctgtccaaatatgtgaatgtttcattagacaatatccgtatttcccaggaaaaacaggatggtatggatgtgcttgagttgaacattactttgccggaacagaaaaaggtatag

SEQ ID NO: 37543 - DNA, 618 bp, Neisseria meningitidis
atgcttgccaaaattcccgacggcgatacaataaaaccgattttccacccaaacaggacacacatgaaaaaaatcatcgcctccgcgcttatcgcaacattcgcactcgccgcctgccaagacgacacgcaggcgcggctcgaacagcagcagaaacagattgaagccctgcaacagcagctcgcacagcaggcagacgatacggtttaccaactgactcccgaagcagtcaaagacaccattcctgccgaagcacaggcaaacggcaacaacgggcaacccgttaccggtaaagacgggcagcagtatatttacgaccaatcgacaggaagctggctgctgcaaagcctggtcggcgcggcggcaggcgtgtttatcggcaacgcgctggcaaacaaattcacacgggcaggcaaccaagacagtcccgtcgcccgacgcgcgcgtgcagcctaccatcagtccgcacatcccaatgcgcgcaccagcagggatttgaacacgcgcagcctccgtgcaaaacaacaggcggcgcaggcgcagcgttaccgcccgacaacgcgcccgcccgccaattaccgccgccccgctatgcgcggtttcggcaggaggcggtaa

SEQ ID NO: 37544 - DNA, 1404 bp, Neisseria meningitidis
atggatactacattgaaaaccaccttgacttctgttgcagcagccttcgcattatccgcctgcaccatgattccccaatacgagcagcccaaagtcgaagttgccgaaacgttcaaaaacgataccgccgacagcggcatccgtgcggtcgatttaggttggcatgactattttgccgacccgcgcctgcaaaagctgatcgacatcgcactcgagcgcaataccagtttgcgtaccgccgtattgaacagcgaaatctaccgcaaacaatacatgattgagcgcaacaacctcctgcccacgcttgccgccaatgcgaacgactcgcgccaaggcagcttgagcggcggcaatgtaagcagcagctacaaagtcggactgggtgcggcatcttacgaactcgatttgttcgggcgtgtacgcagcagcagcgaggcggcactgcaaggctatttcgccagcaccgccaaccgcgatgcggcacatttgagcctgattgccaccgttgccaaagcctatttcaacgaacgttacgccgaagaagcgatgtctttggcgcaacgtgttttgaaaacgcgcgaggaaacctacaagctgtccgaattacgttacaaggcaggcgtgatttccgccgtcgccctacgtcagcaggaagccctaatcgaatctgccaaagccgattatgcccatgccgcgcgcagccgcgaacaggcgcgcaatgccttggcaaccttgattaaccaaccgatacccgaagacctgcctgccggtttgccgctggacaagcagttttttgttgaaaaactgccggccggtttgagttccgaagtattgctcgaccgtcccgatatccgtgctgccgaacacgcgctcaaacaggcaaacgccaatatcggtgcggcacgcgccgcctttttcccatccatccgcctgaccggaaccgtcggtacgggttctgccgaattgggtgggttgttcaaaagcggcacgggcgtttggtcgttcgcgccgtctattaccctgccgatttttacctggggtacgaacaaggcgaaccttgatgtagccaagctgcgccaacaggcacaaatcgttgcctatgaatccgccgtccaatccgcatttcaagacgtggcaaacgcattggcggcgcgcgagcagttggataaagcctatgacgctttaagcaaacaaagccgcgcctctaaagaagcgttgcgcttggtcggcctgcgttacaagcacggcgtatccggcgcgctcgacttgctcgatgcggaacgcagcagctatgcggcggagggtgcggctttgtcggcacaactgacccgcgccgaaaaccttgccgatttgtacaaggcactcggcggcggattgaaacgggatacccaaaccgacaaataa

SEQ ID NO: 37545 - DNA, 270 bp, Neisseria meningitidis
gtgaacaagtctgaattgatcgaagcgattgctcaagaagccgacatttccaaagccgccgcacaaaaagctttggatgccactaccaatgcagtaaccaccgccctgaaacaaggcgacaccgttactttggtcggtttcggtactttctacgtgggcgaacgtgcggaacgccaaggccgcaaccccaaaaccggcgagcctctgaccattgccgccgccaaaacgcctaaattccgtgcaggtaaagcattgaaagacgcactgtaa

SEQ ID NO: 37546 - DNA, 777 bp, Neisseria meningitidis
ttgttaatccactatactttatgccgctaccgcaactggctggcgcaagacgacaccctgtccgaattgctcaaactgattaactgccaactgaccgaaaaaaacctaaaagtagagaaagcatccgcctccgtcgttgacgccaccattattcagaccgccggcagcaaacagcgtcaggccatagaagtcgatgaagaaggacaagtcagcggccaaaccacaccgagtaaggacagcgatgcccgttggatcaagaaaaacggcctctacaaactcggttacaaacaacatactcgcaccgatgaggaaggctatatcgagaaactgcacatcacccccgccaatgcccatgagtgcaaccacctgttgcctttgctggaaggtatagccgaaggcacgaccgtctatgccgacaaaggctacgacagtaaggaaaaccggcagcatctgaaagaacatcagttactggacggcattatgcgcaaagcctgccgcaaccgtccgctgacggaagtgcaaaccaaacgcaaccgatatttgtcgaagacccgttatgtggtcgaacaaagcttcggtacgctgcaccgtaaattccgctatgcgcgggcggcctatttcggactgattaaagtgagtgcgcaaagccatctgaaggcgatgtgtttgaacctgttgaaagccgccaacaggctaagtgcgcccgctgccgcccaaaaggcgaccggatgcctgattatcgggtatccgggcaggattaaggggatatttgggtaa

SEQ ID NO: 37547 - DNA, 750 bp, Neisseria meningitidis
ttgtccgtacaccactggacagacgcatattttacctttacctgcacccgcgacgaatcgttgcgctttgaaaacggacagttcgttatggtcggattgatggtggacggcaagccgctgatgcgtgcatacagcgtcgcctccgccaactgggaagaacacctcgaatttttcagcattaaagtccaagacggcccgctgaccagccgcctgcaacacctcaaagtcggcgacgacgtgttaatcagcaaaaaaccgaccggaaccctggttgccggcgacctgaatccgggcaaacacctttacttgttgagcaccggtaccggcatcgctcctttcttgagcatcaccaaagaccccgaaatttacgagcaatttgaaaaaatcatcctcgtacacggcgtgcgctacaaaaaagatttggcgtactacgaccgctttaccaaagaattgcccgaacacgaatacctcggtgacttggttaaagaaaaactgatttactacccgattgtttcccgagaagaattcgaacaccacggccgcctaaccgacctgatggtgagcggcaaactgtttgaagacatcggcctgcccaaaatcaatcctcaagacgaccgcgcgatgctgtgcggcagccccgcgatgctgaaagacacctgcaaagttttggacgatttcggactaaccgtttctccgaaaacaggcgtgcgcggcgattacctgattgagcgcgcgtttgtggatcaataa

SEQ ID NO: 37548 - DNA, 546 bp, Neisseria meningitidis
atgattatagttgaacatttagaacattatttgggtgaaatcgaaagcggtataaaatgcttggatcgacgttatcatctcagcgtttccgtcttcccatcacaaccatataaaggggtaactactttttctactttaggcttgaatcgatatgacttgaactataagagtaggtttgaattaatttttacctgttctgaagaatggaataaagaaaatattgcagcttttctatcaggagtagccgaatatttgattgacaatagacaacctattttaagaggtgaaattattcaattacccagggtaattatcgaaggtagcaaaatggatgcactgtatgtttccgccccattttatttcgacgatgattttcaggtctgttatggcgaacactacaatatcgttttccctttgcttgtccccttgtataaacaggaagccgaatgggtggaaaaaaagggttggaatgcttttgagcagttcttgctggataatgaagttggcaacctttcggatatgaatcggaaaccgtttacttggtaa

SEQ ID NO: 37549 - DNA, 300 bp, Neisseria meningitidis
atgcattatttcagtattcatgaccaatcgggacggcatataggctttttcatcctgcttgccgacgacgaatcggaagcacggccgcaaagcgggcgttttgccgtcaaacttgaaggcggaatggaaaatcatgtcctgtcgccgttcggtcagacggaaatcccccaatattggcgcgtgatcaaagaccgtatcgagctgttttttgacgaagctcccgtcggaactttgcgtaacgaatatctgaccgtgtcggggcagacttttgttttgaacgatttgacagggaatatgtga

SEQ ID NO: 37550 - DNA, 651 bp, Neisseria meningitidis
atgatttcagttgaacacgtttccaaacgctatctgacccgccaaggttggcggacagtcttgcacgatattagcttcaaaatggagaagggcgagaaaatcggtattctcggccgcaacggtgcaggtaaatcgacgctcatccgtttgatcagtggcgttgagccgccgaccacgggtgaaatcaagcggacaatgagtatttcttggcctttggcattctccggtgcgtttcaaggcagtctgaccggtatggacaatttgcgtttcatctgccggatttacaatgtcgatatcgattatgtgaaagcgtttacggaagaattttcggagctggggcaatatttgtatgagccggtgaaacgctattcttcaggtatgaaagcgcgtttggcttttgcgctgtcgttggcggtggagtttgactgttacctgattgacgaagtgattgcagttggtgactcgcgttttgccgataaatgtaagtacgagttgtttgaaaagcgcaaagaccgttccatcatcttggtgtcgcacagccacagcgccatgaagcaatattgcgataatgcgatggtgctggaaaaagggcatatgtaccagtttgaagatatggacaaagcctacgaatattataattcgctgccttaa

SEQ ID NO: 37551 - DNA, 1035 bp, Neisseria meningitidis
atggggcgcgtgtcgtacctgtgcgtcgatgcggcggagcaggcgctggcggatgccggtttgctcggggacgaaagcattaccgacggacggatgggcgttgcctgcggctcttccagcggcagcaccaaagacatcggcgatgtgggcgaattgttgctgaccggcacgtcgcgcaacttcagtgccaacacctatgtgcgtatgatgccgtacaccgccgccgccaatatcggcatctttttcgggctgaaaggacgcatcatcccgacatcgagcgcgtgttcgtccggcagccaaggcataggttatgcctacgaagccatcaaatacggtctgaccgatatgatgctggcgggcggaggcgaagaatttttcccgtccgaagtgtatgttttcgactcgctttatgccgccagccgccgcaacggcgaaccggaaaaaaccccgcgcccatacgacgcgaaccgcgacgggctggtcatcggcgaaggcgcggggattttcgtgctggaagaattggaacacgccaaacggcgcggtgcgataatttacgccgaactcgtcggctacggagccaacagcgatgcctaccatatttccacgccccgccccgacgcgcaaggcgcaatccttgcctttcagacggcattgcaacacgcaggtcttgcgcccgaagacatcggctggattaatctgcacggcaccgggacgcaccacaacgacagtatggaaagccgtgccgttgcagcggttttcggcaacaatacgccctgcacgtccaccaagccgcaaaccggacacacgctgggtgcggcgggcgcaatcgaagccgcgttcgcgtggggcattgccgaccggcaaagcaatcccgaaggaaaacttccgccccagctttgggacgggcagaacgatccgaaccttcccgccatcaacctgaccggcagcggcagccgctgggaaaccgaaaaacgcattaccgccagctcgtcgtttgccttcggaggaagcaactgcgtcttaatcatcggatga

SEQ ID NO: 37552 - DNA, 1095 bp, Neisseria meningitidis
ttgaatttccctagttatctaggacagccccaaacatattttaaagttcaaaccatgcaacccatccgataccgaaccgacctcaccccctacaacaccttcggtcttcgcgcccaagcccgagcctttattgcgcttgaacacgccgacgggttgcgcgacatcgtccgactgcccgagttcgaccgcgatactgttttatggctgggcggcggcagcaacatccttttgatgcaggattacgccggactggtcgtacacatggaaaacaaaggcatacgcgagattgcgcgttcagacggcatggttctgattgaagcgcaggcgggcgaaatttggcacgattttgtcctgcacaccgttgcgctgggtttgagcggtttggaaaacctgagcctgattccgggtacggtcggcgcatcgcccgtgcagaacatcggcgcatacggcgtggaggcgaaagacgtgattcacagcgtgcgctgctttgatttggatacggaaacctttgtaaccctttccaatgccgactgccgctttgcctaccgcgaaagcctgttcaagcaggaaggcaaagggcgttatgtgattgtttcggtcgtatttgcattaaaaacgcattttgtgccgaacttgggctacggagatttggcggcgaaggttgccgaattgagtgcaggcagggaggcgacggcgaaagatgtttccgatgcagtgtgtgcaatccgcaacagtaaacttcctaatcctaacgtgcttggcaatgtcggcagtttctttaaaaatcccgtcatcggcgcggaaaaagctgccgccctgttggagcagcatcccgatatgccgcattatccgcagcccgacggttcggtcaaactcgccgccggctggctgatcgaccaatgtcgtctgaaaggctttcaaatcggcggcgcggcggtacatggcaggcaggctttggtcttagtgaacaaaaacaacgcctcggcaaacgatgtccggcaattggcgcaacacatcaaatttacagtatttgctcggtttcaggtagaattgcacgccgaacccaattggctgcctgcttcgttcagcctgtaa

SEQ ID NO: 37553 - DNA, 513 bp, Neisseria meningitidis
ttgcgcgtgatgacgaaagatgcgcatcatgcggcagcaaaatggcttgtggataaccctgttgatatgttgaagccgacaggtttgcccgatgcggatttgacttgggtggctcatgcgatggttggtacgcgcggctatgaattgttggacgggctgccttgtgccaaagaatacgattattgcgtttggaaaggtgttgatcctgaattgcatccttacggcgcgtgttttcacgatattgaggaaaaactaagcacagggctgattgaatggctgcgttgtcaaaatacggatacggttattatcggtgggttagctacggattattgtgttaaaacaacggttttgcagttactcaaaggcggtcgttggcaggttgtcgtcaatgaagcggcttgtcggggtattgcgccggaaaccatcgaaacagcatggcaggaaatgcattctgccggggcaatcatcttaaaaaacgctgatgaaataaataaatatattaataatcaataa

SEQ ID NO: 37554 - DNA, 729 bp, Neisseria meningitidis
ttgccaaataatccagaaaatcgaccgcttggtgtgatttattggctttccggcttgacgtgtacggaacaaaatttcattaccaaatcaggctttcagcgttatgcggcagaacatcaagtaattgtggtggcctccgataccagccctcgcggagagcaagtgccgaacgatgatgcttacgatttaggacagggtgcaggcttttatttgaatgcgaccgaacagccttgggcggcgaattatcaaatgtatgattacattttgaacgagctgccccgtctgattgagaaacactttcctaccaacggcaaacgttccattatggggcattcgatgggcggacacggcgcattggtattggcactacggaatcgggaacattatcaaagtgtttctgccttttcgcctattttatcgccaagcctcgtaccgtggggagaaaaagcctttactgcttatttaggaaaagatcgcgaaaaatggcagcaatatgatgcgaactcactcattcaacaaggctataaagtgcaaggtatgcgcatcgatcaaggcttggaagatgagtttttgccgacacaattgcgtaccgaagattttatcgaaacctgccgtgcggcaaaccagccggtcgatgtgcgtttccataaaggctacgatcacagctattacttcatcgccagttttattggcgagcatattgcttatcacgccgcgtttttgaagtaa

SEQ ID NO: 37555 - DNA, 483 bp, Neisseria meningitidis
atggctatcgtgaaaaattccgtggtttcgctgcattatgagatgtatgatgccaacaatcagcttttggacaaaaccgaagaaccgattgcgtatctgcacggcggttacgacggcattttccctttggtggaagaggcgttgcacggtaaggatgccggcgatacggtcgatgtggcgctgtcgcccgacgatgcgttcggcgagcaggatccggagttggtccgtatcgaagatgcgggcgtgttccctgttgaagtcgaagtcggcatgatgtttgaagccgacgatcctgaaactggcgatgttgtcgtctatcgtgtaaccgatgttgccgacggcaaggcggtggtggacggcaaccatcctttggcaggcatgaaaatccgctttaaggctacagttgaaagcgtgcgcgatgcatccgatgaggaaatcgcacacggtcatgtccacggcccgcacggtcatcaccaccactga

SEQ ID NO: 37556 - DNA, 582 bp, Neisseria meningitidis
atggaagaaaaaaacgactacaccgacgcggcatccgacaaccgcaacgggcaggaaattgaagtcggaattgccggcgcaggcgaccggatacttgccgcgctgctgaaccaattgtttacctttttggttttgttggtgccgtttgccggactgattgcttttgccatcaagaatgaaggcaggattggcggcagtgaggaaatattcgggctgcttttgggcatgacttccttttgggtaggactggcgggcattttggtttataccgtcgttcaaatctactatatgagtcgggacgggcagtcattgggtaagaagatcatgagaatcagggtgttgaaaaccgacggccgcaatccgggttttgtcggcacggttttggtacgcgaaatcgcatggtcggttttggttgccattattgccgccgttatcggtcttgcagtaggtgacaacggagaaaacgccatcaacctgctggcattccttgccaactttgtcctgctctttatggtcaaacgcgaccgccgcacgctttacgacatactggcggatacggttgtcgtcaagctgcccaaataa

SEQ ID NO: 37557 - DNA, 1386 bp, Neisseria meningitidis
atgaccgaaatcgccgaccgcgtgctgcgcgccgaagggtcggcattgttgtttgagaatccgattaagcctgacggtacgcgctacgattatcccgtgttggcaaacctgttcggcacgcccgaacgtgtggcaatgggcatgggtgcggacagcgtgtccaagctgcgcgaaatcgggcagacgctggcgtatttgaaagaacccgaaccgcccaaaggcatcaaagacgcgttttccaaactgccgctcttgaaagacatttggagcatggtgccgaacgtggtgaaaaacgcgccgtgtcaggaaatcgtgtgggaaggcgaagacgttgatttgtatcaacttccgattcagcattgctggccggaagacgttgcgccgctggtaacatggggcttgaccgtcacgcgcgggccgcacaaaaaacgccaaaatctcggcatttaccgccaacaactcatcggcaaaaacaagctgattatgcgctggctgtcgcatcgcggcggcgcgttggattatcaggaattccacaaactcaatcccgatacgccgtatcccgtcgccgtcgtactcggctgcgaccccgccaccattttgggcgcggtaacgcctgttcccgataccttgagcgaataccagtttgccggactgctgcgcggttcgcggacggagctggtgaaatgtatcggcaacgatttgcaagtgcctgcacgcgccgaaattgtgttggaaggcgtgattcatccgaacgaaaccgcgctggaaggcccatacggcgaccacaccggctattacaacgagcaggaccatttccccatgtttacggtcgaacgcatcaccatgcgcgaaaacccgatttaccattcgacctacacaggcaaaccgcccgatgaacctgccgttttgggcgtggcattgaacgaagtgttcgtaccgctcttgcaaaagcagtttcccgaaatcaccgatttctacctgccgcccgaaggctgctcctaccgcatggcggtggtgagcatgaaaaaacagtacgccggacacgccaagcgcgtgatgatgggctgctggtcgttcctgcgccagtttatgtataccaaattcatcatcgtggtggatgacgatgtgaacgtgcgcgactggaaagaagtcatctgggcggtcaccacgcgcatggaccccgtgcgcgacactgttttggtagaaaacacgcccatcgattatctcgacttcgccagccccgtcagcggactcggcggcaaaatgggtttggatgcgaccaacaaatggccgggagaaaccgaccgcgaatggggacgcgtcatcaaaaaagaccctgcggttacggctaagattgatgggatttgggaggaattggggttgtag

SEQ ID NO: 37558 - DNA, 1251 bp, Neisseria meningitidis
ttgaaagattctacccccgcacacaaaccgatttcaaccgttgcacaaactttgtccccaaagccgcagcgacgatttcatccgcaaaaccgccgcatcaggtacaatatcgaaccgtccgaccgagggcggcattttatcaacccgtcctgccgcacatgccgcagaagaaccgctttatcaagcgagttaggaaaaatgatgtccaagcaacccaccagcaaacgccaatggcgcgacggcgctgccccgtctgccaagaaaaccgccaaaccgttcaaaagcaaagcccgtcccaaagacgaaacacgcaaaaccgcatcccaaccttacggacaaaaagcttcagacggcatcaagctgcaaaacacccccaaacagcgtgccgccaaagccaaaaaactcgtcgtccgcaatcccaaccaaaaaattatgggacacgcgcgcgatttgaaagaacgccgcagcgacctgtcgcgcatggaacccgaacgcctgcaaaaagtgcttgccgcgtccggcgtcggctcgcgccgcgaaatggaagaatggattaacaacggctgggtaacggtcaacggcaaaaccgcgcaactgggcgacaaagttacccccgacgaccacgttaccgtcaaaggcagtatcatcaaactcaaatgggcggaccgcctgccgcgcatcatcctgtattacaaacaagaaggcgaaatcgtttcccgcgacgatccgcaaggccgcgtcagcatattcgaccgtctgccgcaggccgccagcagccgctgggtcgccatcggacgcttggacatcaacaccagcggacttctgattctcaccacctccggcgaactcgtccaacgtttcgcccaccccagcttcgaagtcgaacgcgaatacgccgtgcgcgtcttgggcgggctgaccggcgaacaaatgcgcgtcctcaccgaagaaggcgtgatgctcgaagacggcttggcaaaagtcgaacgcatccgcgaacaaggcggcgaaggcgcgaacaaatggtacaacgtcgtgattaaagaaggccgcaaccgcgaagtgcgccgcatttttgaaagccaaggactcaccgtcagccgcctcgtgcgcgtcggcttcggccccatcggactgcccaaccgcctcaaacgcgggcagttctacgaactcaaccccgccgaagtcgccaacatcatcaaatgggcggacatgctgctgccgggcgaacgccgccgcaaaaaagcctaa

SEQ ID NO: 37559 - DNA, 1893 bp, Neisseria meningitidis
atgcctatccttaccatccgtgaagtgtgcaacattaatcattggggcataggttattatgatgttgacgattccggcgaaatcatcgtccgccccaatccctcgcaacacaatcaaactgtttcactgcaaaaactgactgaagccgtgcaacaaaaacatcaggcgcgcctgcctgttttgttttgttttccgcaaatcctcgaacaccgcctccgcgacattaaccgcgcctttcagacggcacgggaagagtgcggctataagggcggttattgtttggtttaccctatcaaggtcaaccaacaccgccgcgtcatcgaatcgcttatgtcaagcggacaaccgcatggtttggaagctggttctaaagccgaactgatggcggttttggcacacgccggcacccggcaaacattaatcgtctgcaacggctataaagaccgtgaatatatccgtttcgccttgatgggcgaaaaactggggcatcaggtttatttggtgattgagaagctgtccgaaatacaaatggtattggaagaggcggaaaaactcggcatcaagccccgtttgggtgtgcgcgccagactggcttcccaaggttcgggaaaatggcagtcttcgggtggggaaaaatcaaaattcggcttgtcggcttcccaagttttgcaactggtcgatattttgaaacaaaaaaacaggctggactgcctgcagcttttgcatttccatttaggctcgcagcttgggaacatccgtgatgttgccacaggtgtacacgaatcggctcggttttatgttgagttgcacaaactgggggtaaatatccgctgttttgatgtaggcggcgggcttggcgtggattacgaaggaaaccgcacacaatcggattgttccgttaattacagcctcaacgaatatgcctccacagtcgtatggggcatcagccaggcttgtctcgaacacgggctgccgcatccgacaatcattaccgagagcgggcgcggcattaccgcacatcacgccgttttggttgctaatgttataggcgttgaacgttacaaaccgcgccggctggatgcgccatcgcccgaagcaccgcgtgtgttgcacagtatgtgggaaacttggacggatatttccgcctcgcgggaaaaacgttccttacgcagctggatacacgaagggcagtttgatcttgccgatgtgcataatcagtataatgtcgggctgttgagtttggcgcaacgtgcgtgggcggagcaactgtatttaaatatctgtcatgaagtcggcgaattgtttaatgaaaaacaccggtctcaccgaaccattattgacgaattgcaagaacgttttgccgataagctgtatgtcaatttctcactcttccaatctttgcccgatgcttggggcatagatcaacttttccctgtttgtcccattaccggtttgaatgaaccgattgcgcgccgcgccgtgttgttggacattacctgcgattcagacggtacgattgaccactacatcgacggagacggcatcgccggtacgatgcctatgcctgattatcccgaagaagagccgccgcttttaggcttttttatggtgggagcatatcaggaaatactcggcaatatgcacaatcttttcggcgacactgccactgccgatgttgttgtaggggaagacggacaatttaccgtcatcgattacgatgaaggaaacaccgttgccgatatgctcgaatacgtttatcaagatccgaaagagctgatgaaacgctatcgcgaacaaatcgaacattcagaccttcctgcctcgcaggctatgtctttcttaaaagaactcgaagcggggcttaatggttatacctatttggaagacgaatag

SEQ ID NO: 37560 - DNA, 1176 bp, Neisseria meningitidis
atgcaaaatatttttgaccctttggttattcgtggaaaatcccttacccccatcgtgcaaggcggtatgggggtcggtgtttccgcatcgggtttatccagcgcggtggcacgtgaaaacggtatcggaacgattgccagtgtggatttgcgccaccttcacgaagacctactcgccgaatcacaaatcaatccgagtgaagagaaatatacatctttgaactgtaccgcattagacagggaaatccaaaaagccaaaagcgcttcagagggaaaaggactgattgcggtcaacgtgatgaaggcggtcaaagaccacgccgcgtatgtccgccaggcttgcgaatcaggggcggatgcggttgtaatgggtgccggcctgcctttagacctgccggaaatgaccgagggctatcataaagatgtcgcgctgctgccgattctgtccgaatcgcgcggtattaatatcgtcttgaaacgttggatgaaaaaaggcatattgcccgatgcgattgtagtcgaacatcctgcccacgcggccggacatttgggtgcatcaaccgttgaaggcgtaaacgatgccaagttcgacttcaaacgcgtgattgaggaaacgtttgaagttttcaaaagtttagggctggaaagcgaaaaaatcccgcttattcttgcgggaggcatggcaaattttgaaaaagtcaaaaccgccctaaagaactggggagcatccgccgttcaaatcggtacggcttttgccgttaccgaagaaggagatgcacaccttaacttcaaaaaaacgctcgccggtgcggaaactgaaaaagtagttgaatttatgtctgttgccggtttgccggcgcgcggtgtccgcaccaaattcctagacagctacatcaagcgtgaaagcaaacttcaggcaaacgccaaagctgacccgcgccgctgtacccaaggtttaaactgcctgaccagttgcggcctgcgcgacgggctttccaaagccggacaattctgcattgatatccagcttgccgccgcattccgtggagaagtagataaaggcctgttcttcagaggtaaagacccgctgcccttcggcaatgccatccgtaccgtccgcgagacgatacaatatctgctgacagggagcgaacctgttgcaacgctcggacgctga

SEQ ID NO: 37561 - DNA, 402 bp, Neisseria meningitidis
atgcagcaacatattgaaaagtggcaacacttgagccgggaagaacagaaaatccttgctgaagtatggggtctcgtgcaaaacgacgatcaggaggttcactatgaaatgctcaaattgaacgcacccgatgaagccagcggcgaattttggttcagaatggcagaaacactcagcaccctgccgcccaaccgttccctcggccttagaatgaacggcggcaggctggcgaccgccgtatccatcctttccgtcatgattgaagacaatcccgacataccgcagctttgggcgcaaaaaattaccgcgctcaattatagtggattaaatttaaaccagtacggcgttgcctcgccttgtcgtactatctgtactgtctgcggcttcgtcgccttgtcctga

SEQ ID NO: 37562 - DNA, 456 bp, Neisseria meningitidis
atgcataaagccccaaaaggtacagcattggcattcgacttcggcgaaacgcgtatcggcgtggcacaaggagacgcggaattagggctatcccatcctttgagcaccgttaccggcggcagcaacgatgaaaagttcgcggcaatcgccaagctggttcaagaatggcagccgcgttattttgtcgtcggactgcccgtgcataccgacggcacgaaacatgaaatgacgcacctgtcgcgcaagttcggacgcaggctgaacggcaggttcaatctccccgtctattgggtggacgaacggctgtcgtccgtctatgccgaaagcctgctttcggaagcacaggtcttcggcaaaaaacgcaaatcggtgctcgaccaagtggcggcgcaagccatcttgcacggttttttcgagggcggtccggcggaatgtttcaacgggcgtgagggttaa

SEQ ID NO: 37563 - DNA, 567 bp, Neisseria meningitidis
atgtccgccctcctccccatcatcaaccgcctgattctgcaaagcccggacagccgctcggaacttgccgcctttgcaggcaaaacactgaccctgaacattgccgggctgaaactggcgggacgcatcacggaagacggtttgcttgcggcgggaaacggctttgcagacaccgaaatcaccttccgcaacagcgcgatacaaaaaatcctccaaggcggcgaacccggggcgggcgacatcgggctcgaaggcgacctcatcctcggcatcgcggtactgtccctgctcggcagcctgcgttcccgcgcatcggacgaattggcacggattttcggcacgcaggcagacatcggcagccgtgccgccgacatcggacacggcatcaaacaaatcggcaggaacatcgccgaacaaatcggcagattttcccgcgaacccgagtccgcaaacatcggcaacgaagcccttgccgactgcctcgacgaaataagcagactgcgcgacggcgtggaacgcctcaacgaacgcctcgaccggctcgaacgcgacatttggatagactaa

SEQ ID NO: 37564 - DNA, 798 bp, Neisseria meningitidis
atggataccgcacaaaaacaacgctgggcaataaccctatcctatgatggcagccgcttttacggctggcagaaacaggctgacggcgtaccgaccgttcaggcggcattggaaaccgcgctcgcccaaatagcaggggaagcggtttccaccaccgttgccggcaggaccgataccggcgttcatgcgactgcccaagtcgttcattttgatactgccgccgtccgtccggttcaggcatgggtgcgcggcgtaaatgcccacctgcccgaaggcattgccgttttgcacgcccgacaggtcgcccccgaatttcacgcccgcttcgacgcatacggacggcattaccgctacctgctcgaatccgcccccgtccgttcccccctgctcaaaaacagggcaggctggacgcatctcaaactcgacatcgggcagatgcggcaggctgccgccttattgatcggcgaacaagacttctccagcttccgcgccgccgaatgccaagcaaaatcccccgtcaaaaccatctaccgcgccgaccttacccaaagctcaggactcgtccgcctcgatttgcacggcaacgcctttttgcaccatatggtacgcaacatcatgggcgcgctcgtctatgtcggcagcggcagactcagcgtcgaaggcttcgccgcactgattcaagaacgcagccgcctcaaagccccgccgaccttcatgcccgacggactttacctgaccggcgtcgactatcccgaggcatacggcatcatccgcccccaaatccccgaatggctttaa

SEQ ID NO: 37565 - DNA, 429 bp, Neisseria meningitidis
atgatgttttcttggttcaagctgtttcacttgttttttgtcatttcgtggtttgcagggctgttttacctgccgaggattttcgtcaatatggcgatgattgatgcgccgcgcggcaatcccgagtatgtgcgcctgtcagatatggcggtgcggctgtaccgttttatgtcgccgttgggcttcggcgcggtcgtgttcggcgcggcgataccgtttgccgccggctggtggggcagcggctgggtacacgtcaaactgtgtttgggcttgatactcttggcttaccagttgtattgcggcgtgctgctgcgccgttttcaggattacagcaatgctttttcacaccgctggtaccgcgtgttcaacgaaatccccgtgctgctgatggttgccgcgctgtatctggtcgtgttcaaaccgttttga

SEQ ID NO: 37566 - DNA, 1590 bp, Neisseria meningitidis
atgcgtaaggtgtgtgcttcagcacgcacgcgttccatgatttacggctcaatgccgtctgaaaagctcacaatttttcagacggcatttgttatgcaagtaaatattcagattccctatatactgcccagatgcgtgcgtgctgaagacaccccctacgcttgctatttgaaacagctccaagtcaccaaagacgtcaactggaaccaggtacaactggcgtacgacaaatgggactataaacaggaaggcttaaccggagccggagcagcgattattgcgctggctgttaccgtggttactgcgggcacgggagccggagccgcactgggcttaaacggcgcggccgcagcggcaaccgatgccgcattcgcctcgctggccagccaggcttccgtatcgctcatcaacaacaaaggcaatatcggtaacaccctgaaagagctgggcagaagcagcacggtgaaaaatctggtggttgccgccgctaccgcaggcgtagccgacaaaatcggcgcttcggcactgaacaatgtcagcgataagcagtggatcaacaacctgaccgtcaacctggccaatgcgggcagtgccgcactgattaataccgctgtcaacggcggcagcctgaaagacaatctggaagcgaatatccttgcggctttggtcaataccgcgcatggagaagcagccagtaaaatcaaacagttggatcagcactacatagtccacaagattgcccatgccatagcgggctgtgcggcagcggcggcgaataagggcaagtgtcaagatggtgcgatcggtgcggcggtcggtgaaatccttggcgaaaccctactggacggcagagaccctggcagcctgaatgtgaaggacagggcaaaaatcattgctaaggcgaagctggcagcaggggcggttgcggcgttgagtaagggggatgtgagtacggcggcgaatgcggctgctgtggcggtagagaataattctttaaatgatatacaggatcgtttgttgagtggaaattatgctttatgtatgagtgcaggaggagcagaaagcttttgtgagtcttatcgaccactgggcttgccacactttgtaagtgtttcaggagaaatgaaattacctaataaattcgggaatcgtatggttaatggaaaattaattattaacactagaaatggcaatgtatatttctctgtaggtaaaatatggagtactgtaaaatcaacaaaatcaaatataagtggggtatctgtcggttgggttttaaatgtttcccctaatgattatttaaaagaagcatctatgaatgatttcagaaatagtaatcaaaataaagcctatgcagaaatgatttcccagactttggtaggtgagagtgttggtggtagtctttgtctgacaagagcctgcttttcggtaagttcaacaatatctaaatctaaatctccttttaaagattcaaaaattattggggaaatcggtttgggaagtggtgttgctgcaggagtagaaaaaacaatatacataggtaacataaaagatattgataaatttattagtgcaaacataaaaaaatag

SEQ ID NO: 37567 - DNA, 198 bp, Neisseria meningitidis
atgactaccgtccccaaaagcaggattcccgtcaaaccgctgcccgaaaaaaccacagacgaagccaaagtcgaaaaatggcggcagctcggtgcggaacacggtttgtcgggcgaatgggcagttgccgccagattgggcgagaacggttttaccgaagaacagatggaaaatatcgccaacctgttcggcagataa

SEQ ID NO: 37568 - DNA, 498 bp, Neisseria meningitidis
atgaacgttaaagttcataaagacacacaccatttcggtattcacaacctcaacaataccgatgttcatctgactgccgaagacagcgataatgtgattgagattaaaggggaactcgccgaccttatgccgacaggaaatgttgagagtacaagttttttaaggggcattgaaacggcttttaaatccaataccgtattaacggggaataacaataaaatatccatcgccactgagggcaagggcttgggattgggcgtaaatggtctccagtccaactccccctattccggacacacgacgggcattttcatcaataatcaatcaagcgaccttacccaaccttcccttgatggcatcagcaccatcaaactcaaagccgtcaagggaaataatgaagttgatttaaatgtaaaaaaccacgcctccgtaaaaggcattatcgcgtcgcattctgcaaaagcaacgcttgaagccgaaggggacaatattgtctag

SEQ ID NO: 37569 - DNA, 672 bp, Neisseria meningitidis
atgaaaaccgtttccaccgccgttgtccttgccgccgctgccgtttcactgaccggctgtgcgaccgaatcctcacgcagtctcgaggtagagaaagtcgcctcctacaatacgcaatatcacggtgttcgtaccccgatttccgtcggaacattcgacaaccgctccagcttccaaaaaggcattttctccgacggggaagaccgtttgggcagccaggcaaaaaccattctggtaacgcacctgcaacagaccaaccgcttcaacgtactgaaccgcaccaatttgaacgcattaaaacaggaatccggcatttccggcaaagcgcataacctgaaaggcgcagattatgtcgttaccggcgatgtaaccgaattcggacgcagagatgtcggcgatcatcagctcttcggcattttgggtcgcggcaaatcgcaaatcgcctatgcaaaagtggctctgaatatcgtcaacgtcaatacttccgaaatcgtctattccgcacagggcgcgggcgaatacgcactttccaaccgtgaaatcatcggtttcggcggcacttccggctacgatgcgactttgaacggcaaagttttagacttggcaatccgcgaagccgtcaacagcctggttcaggctgttgacaacggcgcatggcaacccaaccgttaa

SEQ ID NO: 37570 - DNA, 201 bp, Neisseria meningitidis
gtggataccgttggcagtttagcgattggttatgccacaggcggcaatgctggggcttttactggtgcgaatgcagattggaataatcggcagttgcattcgagtgaatataaattagcagaacaatatgcagacatagtagcttctcgtctaaacatttcaaaagaaacttgtacggtagtttatttgggaataaactaa

SEQ ID NO: 37571 - DNA, 1011 bp, Neisseria meningitidis
ttgtccaccggcgaacaagtaaccatcggccttttggcgatggcattgaaagacatcggcgtggaagccaaaagctacaccggctggcaggtcgccctcaaaaccgataccgcccacaccaaagcccgcatcgaaagcattgatgacgaaaaaatgcgtgccgaccttgccgccggcaaagtcgtcatcgtcgccggtttccaaggcatcagcagcgaaggcgacatttccacgctcggacgcggcggctccgacacctccgccgttgcgctcgccgcagccctcaaagcagacgaatgccaaatctataccgacgtggacggcgtttacaccaccgacccccgcgtcgtacccgaagcgcgccgcatggatacggttacatttgaagaaatgatcgaactggcaagcctcggttcgaaagttttgcaaatccgttcagtagaatttgccggaaaatacaaagtgcgcctgcgcgtactgagcagcctgcaagacggcggcaacggcaccttaattacctttgaagaggacgacaacatggaaagagctgccgtaaccggtatcgcattcgacaaaaaccaagcccgcatcaacgtgcgcggtgtgcccgataagcccggcgtcgcctatcagattttaggcgcggttgccgatgccaacatcgaagtcgatatgattatccaaaatgtcggcagcgaaggcacaaccgatttttcctttaccgtaccgcgcggcgattacaagcagactttggaaatcctgtcggaacgccaagacagtatcggcgcggcttctattgatggcgacgacaccgtatgcaaagtctccgcagtcggtttgggtatgcgttcgcacgtcggtgtagccgccaaaatcttccgcacgctcgccgaagagggtatcaacatccaaatgatttccacctccgaaatcaaagtttccgtattgattgatgaaaaatacatggaactggcaaccagggtattgcataaagcctttaatttgggctga

SEQ ID NO: 37572 - DNA, 966 bp, Neisseria meningitidis
atgttgcgtttgaccgcattgaccctctgcaccgtcctcgccttgggcgcgtgttcgccgcaaaattccgactctgccccacaagccaaagaacaggcggtttccgccgcacaatccgaaggcgcgtccgttaccgtcaaaaccgcgcgcggcgatgttcaaataccgcaaaaccccgaacgtatcgccgtttacgatttgggtatgctcgacaccttgagcaaactgggcgtgaaaaccggtttgtccgtcgataaaaaccgcctgccgtatttagaggaatatttcaaaacgacaaaacctgccggaactttgttcgagccggattacgaaacgctcaatgcctacaagccgcagctcatcatcatcggcagccgcgccgccaaagcatttgacaaattgaacgaaatcgcgccgaccatcgaaatgaccgccgataccgccaacctcaaagaaagtgccaaagagcgcatcgacgcgctggcgcaaatcttcggcaaacaggcggaagccgacaagctgaaggcggaaatcgatgcttcgtttgaagcggcgaaaactgccgcacaaggcaaaggcaaaggtttggtgattttggtcaacggcggcaagatgtccgccttcggcccgtcttcacgcttgggcggctggctgcataaagacatcggcgtacccgctgtcgatgaatcaattaaagaaggcagccacggccagcctatcagctttgaatacctgaaagagaaaaatcccgactggctgtttgtcctcgaccgaagcgcggccatcggcgaagaaggtcaggcggcgaaagatgttttggacaatcctttggttgccgaaacaactgcatggaaaaaaggccaagtcgtgtacctcgtgccggaaacctatctggcggccggcggcgcgcaagagctgctgaatgcaagcaaacaggttgccgacgcttttaacgccgcgaaataa

SEQ ID NO: 37573 - DNA, 819 bp, Neisseria meningitidis
atgaaaaaagaccatttaaacacaaccggtttcgacctctggcacaccatccgcgaagaaaccgcggccgcggtctccgccgaaccgatgctggcaagttttttgcaccaaaccgtgttgcgccacgagtccctcggctccgtccttgcctaccacctttccagcaaactcggcagcccgattatggacgtgcgcgcgctgtttgaaatctaccagcaggcgttgggcagcgacacccaaatcggcaaatgcgtcgaagcagacttaaaagccatctacgaacgcgatcccgcctgcgacgaatattcgctgccgcttttatatttcaaaggcttccacgcgattcaggcacaccgcatcaaccatcggctgtatctcgacgggcgcaaaacgctggcgtatttcctgcaaaaccgtatgtccgaagtattcggcgtggacatccatcccgccgcccgtttcggatacgggctgatgctcgaccacgccaccggctttgttgccggcgaaaccgccgtgttgggcaacaatatttcgattttgcacggcgtaacgctcggcggttcgggcaaagaaggcggcgaccgccaccctaaaatcggcgacggcgtgatgatcggcgcaaacgcctcgatattgggcaatatccgcatcggcagcaatgccaaaatcggggcgggcagcgtcgtggtttcagacgtgccgccgtccatcacggttgtcggcgtacccgccaaacccgtggcgcgatcgctcaaaacaccgtcggcggatatggatcaaaatatccagtttaccgaaatcgactttatgatttga

SEQ ID NO: 37574 - DNA, 240 bp, Neisseria meningitidis
atgaatgtttgggatatatggagcaggatggtggaaatctatcataagtataagaagccgtgcctggttttggcggtggattttgtgatgggtatggtattcatagagccgaatgaggagccgtgcatcggcagatgctatgcgcctatgtcggagtcccctgattttgccaacgctgttgcgatggctgttgctatgatctgtatcgtatggattgccgttttgtctatgactgattga

SEQ ID NO: 37575 - DNA, 483 bp, Neisseria meningitidis
atggaaaggaacggtgtatttggtaaaattgtcggcaatcgcatactccgtatgtcgtccgaacacgctgccgcatcctatccgaaaccgtgcaaatcgtttaaactagcgcaatcttggttcagagtgcgaagctgtccgggcggcgtttttatttacggagcaaacatgaaacttatctataccgtcgtcaaaatcattatcctgctgttcttcctgctgcttgccgtcattaatacggatgccgttaccttctcctacctgccggggcaaaaattcgatttgccgctgattgtcgtattgttcggcgcatttgtagtcggtattatttttggaatgtttgccttgttcggacggttgttgtcgttacgtggcgagaacggcaggttgcgtgccgaagtaaagaaaaatgcgcgtttgacggggaaggagctgaccgcaccaccggcgcaaaatgcgcccgaatctaccaaacagccttaa

SEQ ID NO: 37576 - DNA, 1815 bp, Neisseria meningitidis
atgagtgaacacgatatgcagaacacaaatccgccattaccgcctctgccgcccgaaatcacgcagctcctgtcggggctggacgcggcacaatgggcgtggctgtccggctacgcttgggcaaaagcaggaaacggggcatctgcaggactgcccgcgcttcagacggcattgccgacggcagaacctttttccgtaaccgtcctttccgcctcgcaaaccggcaatgcgaaatccgttgccgacaaagcggcggacagcctggaagccgccggcatccaagtcagtcgcgccgaactgaaagactataaggcgaaaaacatcgccggcgaacgccgcctgctgctggttacgtccacccaaggcgaaggcgaaccgccggaagaagccgtcgtgctgcacaaactgctgaacggcaaaaaagccccgaaattggacaaactccaatttgccgtactgggtttgggcgacagttcctatccgaatttctgccgggcgggcaaagatttcgacaaacgttttgaagaattgggggcgaaacgcctgctcgaacgcgttgatgcggatttggactttgccgccgccgcaaacgcctggacagacaatatcgccgcactcttaaaagaagaagccgcaaaaaaccgggcaacgcccgcgccgcaggcaacgccccccgccggccttcagacggcatcggagggcaggtactgcaaggcagacccctttcccgccgccctgctggccaatcagaaaatcaccgcccgccaatccgataaagacgtgcgccacatcgaaatcgatttgagcggttcggatttgcactacctcccgggcgacgcgctcggcgtttggtttgacaacgatccggcactggtcagggaaatcctagacctgctcggcatcgatccggcaacggaaatacaggcgggcggaaaaaccctgccggttgcctccgcactgttatcccattttgaactcacgcaaaacacccccgcctttgtcaaaggctatgccccgttcgccgatgatgacgaactcgaccgtattgctgccgacaacgccgttttgcaaggctttgtgcaaagcacgccgattgccgatgtgctgcaccgcttcccggcaaaactgacggcggaacaattcgccggcctgcttcgcccgcttgcgccgcgcctgtattcgatttcctcgtcgcaggcggaagtgggggacgaagtgcacctgaccgtcggcgcggtgcgttttgaacacgaagggcgcgccagggtgggcggcgcatcgggtttccttgccgaccggctggaagaggacggcacggtgcgcgtgtttgtggaacgcaacgacggcttcaggctgcccgaagacagccgcaagccgattgtgatgatcggctcgggcaccggcgtcgcaccgttccgcgctttcgtccaacaacgtgccgcagaaaatgcggaaggcaaaaactggctgattttcggcaatccgcattttgccgccgacttcctctatcagaccgaatggcagcagtttgccaaagacggcttcctgcacaggtacgatttcgcctggtcccgcgatcaggaagaaaaaatctatgtgcaggacaaaatccgcgaacaggcggaaggactttggcaatggctgcaggaaggcgcgcatatctatgtgtgcggcgatgcggcaaaaatggcaaaagacgtggaagccgccttgctggatgtgattatcggggcaggacatttggacgaagagggcgcagaagaatatttggatatgctgcgcgaagaaaaacgctatcagcgtgatgtttattga

SEQ ID NO: 37577 - DNA, 954 bp, Neisseria meningitidis
atgacacataccgtccacctgcatttagaagaaaccgacaacttggcgttgcagcgtctgtgcggttcttttgacaacaaccttgatttacttgctaaagcactcgatatccacatcagccgccgttttgaacatttcactttcaacggcgcatttgcacacgccggcaaacgcgcactgctcaaactcttggaaacggcgcagacgcgcgacctaaacgacggcgacatcaggcttgccgccgtcgaagcccaaaccgaagatgccggtcatcaagaaaaaaaccatgaccacgcctattatttccgcaccaagcgcggcagcatctgcggcagaacgccacggcagaacggctatatccgcgccctactcaaccacgacatcgtattcggtctcgggccggcaggtacgggcaaaacctatctcgcagtcgccgccgccgtcgatgcgatggaaaaacaccaagtcgaacgcatcattttagtgcggcctgccgtcgaagccggcgagaaactgggcttcctgcccggagacctgacccagaaagtcgatccctaccttcgtccgctttatgatgccctctatgacctgatgggctttgaccgtgtaaccaagctgattgaaaaaggcctgattgagattgccccgctcgcctatatgcgcggcaggacgctcaacggcgcatacatcatcctcgacgaagcgcaaaacaccacgcccgaacaaatgaaaatgttcctgacccgcatcggcttcggcgcgaaagccgtcattaccggcgacaccagccaaatcgacctgcccaaaaacatcaaatcgggattaaaagatgcgcgtgagaaactgcacaacgtggaagggctgtatttccacacctttaccggcgaagacgttgtccggcatcctttggtgcaaaaaatcgtcgaagcctacgaatcggcagaacacgactga

SEQ ID NO: 37578 - DNA, 1827 bp, Neisseria meningitidis
ttgggcatttcccgcaaaatatcccttattctgtccatactggcagtgtgcctgccgatgcatgcacacgcctcagatttggcaaacgattcttttatccggcaggttctcgaccgtcagcatttcgaacccgacgggaaataccacctattcggcagcaggggggaacttgccgagcgcagcggccatatcggattgggaaaaatacaaagccatcagttgggcaacctgatgattcaacaggcggccattaaaggaaatatcggctacattgtccgcttttccgatcacgggcacgaagtccattcccccttcgacaaccatgcctcacattccgattctgatgaagccggtagtcccgttgacggatttagcctttaccgcatccattgggacggatacgaacaccatcccgccgacggctatgacgggccacagggcggcggctatcccgctcccaaaggcgcgagggatatatacagctacgacataaaaggcgttgcccaaaatatccgcctcaacctgaccgacaaccgcagcaccggacaacggcttgccgaccgtttccacaatgccggtagtatgctgacgcaaggagtaggcgacggattcaaacgcgccacccgatacagccccgagctggacagatcgggcaatgccgccgaagccttcaacggcactgcagatatcgttaaaaacatcatcggcgcggcaggagaaattgtcggcgcaggcgatgccgtgcagggcataagcgaaggctcaaacattgctgtcatgcacggcttgggtctgctttccaccgaaaacaagatggcgcgcatcaacgatttggcagatatggcgcaactcaaagactatgccgcagcagccatccgcgattgggcagtccaaaaccccaatgccgcacaaggcatagaagccgtcagcaatatctttatggcagccatccccatcaaagggattggagctgttcggggaaaatacggcttgggcggcatcacggcacatcctatcaagcggtcgcagatgggcgcgatcgcattgccgaaagggaaatccgccgtcagcgacaattttgccgatgcggcatacgccaaatacccgtccccttaccattcccgaaatatccgttcaaacttggagcagcgttacggcaaagaaaacatcacctcctcaaccgtgccgccgtcaaacggcaaaaatgtcaaactggcagaccaacgccacccgaagacaggcgtaccgtttgacggtaaagggtttccgaattttgagaagcacgtgaaatatgatacgaagctcgatattcaagaattatcggggggcggtatacctaaggctaagcctgtgtttgatgcgaaaccgagatgggaggttgataggaagcttaataaattgacaactcgtgagcaggtggagaaaaatgttcaggaaataaggaacggtaataaaaacagtaactttagccaacatgctcaactagagagggaaattaataaactaaaatctgccgatgaaattaattttgcagatggaatgggaaaatttaccgatagcatgaatgacaaggcttttagtaggcttgtgaaatcagttaaagagaatggcttcacaaatccagttgtggagtacgttgaaataaatggaaaagcatatatcgtaagaggaaataatagggtttttgctgcagaataccttggcaggatacatgaattaaaatttaaaaaagttgactttcctgttcctaatactagttggaaaaatcctactgatgtcttgaatgaatcaggtaatgttaagagacctcgttataggagtaaataa

SEQ ID NO: 37579 - DNA, 975 bp, Neisseria meningitidis
atggacacactgacccgattcctccccgaacacctgcaacaaaaccagctgcccgaagcactcggcggcgttttactgtccgttgtttccgcctgcaccgaaatcaacgccaaagtccgcctcggcgcactggccggcgtattgggtatgacgggcacgggcaatattcagggcgaagaccaaaaaaaactggatgttatcgccaacaacatcatgattgacacactcaaagccaaccctgccgttgccggtttggcaagcgaggaagaagacactttcgtaagtgccggtgaaaacggacgctatctcgtcctattcgaccctttagacggatcgtccaatattgatgtcaacatttccgtcggtacgattttctccatccttgaaaaacccgaaggcgcattggcaaccgaatcattccttcaaacgggtagacagcagcttgccgcaggctatgtcctctacgggcctcaaacccagctcgtattcacattcggacacggcgtatatatgttcacgctcaatgccgaaaacgaatttgtgctgacaaaagaaaaaccgaaagtacccgaaagtaccaaagaatttgccatcaatatgtccaaccgccgccactggctgccccccgtccaacaatacatcgacgagctcttggcgggcgaaaccggcacgcgcggcaaaaactacaatatgcgctgggtagccagcatggttgccgaaatccaccgcatcctgatgcgcggcggcgtgttcatgtatccgcaagacaaacgcgaccccgccaagcccggcaaactgcgcctgatgtacgaagccaaccctatgagcctgatactcgaacaggcgggcgcatcggcaagcaacgcatatcaagccatgctcgacatacagcccgaaaacctgcaccaacgcgtcgccgtcttcatgggcagcagcgaagaagtggattacctcaaccgcctgcattcaaaataa

SEQ ID NO: 37580 - DNA, 684 bp, Neisseria meningitidis
ttgggtatgcctgctgctttgattaaggattttctgctgactcagggtttgaagctgccgcttgacgaggttcgggcggcgtatctgacggcgcagacggtaatggatatggggacggcttcgatagaccgttcggttttgtggcgcagtgatgaggattggaaacttgccgattacctgtcgtgcgacaatgtccgcgaagatgcactgaaacggcttttcatggctttggattcggtgttttcgcgctcgacaggcgtgcggagtgcggcggtctatgccttgatgccatctgaaaaccaggctttccaactgatatgcctgtcccgacagggcgaggttttggaaaacctgtgggatttggatgaagcggcaggcaaggtttcgctggcttgccgttcggcgcaaagcggttggatgaatgttgcctcggatgtacgccgttggttggatttgggggagctttcgggagaacgcaatcatgcttcggcggcgcaaatttccattccggtctgcacggaaagtggcggtgtgttgggcgtggttcatgtggaatttgaatgcgcagagtgtgcgggtacggcagcacaggtggaatgggtggctcttgccttggctttgtccgaacctttgaaactgctgttgggtatgtctgccggaaaagatgggagtgaagatgtctga

SEQ ID NO: 37581 - DNA, 558 bp, Neisseria meningitidis
atgaacatcattgataccgccattcctgacgtaaaactgcttgagccccaagtcttcggcgacgcgcgcggcttttttatggaaaccttccgcgacgagtggtttaaaacccaagtctgcgaacgcaccttcgtgcaggaaaaccactccaaatccggcaaaggcgtattgcgcggcctgcactatcaaaccgaaaacacacaaggcaaactcgtacgcgtggttgtcggcgaagtattcgacgtggccgtcgatatgcgcgaaggttcgccgactttcggcaaatgggcgggcgcaaccctgtccgcgcaaaaccaatgccagctttggatacccgaaggcttcgcgcacgggttttgcgttttgggcgacgcagcggaagtcgtgtacaaatgcacggactattacaagcctgaagccgaacaggttttaatatggaacgacccgacagtcggcataggctggccgcttcaaaccgcgccgctgctgtcgcccaaagaccttgccggcaaaacgtgggcgcaagccgaaaagctccgccttacactttcccgataa

SEQ ID NO: 37582 - DNA, 774 bp, Neisseria meningitidis
atgaaaccgaaaatccaaaggcacggagagattttaagccttgtccgccggcatcagtttatgtcggtggacgagcttgccgccgcattggacgttaccccgcagacgatacgccgcgacatccgcgaattggaggatgctggcagcctgaaacgccaccacggcggcgcatcctcgggcggaaacttgccggaggggctgcctgccagccgccaaattcaatgtcaaaacgaaaaaaacgccattgcccggctgattgcggaacatattcccgacgagtcatcgctgtttgtcagtatcggcacgacgatggaagccgtggcatcggagctggtgagacggcgcggcagcctgcggattattaccaacaatatccacgtcgcctccatcgtttcggcgcggacggattacacggtcatcatcacttccggagtcgtccgccctttggacggcggcattaccggcgtggcaaccgtcgattttatcaaccagttcaaagtcgattatgccgtgatgagtacgcacggcgtggaaagcgacggttcgcttttggacgacgactacaaagaagtcagcgtgatgcaggcgatgattgccaacgcgcgcgtccgcttcctcggcgtggaccacagtaaattccgcagcaacgcgctggtcaggctcggcgacattacggcgtttgacaaagtatttaccgaccggctgcccgataccgcgatgcagaagatgctgaaagaggcgggggtggaatgcctgattgccgatgccgtctga

SEQ ID NO: 37583 - DNA, 3909 bp, Neisseria meningitidis
atgaatgagggtgaagttgttttaacaccagaacaaatccaaaccttgtatggttatgctttccgtggcgatacctatggcggttggcgttatttggctaatttgggtgaccgttatgcggatgatgctgccgcaattgtcggtaaggatacaaacttaaatggtttgaatttatggatgaaaaaaggtgtggaaaacctatgggatgatacggtcggtaaaaagacccgtttagagaaatttgatcgggttgcactgcaacatttcagccaatatgtagatctaattaatgaaaataatggtagattacctaacactagtgaaattgagagaagttactataaagccgttaccgaaaatggtgtttcttctagtgcagctattgatttagttattaatcgttcacttccggatatggcggatggttattgggcattaggtttggggatagaagccgaacgtatccacaatgagcaagcagtaaataatccgaacggtagcgaatgggataatagaaagcagttaatatctgctttagataaaggatttgatggatcttttaaagagaagccttttacttttttacaatctgtgataatggatgtaacaaagttaggtgttgaatatacaatagatggttggcaaaaaattggaggttggggtaatgggataatcaatgatttatataaaagtgttgcaaaaagagagtggactggaatatttgagatcgttaataataacatcaagcaatttagagatctgttcccaaatccggaaggctggatcgatgatggtcaccaatgtttcgctccttgggttaaagaaactaaaaaacgcaatggcaaatatcatgtctacgaccccctcgccctagatctagacggcgacggtatagaaaccgttgccaccaaaggctttgcaggtgcattgttcgaccaccgcaatcaaggcatccgcaccgccaccggttgggtttctgccgatgacggtttactcgtccgcgatttgaacggcaacggcatcatcgacaacggtgcggaactcttcggcgacaacaccaaactggtagacggttcttttgccaaacacggctacgcggctttggccgaattggattcaaacggcgacaacatcatcaacgcggcagacgccgcattccaaaccctgcgtgtatggcaggatctcaatcaggacggcatttcccaagctaatgaattgcgtacccttgaagaattgggtatccaatctttggatctcgcctataaagatgtaaataaaaatctcggtaacggtaacactttggctcagcaaggcagctataccaaaacagacggtacaaccgcaaaaatgggggatttacttttagcagccgacaatctgcacagccgcttcaaagacaaagtggaactcactgccgaacaggcaaaagccgccaatcttgcgggcattggtcgtctgcgcgatttgcgcgaagctgccgcattgtccggcgatttggccaatatgctgaaagcttattctgccgccgaaactaaagaagcacagttggcattgttagataatttgattcacaaatgggcggaaaccgattcgaactggggcaaaaaatcgccaatgcgactttcaaccgattggacgcaaacggctaatgaaggtattgcactgacaccatcccaagtagcacaactaaaaaagaacgctttagtttccctttctgataaagctaaagcagctattgacgccgcccgcgaccgcattgccgtgcttgatgcctacacggggcaggattccagcacactctattacatgagcgaggaagatgcgcttaatatcgtcaaagtaaccaacgatacatacgaccatctcgccaaaaacatctaccaaaacctgttgttccaaacccgtttgcagccatatttgaatcaaatcagtttcaaaatggaaaatgatacgttcactttggattttagtggtcttgttcaagcatttaaccatgtcaaagaaactaatccgcaaaaagcttttgtggatttggccgagatgcttgcatatggcgaacttcgttcttggtatgaaggccgaagactaatggccgattatgtggaggaggcaaaaaaagcaggtaaatttgaagattaccagaaagtgttgggtcaggagaccgttgcattattagctaaaacatcgggtacgcaagcagatgatatcctgcaaaatgtaggctttggtcataataaaaatgtttctttatatggtaatgacggcaacgacactctgatcggcggtgccggtaatgattacttggagggcggcagcggttcggatacttatgtcttcggcaaaggcttcggtcaggatacggtctataattacgactacgctaccggacgcaaagacatcatccgctttaccgacggtattacagccgatatgctgacttttacccgagagggcaaccatcttcttatcaaggcaaaagacggcagtggacaagtgactgttcagtcctatttccagaacgatggctcaggtgcttaccgtatcgatgagattcatttcgataacggcaaagtactggatgttgccactgtcaaagaactggtacagcaatccaccgacggttcggacagattgtatgcctaccaatccggaagtaccttaaacggcggattgggcgatgactatctgtacggtgccgacggggatgacctgctgaatggtgatgcaggcaacgacagtatctacagtggcaatggcaatgatacgctcgatggaggagaaggcaacgacgccctgtacggctataatggtaacgatgtactgaatggtggcgaaggcaatgatcatttgaacggcgaagacggtaacgacactctaatcggcggtgcaggcaatgattacttggagggcggcagcggttcggatacttatgtcttcggcgaaggcttcggtcaggatacggtctataattacgactacgctaccggacgcaaagacatcatccgctttaccgacggtattacagccgatatgctgacttttacccgagagggcaaccatcttcttatcaaggcaaaagacgacagtggacaagtgactgttcagtcctatttccagaacgatggctcaggtgcttaccgtatcgacgagattcatttcgataacggcaaagtactggatgtcgccactgtcaaaaaactggtacagcaatccaccgacggttcggacagattgtatgcctaccaatccggaaataccttaaatggcggattgggcgatgactatctgtacggtgccgacggggatgacctgctgaatggtgatgcaggcaacgacagtatctacagtggcaatggcaatgatacgctcgatggaggagaaggcaacgacgccctgtacggctataatggtaacgatgtactgaatggtggcgaaggcaatgatcatttgaacggcgaagacggtaacgacactctgatcggcggtgccggcaatgattacttggagggcggcagcggttcggatacttatgtcttcggcgaaggcttcggtcaggatacggtctataattaccatgtggataaaaactctgacactatgcactttaaaggatttaaagcagcagatgttcattttatccgttccggaagtgatttggtgcttagcgcttctgaacaagacaacgtacgtatttccggattcttctatggtgaaaaccatcgtgtagatacatttgtctttgatgatgcagctatcagtaatccagattttgccaagtatattaatgctggcaataatttggtacagtctatgtctgtgttcggttctaatactgctgcgacaggaggaaatgtggatgccaatacacaatccgtacagcagccgttattggtaacgccatctgcataa

SEQ ID NO: 37584 - DNA, 495 bp, Neisseria meningitidis
atgaaaaagaacatattggaattttgggtcggactgttcgtcctgattggcgcggcggcggtcggctttctcgctttccgcgtggcgggcggtgcggcgttcggcggttcggacaaaacttacgccgtttatgccgatttcggcgacatcggcggtttgaaggtcaatgcccccgtcaaatccgcaggcgtattggtcgggcgcgtcggcgctatcggacttgacccgaaatcctatcaggcgagggtgcgcctcgatttggacggcaagtatcagttcagcagcgacgtttccgcgcaaatcctgacttcgggacttttgggcgagcagtacatcgggctgcagcagggcggcgacacggaaaaccttgctgccggcgacaccatctccgtaaccagttctgcaatggttctggaaaaccttatcggcaaattcatgacgagttttgccgagaaaaatgccgacggcggcaatgcggaaaaagccgccgaataa

SEQ ID NO: 37585 - DNA, 2106 bp, Neisseria meningitidis
atggctcgtaagaccccgatcagcctgtaccgtaacatcggtatttccgcccatatcgatgcgggtaaaaccacgacgacagaacgtattttgttctatactggtttgacccacaagctgggcgaagtgcatgacggtgcggctactaccgactacatggaacaagagcaagagcgcggtattaccattacctccgctgccgttacttcctactggtccggtatggcgaaacaattccccgagcaccgcttcaacatcatcgacaccccgggacacgttgactttaccgtagaggtagagcgttctatgcgtgtattggacggcgcggtaatggtttactgcgcggtgggcggtgttcaaccccaatctgaaaccgtatggcggcaagccaacaaataccaagtgccgcgcttggcgtttgtcaataaaatggaccgtcagggtgccaacttcttccgcgttgtcgagcaaatgaaaacccgtttgcgcgcaaaccctgtacctatcgtcattccggttggtgcggaagacaacttcagcggtgtggttgatttgttgaaaatgaaatccatcatttggaatgaagccgataaaggtacaacctttacctatggcgatattcctgccgaattggtcgaaactgccgaagaatggcgtcaaaatatgattgaagccgcagccgaagccagcgaagaactgatggacaaatacttaggcggcgacgagctgaccgaagaagaaatcgtaggcgcgttgcgtcaacgtactttggcaggcgaaattcagcctatgctgtgtggttctgcatttaaaaacaaaggtgttcaacgtatgttggacgcagttgtagaattgctgccagctcctaccgatattcctccggttcaaggtgtcaacccgaataccgaggaagccgacagccgtcaagccagcgatgaagagaaattctctgcattggcgttcaaaatgttgaacgacaaatacgtcggtcagctgacctttatccgcgtttactcaggcgtagtaaaatccggcgataccgtattgaactccgtaaaaggcactcgcgaacgtatcggtcgtttggtacaaatgactgccgcagaccgtactgaaatcgaagaagtacgcgccggcgacatcgcagccgctattggtctgaaagacgttactaccggtgaaaccttgtgtgcggaaagcgcgccgattatcttggaacgtatggaattccccgagccggtaatccatattgccgttgagccgaaaaccaaagccgaccaagagaaaatgggtatcgccctgaaccgcttggctaaagaagacccttctttccgtgtccgtacagacgaagaatccggtcaaaccattatttccggtatgggtgagctgcacttggaaattattgttgaccgtatgaaacgcgaattcggtgtggaagcaaatatcggtgcacctcaagtggcttaccgtgaaactatccgcaaagccgttaaagctgaatacaaacacgcgaaacaatccggtggtaaaggtcaatatggtcacgttgtgattgaaatggaacctatggaaccggggggcgaaggttacgagtttatcgatgaaattaaaggtggcgtgattcctcgcgaattcattccgtctgtcgataaaggtatccgcgatacattgcctaacggtatcgttgccggctatcctgtagttgatgtgcgtatccgtctggtattcggttcttaccatgatgtcgactcttcccaattggcatttgaattggccgcttctcaagcgtttaaagaaggtatgcgtcaagcatctcctgccctgcttgagccgattatggcagttgaagtggaaactccggaagaatacatgggcgacgtaatgggcgacttgaaccgccgtcgcggtgttgtattgggtatggatgatgacggtatcggcggtaaaaaagtccgtgccgaagtacctctggcagaaatgttcggttattcgaccgacctgcgttctgcaacccaaggccgcgctacttactctatggagttcaagaaatattctgaagctcctgcccacatagctgctgctgtaactgaagcccgtaaaggctaa

SEQ ID NO: 37586 - DNA, 645 bp, Neisseria meningitidis
gtgcttgcctccgccatcgacttcatcctccatatcgaccaacacctgctcgcgctgtcggcgcaatacggtgtgtggatttatgcgattctgtttttgattgttttttgcgaaaccggcctgattgttacgcccttactgcccggcgattcgctgctgtttgccgccggcgggattgccgcgctgggcggtatggatattcatttgatggttgcattattaagccttgccgccatactcggcgacgcgctcaattttaccgtcggcaaatatttcggcggcaggctgttcgccaaccccgattctaaaatcttccgacgtgaatatctcgataaaacccaccgtttttacgaaaaacacggcggcaaaaccatcatcattgcccgttttatgcccatcgtccgcaccttcgcccccttcgtcgccggtatggggaaaatgcactatgccaaatttatccgctacaacatcatcggtggcttgttgtgggttatcctgttttcttacgcgggctatttctttgccaacttccccgtcgtaaaaaacaatctgggcttggtgatgggcggcatcattattgtttccgtcctgccgggtgcagttgaaattgcccgcgccaaacttgcggtaaaatccaaacggtaa

SEQ ID NO: 37587 - DNA, 1137 bp, Neisseria meningitidis
atggaaatgaaacaaaccgattcaaccatcaaatctcgtgcggcggtggcattcgcccctaaccaacccttacaaattgtggaaatcgacgtagaaatgccgcgtaaaggcgaggtgttaatccgcaatacccacactggcgtgtgccatactgatgcgtttacgttatcaggaagcgatcctgaaggcgtattccctgtggtgcttggacacgaaggtgcgggtgtggtcgttgctgtgggcgaaggtgtgtcaagcgtaaaaccgggtgatcacgtgattccgctttacaccgccgaatgtggcgaatgtgagttttgttgttcaggtaaaaccaacttgtgcgtctcagtgcgtgatacacaaggtaaaggcttaatgccggacggcacgacgcgtttttcttatcaaggtcagccgatttatcactatatgggctgttcgactttcagtgaatactccgttgttgccgaagtttcactggcgaaaatcaaccctgaagccaaccatgaacaagtatgtttgctcggctgcggcgttaccacaggtattggcgcggtgcataatacggcaaaagtgcaagaaggcgactctgttgccgtgtttggcttgggagcgattggtttggctgtggtgcaaggtgcgcgccaagccaaagcaggccgcatcatcgccattgataccaatcccgcaaaatttgagttggcaaaacagtttggtgcaacggattgtttgaacccgaacgattacgataaaccaattaaagatgtgttgttagacatcaacaaatggggcattgaccatacctttgaatgtatcggcaatgtaaacgtaatgcgtcaagcattagaaagtgcacatcgtggttggggtcaatccattatcatcggcgtagcaggtgcaggacaagaaatttcaacgcgtccgttccagttggtaacaggtcgtgtttggaaaggttcagcatttggcggtgtgaaaggccgctccgagcttccgaaaatggtggaagattcaatgaaaggcgacattgagttagaaccgtttgtaacccacacaatgacactcgatcaaatcaataaagcctttgagttaatgcacgaaggtaaatcgatccgcgccgttattcactactaa

SEQ ID NO: 37588 - DNA, 432 bp, Neisseria meningitidis
atgaaccaactcgaccaacttggcacccgtatcaacctgatttgcaatgtcttcgacaaatggatcgggcagcaggatctgaattacaacctctttgccgtactttataccctggcaaccgaaggcagccgcacgcaaaagcatatcggcgaagagtggagtttgcccaaacagaccgtttcaggcgtatgcaaaacccttgccggacaagggttgattgaatggcaggaaagcgaacaggaccggcgcgaacggttgctgtcgctgaccgaaaaaggcaaagcccatgccgcacctttaacagaaagcgcgcaggaattcagcgacaaagtatttgccacattcggcgacaagcgcacaacccggctgtttgccgatttggatgcactggctgaagtgatggaaaaaacaatctcggaaaataaaaaatag

SEQ ID NO: 37589 - DNA, 2313 bp, Neisseria meningitidis
gtgttgggacattgttcttcctttgctgtgtcaagttttcggattctactcgaattatcggcgcgtttgagaaattttgaccatacgggcgttcagacggcatcccgcaaccttgactgccgtctgaacatcaaagcaggaatcaaacttatgcaacaaaaaatccgtttccaaatcgaaggcatgacttgtcagtcctgtgcttcgcgtattgaaaaagtgttgaacaaaaaagattttgtcgaatcggcaggggtgaactttgccagcgaggaggcgcaggttacgtttgacgacagcaaaacttccgctgccgacattgccaaaatcattgagaaaaccggttacggtgcgaaggaaaagacggaagatacattgccgcaacctgaagcggaacaccatatcggctggaggctgtggcttttgctggccatcaacatcccgttcttaatcggcatggcaggcatgatgattgggcggcacgattggatgattccgccgttgtggcagtttgcattggcaagcattgtgcagctttggctggccatcccgttttacaaaagcgcgtgggcgagcattaagggcggactggcgaatatggacgtgctcgttaccatcggtacggtgtcgatttacctgtattccgtctatatgctgtttttcagcccgcacgcggcgcacggtatggcgcatgtgtattttgaagtgggcgtaatggtgattggttttgtgtcactgggtaaatttttggaacaccgcaccaaaaaatccagcctgaacagcttgggtttgctgctcaaactcacgccgacccaagtcaatgtacaacgcaacggcgaatggaaacagcttcccatcgaccaagtgcaaatcggcgatctaatccgcgccaaccacggtgaacgcattgccgccgacggcatcattgaaagcggcagcggctgggcggacgagagccacctcaccggcgaatccaatcccgaagagaaaaaggcaggaggcaaagtgttggcgggcgcgctgatgaccgaaggcagcgtggtgtaccgcgccacgcagctcggcagccaaaccctgcttggcgacatgatgaacgcgctatccgaagcgcaaggcagtaaagcaccgattgcgcgcgtagccgataaagcggcggcggtgtttgtgccaactgttgtgggcattgcgcttttgacttttatcaccacttggctggtgaaaggcgattggacggttgcgctgatgcatgccgttgccgttttggtgattgcctgcccatgtgcgctcggtctggcgacccctgccgcgattatggtcggcatgggtaaagcagtgaaacacggcatttggtttaaagacgcggcggcaatggaagaagccgcccacgtcgatgccgtcgtgttggacaaaaccggcacgctgaccgaaggcaggccgcaggttgccgccgtctattgcgttcccgacagcggctttgacgaagacgctttgtaccgcatcgccgccgccgtcgaacaaaacgccgctcatccgcttgcccgcgccatcgtttccgccgcccaagcgcgcggcttggggattcccgccgcacaaaacgcgcaaaccgttgtcggcgcaggcattgccgccgaagtggaaagcgtggggttggtgaaagcgggcaaagccgaatttgccgaactgaccttgccgaagttttcagacggcgtttgggacattgcaagcattgttgcagtctcggtcgataacaaacccatcggcgcattcgcacttgccgacgcgttgaaagccgataccgccgaagccataggccgtctgaaaaaacacaatatcgatgtctatattatgagcggcgacaaccaaggcacggtcgaatacgtcgccaaacaactgggcatcgcacacgccttcggtaatatgagtccgcgcgacaaagccgccgaagtgcaaaaactcaaagccgccggcaaaaccgtggcgatggtcggcgacggcatcaacgacgcgcccgcgctcgccgccgccaatgttagcttcgcgatgaaaggcggggcggacgttgccgaacacaccgcgtccgccacgctgatgcagcattcggttaatcagctcgccgatgccctgctggtgtcgcaagccactttgaaaaacatcaagcaaaacctgtttttcgctttcttctacaatatcttgggcattccgctcgccgcgcttggctttttaaatcccatcatcgcaggcgcggccatggcggcaagctcggtttccgtgttgggcaatgccttgcgcctgaaacgggtgaaaatcgattag

SEQ ID NO: 37590 - DNA, 2838 bp, Neisseria meningitidis
atgttagacaaatactcccccgccgaaatcgaatccaaacattatcaaaactgggaagagcagggctatttccaacctgatatggatttgaccaaaccgtctttttccatccaactgccgccgcccaatgtaaccggcacgctgcacatgggtcatgccttcaaccaaaccattatggacggcctgacccgctactaccgcatgaaaggctgcaacaccgcctggattcccggcaccgaccacgcgggcatcgccacgcaaatcgtggtcgagcgtcagcttgccgcgcaaaacgtgtcccgtcatgacttgggtcgtgaaaaattcttggaaaaagtgtgggaatggaaagaagtttccggcggcacgattacgcagcagatgcgccgtgtgggctgttctgccgactggacgcgcgagtatttcacaatggacgatgtacgcgccgaaaccgtaaccgaagtgttcgtacgcctgtatgaacagggcttgatttatcgcggcaaacgcttggtgaactgggatccggtattgggtaccgcagtgtctgatttggaagtggaaagcgtggaagaacaaggctctatgtggcacatccgctatccgctggcggacaatcctgccgaagccgtcatcgtcgccaccacccgtcccgaaacgctgttgggcgacgttgccgttgccgtcaatcccgaagacgaacgttatacccacttaatcggcaaagaattaatcctgccgctgaccggccgcaccattcccgtgattgccgacgaatacgttgaaaaagacttcggcaccggctgcgtgaaaatcacgcctgcgcacgacttcaacgactacgaagtcggcaaacgccacgatacgcgcttggttaatgtgttcgacttggaagccaaagtattggcaaacgccgaagtgttcaacttcaaaggcgaagcgcaaccaagctttgccctgcctgaaaaatacgcaggcttggaccgctttgccgcgcgcaaacaaatggttgccgatttgcaggaacaaggtttcttggtcgaaatcaaagcgcacacgctgatgacgccgaaaggcgaccgtaccggttccgtgattgagccgatgctgaccagccaatggtttgtcgccatgtccgccacgccaaacggcggcgagcctgacagcgaattcaaaggcttaagccttgctgacaaagccaaaaaagccgtcgacagcggcgcggtgcgctttatccccgaaaactgggtcaacacctacaaccaatggatgaacaacatccaagactggtgcatctcgcgccaactgtggtgggggcatcaaatccctgcatggtacgacaacgaaggcaatgtgtacgttgcccgcaatcaggaagaagccgaaaaacaagccggcaaaacaggcttgacccgagaagaagacgtattggacacatggttctcctccgcactcgtgccgttctccacgctcggctggccgtctgaaaccgacgaactcaaagccttcctgccgtccaacgtcttggttaccggctacgaaatcatcttcttctgggtggcgcgcatgattatgatgaccacccactttaccggcaaagtaccgtttaaagacgtgtacatccacggcatcgtgcgcgaccacgaaggcaaaaaaatgtccaaatccgaaggcaacgtcattgaccctgtggatttgatcgacggcatcgacttggaaaaactgctggtgaaacgtaccaccggtctgcgcaaacccgaaaccgcgccgaaagtggaagaagcctcgagaaaactcttccccgaaggcattccgagtatgggcgcggacgctttgcgcttcaccatggcgagctacgccagcttggggcgcagcgtgaacttcgacttcaaacgcgccgaaggctaccgcaacttctgcaacaaaatctggaacgccaccaacttcgtcttgatgaacaccgaaaaccaagactgcggctacggcgcaaccgccactgagccgcgcggctattccttccccgatatgtggattgtagaccgtctgaatcagaccatcgagcaagtaacgcaagcctacgaaacctaccgctttgatttggcggcggaaaccctgtacagcttcgtgtggaacgactattgcgactggtatttggaacttgccaaagtgcagcttcaaaccggctgcgccagccgccaacgcgccacacgccataccttattgcgcgtactcgaagccgccctgcgcctgctgcacccgattatcccgttcatcaccgaagaactgtggcaaaccgtcgcccctatgtgcgacgcgaaaaccgccgacagcatcatgctcgcccgcttccccgaagccgacggcggcgagattgttcagacggcattcgggcaaatgaccgtgttgcaggatttgatcggcgcagtccgcaacctgcgcggcgaaatgggcatccagcccaacgtgaaagccccgctgtttgtcgaaagcacggacgacttggcggactacctcaaatacctgccgatgatgacccgcctgaccgaagcacagcaagtcgccgccctacccgaaagcgaagacgcgcccgtcgccgtctgcaacggcgcgcgcctgatgttgaaagtcgaaatcgacaaagccgccgaaaccgcccgtttgagcaaagaagccgagaagctgcaaaaagccttggacaaactcaacgccaaactctccaaacccggctacaccgaaaaagcccctgcgcatctggtggaaaaagacaaagccgatttggcggaattggaagacaaaatggcaaaagttcaaaatcagttggcgaagttgaaagactga

SEQ ID NO: 37591 - DNA, 723 bp, Neisseria meningitidis
atggacaaagatttgtatgccgtattgggcgtgtcgccgcaggcgggtgcgaacgaaatcaaacgcgcctaccgcaagctggcgatgaaataccatcccgaccgcaatccgggcaatccgcaggcggaagaaaagttcaaagaaatccaacgggcttacgatacgctttccgacctgtcgaaacggatgcaatacgacgcgtccttcagacggcatgaggaacgcgggcggcaggaagaggcattccgccgcgaacaggcgcgcagggagcagttttaccgcgaacagatgcgccgcgaacaggcgttcagacaggcgtttgaacggcaggcctcacgttcgcgccatgcttacgaaccgtccggcggcggaagcgggcgcaactatgtcctcgccgcctacatcctgttcggtttgggtgcaatcatgctgttcatgcccatagttggcgtgattttcgcctatatgcccatagtcggcgtgattctcgcctatatgaaacggaacagtttggacagcattgtctatgccacacataccgaatacctgattaaaaccttttggcgcacattttggctttatcttttgggcgcgctgactgcccttttgggtatcggcgtgctgattattattgcaacgaacgtctggtatttctaccgcatcatcgtcggctttatccgcttcaacagcggcagggcggttgcacccgagaaatggatatag

SEQ ID NO: 37592 - DNA, 1056 bp, Neisseria meningitidis
atgacacaccattaccccacagacgatattaagattaaagaagttaaagagttgttgccgccgattgcccatctttacgagctgccgatttccaaagaggcttcgggcttggttcaccgcacccgtcaggaaatttccgatttggttcacggcagggacaagcggctgttggttattatcggaccgtgttcgattcacgatccgaaagcggcattggaatatgcggagcgtttgttgaaactccgcaagcagtatgaaaacgagcttttgattgtgatgcgcgtttatttcgagaagccgagaacgacggtgggttggaaaggtttgattaacgacccgcatttggacggtacgtttgacatcaatttcggtttgcgtcaggcgcgcagcctgttgttgtcgttgaacaatatgggtatgcctgcctctaccgagtttttggatatgattacgccgcaatattatgcggacttgatttcttggggggcaatcggcgcgcggacgaccgaaagccaagttcaccgcgaattggcaagcgggctgtcctgccccgtcggctttaaaaacggtacggacggcaatttgaagattgccatcgacgcaatcggtgcggcgagccattcgcatcatttcctgtctgtaaccaaggccgggcattccgccattgtccataccggcggcaatcccgactgtcatgtcattttgcgcggtggaaaagagccgaattatgatgcgggacacgtcagcgaggcggcggaacaactgcgtgcggcaggggtaaccgacaagctgatgatcgattgcagccacgccaacagccgcaaggattacacccggcagatggaagtggcacaagatattgctgcccaattggaacaggacgggagcaatatcatgggcgtgatggtggaaagccatttggtcgaaggcaggcaggacaagccggaagtgtacggcaagagcattaccgatgcgtgtatcggttggggcgcgactgaagaactgttggcattgttggcaggtgcaaacaaaaaacgtatggcgcgcgccggttga

SEQ ID NO: 37593 - DNA, 1296 bp, Neisseria meningitidis
atgagcgtcatccaagacctgcaatcgcgcgaccttatcgcgcaaacgaccgacatcgaagccttagacgctttgttgaacgaacaaaaaatcgccctttactgcggtttcgatccgaccgccgacagcctgcacatcggacacctgttgcccgtattggcattgcgccgcttccaacaggcggggcatacgccgattgctttggtgggcggcgcgaccggtatgatcggcgaccccagcttcaaagccgccgaacgcagcttgaattccgccgaaactgttgccggctgggtggaaagtatccgcaaccaattaacccctttcttgagctttgaaggcggaaatgccgccattatggcgaacaacgccgactggttcggcaaaatgaactgcctcgacttcctgcgcgacatcggcaagcatttctccgtcaacgccatgctgaacaaagaatccgtcaaacagcgcattgaccgcgacggcgcaggcatttccttcaccgagttcgcctactccctgctgcaaggctacgacttcgccgagttgaacaaacgctacggcgcggttttggaaatcggcggctccgaccaatggggcaacatcaccgccggtatcgacctgacccgccgcctgaatcaaaaacaagtgttcggcctgaccctgcctttggttaccaaatcagacggcaccaaattcggcaaaaccgaaggcggcgcagtatggctgaacgcgaaaaaaacctcgccctatcagttctaccaattctggctgaaagtcgccgatgccgatgtgtataaattcctgaaatactttaccttcctgtccatcgaagaaatcgatgccgtcgaagccaaagaccaggcaagcggcagcaagcccgaagcgcaacgcatcctcgccgaagaaatgacccgcctgattcacggcgaagaagcccttgccgccgcgcagcgcatttccgaaagcctgtttgccgaagaccaaagcagcctgaccgaaagcgacttcgagcagctcgccctcgacggcctgcctgcatttgaagtttcagacggcatcaatgtcgtcgaagccttggtaaaaacaggtttggcatcctccaacaaagaagcgcgcggctttgtgaacagcaaagcggttttgctcaacggcaaacctgccgaagccaacaaccccaaccacgccgccgaacgccccgacgatgcctgcctgctgaccgacgaacacaaacgtttcggcaaatacaccatccttcggcgcggcaaacgcaaccacgcgcttttggtttggaaataa

SEQ ID NO: 37594 - DNA, 165 bp, Neisseria meningitidis
atgggacaggttgagttttacgaaaagatgattgggctgtggtcggccaaaagccgtgaggcaagtgaacaggcagacttggcggcgtttgaatttgcggagggcgaactggccaattatcaggaaatgctgaaacggcacctgcaaaccaaaagtgtggaatag

SEQ ID NO: 37595 - DNA, 420 bp, Neisseria meningitidis
atgtacgctttttattgccatatcaacaaaatggcttatctggcgaatacagcgaagcatattgtaggtgtaggtattaaagacgcatatcgagccattcaaactgatgcacagttggccaaccgttttgaacctgcggtgcttcctcgttgggaattaaataaggattttatgcgtttattgatgagctttgaacggatgctgccgcttagtcagccgtcggatttacatgaaatttcgttggctacaaagttatatggcatgagtgaaggatatattggagagctttctcgtttgctgacacaagctgctgtagccgccattcaacaacaaactgaatgtattaacgaaacaatcttaaattcaatcaactggattagtccaagccaacgtaaacgtcaattggataaactcagatga

SEQ ID NO: 37596 - DNA, 543 bp, Neisseria meningitidis
atgattaatcatattgaaaaatatataggcactatttctcatggctcgaaaagcgattcgggaagtcagtacaaattaaatatcgcagctattccctcttcccctaacagggatttaaaaacttatattactttagagttaagcaaacatgatctgaattataaaagcagatttgaaatactttttgtatgttctttaaaatatgatgaaaatcagattttcccatttttaagatggctggcagaaaccatcattgagaataaaaaaatccttcttcgaggacaggttatttatttgcctagaagcattgttgattcaacaaaaatggatgcactgtatgtttccgccccattttatttcgacgatgattttcaggtctgttatggcgaacactacaatatcgttttccctttgcttgtccccttgtataaacaggaagccgaattggtggaaaaaaagggttggaatgcttttgagcagttcttgctggataatgaagttgacaacctttcggatatgaatcggaaaccgtttgtttggtaa

SEQ ID NO: 37597 - DNA, 267 bp, Neisseria meningitidis
atgcaagttttgaagaaagttgattggaagatgtttgtggcgcgctctttttggcgttgggtgccggttggtttgacggtgggcgtgtggtgttttgtggcgggaatggcgttgcattcctgcgcgaaagaacctgaaccggttgcgaaagagctgacgaaggtcgagaagatggaaagacaggcggatttggaggtcaaggtatgggaagcgcaatacgagtcaatgagcgtcgaggaaaaaatgaaagggattgtttatgagtga

SEQ ID NO: 37598 - DNA, 1272 bp, Neisseria meningitidis
atgaaactgctggttatcggtaatggcggtcgcgaacacgcgctggcttggaaattggcgcagtcgcctaaagtggaaacagtatttgttgcgcctggtaatgccggtacagcgattgaacccaagttgcaaaacatcgacttgactgcgcatcaggatttgattgaattcagtcgtaaagaaaatattgtttttaccgtcgtcggccctgaagcgcctttggcggcaggtgttgtggatgatttccgtgccgcaggactaaaaatattcggtccgacacaatatgcggcgcagttggaaagttccaaagatttcgccaaagcatttatggcgaaatacaacattccgaccgcgcaatatcaaacctttgaaaacgccgatgccgcacatgattacgtcaatcagaaaggtgcgcctatcgttatcaaagccgatggtttggcggcaggtaaaggcgtgattgtggcgatgactttggatgaagcgcatgctgcgattgatgatatgctgctggacaacaaaatgggcaatgccggcgcgcgtgttgtgattgaagatttcctgcaaggcgaagaagcgagttttatcgtcatggttgatggcaataatgtactgcctatggcaaccagccaagaccacaagcgtcttttagacggcgacaaaggtctgaatacgggcggtatgggtgcgtacagccctgcgcctgtggtaacgcctgttgtgtacgagcgcgcgatgaatgaaattattttgccgaccgtagcagggatgaaagcggaggggcatgagttcaccggtttcctgtacgcaggtttgatgattgatcaaagcggtgcaccctatacgattgagtttaactgccgtttcggcgatcctgaaacccagccgattatgagccgactgaacagcgacttatcggatttggttgaagcggcaatagacggcagactcgatagcgtaaccgcggaatggagcccgcaaactgccgtgggcgtggtactggcggcgcaaaattaccccgaaacgcccaaaaaaggcgatgttatttccggtctggatgctgccaaccaagtaggcaaagttttccatgcaggtacaacggcaaacgagaaaggtgacgtattgaccaacggcggacgcgtattgtgtgttgtgggattgggcgacaatgtggcgcaagcgaaagctaaggcatatggcgcgttggaaaaaatcagtttcgacgggatgcaataccgtaaagacattgccgataaagcgattaaccgttaa

SEQ ID NO: 37599 - DNA, 207 bp, Neisseria meningitidis
atggcacgtattaccaccgaagactgtaccggaaaaatttccaaccattttgacctgacattggtagcggcccgccgcgcccgccagcttgagaacggcaacacgccgcttgtggacgatgcccgcaataacaaaccgaccgttaccgccttaagggaaatcgccgccgggcatatcggtacggaactgttgacgcgcaataaataa

SEQ ID NO: 37600 - DNA, 462 bp, Neisseria meningitidis
atgaatattattatggactcaacaagaaaatttgggattttatgggaagaaaactctgaatgtaatggttttatttatggaaaaattcagataataataggagagaatatatatcctaagatatgcccatatggatattttacgctaaatacagtttttaatagtttgaagtcatcctttgaagagaagtattatgcaggtggaaacaatggtttagattttggagagcaactatttgatatagataaatataattctctggaattatgcaatatattttctattgatactacatatatgagtggagggggtaattgtgaaatagattgtttagtattagaaatgggatattctggtgaggaagagagacttttttatagttttgacaatgggaaaaactttaaagaaatcaggtataagaaaggtacagttgaatctgttatttttcaattgaatctataa

SEQ ID NO: 37601 - DNA, 780 bp, Neisseria meningitidis
atgaaactggtaaggcctcagaaaatcagcgatcaggtattgtcggtattggaggagcgcattgcggaaggggtttacgcggaagggggcaagattccgcccgaacgcgttttggcggaagagttcggcgtttcgcgcccgtcggtcaggtcggcattgaatgttttggtcgcccgtcaggttttggaagcgaggcagggagacggttattatgtttcggtcaagccgcagcaggattttttgcaaagttggcaggagcttttgggcaagcattccaattgggaacaggatgtttttgatttcagttgccacatcgagggctgtatggcggcattggcggcagaacgccgcacggatgccgatttgaagcggattgggttttggcttgaaaagtttgaggaggcgtgcgaaagcggcaatttggaacatcagagcgaagctgatgtcagctttcatcagacgattgccgatgcggcgcacaatttgttgttcagccatttgtcgggcggtttgttgaaaatgctgtaccggcagacgcgcagcagccttatttatctgaatcaggaagaagatccgcgtccgaagctgatggcgcagcaccgtgtattgtatgaggcaatatcgaaccgtcggccgggcgaggcttcggaggcggcaaaggcacatttgaattatgtggcaagcagcatcatgaaagacagggaatatcagagccgtaaccgccacgcggatactttggcgcaaaacgatttgaagcgcgtgcaggattgggaggtatga

SEQ ID NO: 37602 - DNA, 588 bp, Neisseria meningitidis
atgccgctacccgacctgaccgatgccgaattaatagagtcgcgtaaactgcttctgcattttgcgcggcttcagttgcccgaccaccctgatttggctgaagatttagtgcaggaaacattgctgtccgcatacagcgcaggcgacagttttcaaggcagggcacttgtcaacagctggctttttgccatattgaaaaacaaaattattgacgcattacgtcaaatcggaaggcagaggaaagtctttaccgcactggatgacgagctactggatgaagcatttgaaagccatttttcccaaaacgggcattggacgccggaagggcagccgcaacattggaacactccggaaaaatcattaaacaacaacgaattccaaaaaattctgcaaagctgcctatacaacctgcctgaaaacaccgcacgggtatttaccctgaaggaaatactcggtttttcatccgacgaaatacaacaaatgtgcggtatcagcacgtccaactaccacaccattatgcaccgcgcccgagaatcattgcgccaatgcctgcaaatcaaatggttcaaccaagaaaacccgaagtaa

SEQ ID NO: 37603 - DNA, 1611 bp, Neisseria meningitidis
atgccgtctgaaatgctgtccattatttatcagacgacattttaccctccctctttatggcctcttgccgtgaagaacctatttaccgtgtccaacggacacctgctcgtgttcagttctcccgaacggcacttgacacagaaagacccaataatgaaacccaccatcgcgcttgtcggccgccctaacgtcggcaaatctactttattcaaccgtttgacgcgcaccaaagacgcactcgtacacgacctgcccggcctgacccgcgaccgccattacggacacggcaaagtcggcagcaaaccttatttggtcatcgataccggaggtttcgagccggttgtggacagcggcattttgcacgaaatggcaaaacaaaccttgcaggctgtcgatgaagctgatgcggttgtgtttttggtggacggccgtaccggcctgaccccgcaagacaaaatcattgccgaccgcctgcgccaaagcccgcgccctgtttatctggcggtaaacaaaggcgaaggcggcaacagggccgtgcttgccgccgagttctacgaacttgctttgggcgacccttatgttatttcaggtgcgcacggcgatggcgtgtattatctgattgaagatattttggaaaccttcccagagccggaagccgaagaagccgatgcaaaacatcccgtctttgccgtcatcggccgtccgaacgtcggcaaatccacactggttaacgccatcctcggcgaagagcgcgtgattgctttcgatatggcaggcacgacacgcgacagcatccacatcgatttcgaacgcgaaggcaaaccgtttaccatcatcgataccgcaggcgtgcgccgtcgcggcaaagtggatgaagcagtagaaaaattctccgttatcaaagcgatgcaggcggttgaagcggcaaacgtcgctgttttggtattggacgcgcagcaggacatcgccgaccaagatgcgacgattgcaggtttcgctttggaggcaggccgtgctttggtggtggcggtcaataaatgggacggcatcagcgaagaacgtcgcgagcaagtgaaacgcgatatcaaccgcaaactgtatttccttgattttgctaaattccactttatttccgcgttgaaagaacgcggcatagacggattgttcgacagcattcaggctgcctacaacgcggcaatgattaagatgccgacgccgaaaatcacgcgcgtactgcaaagcgcgatcgaacgtcagcaaccgccgcgtgccggcttggtgcgtccgaaaatgcgttatgcccaccaaggcggcatgaatccgccggtgattgtggtacacggcaattcgctgcacgcgatttccgacagctatacgcgctacctgacccaaacgttccgcaaagccttcaatctgcaaggtacgccgttgcggattcaatacaatgtttcggaaaacccgtatgaaaatgcggaagacaaaccgaagaaaaaaccgctgcgccgcgtcagcctgagcaaccgtattgagaaacgcgaaggccgcaaagaagagaaaaaccgcttcaagaagaaaaccaaagtcagtgtgaaaaaacaattcagcaaataa

SEQ ID NO: 37604 - DNA, 780 bp, Neisseria meningitidis
atgaaagaacacaaagcccgcaagcgtttcgggcagaattttttgcaggacacgcggattatcagcgatattgtcaacgccgtgcgcccgcaggcggatgatgtcgtgattgaaatcggcccgggtttggcggcgattaccgaacctttggcgaaaaagctgaaccgcctgcacgttgtcgaaatcgaccgcgacatcgtatgccgtctgaaaacgctgccgtttgcggataaactggtgattcacgaaggcgatgtattgcagtttgatttcaacggcatcgcaggcaaaaagaaaatcgtcggcaacctgccctacaacatttccacgccgcttttgttcaagctggcggaggtggcggacgatgtcgtcgatatgcactttatgctgcaaaaagaagtggtcgatcgtatggttgccgcgccgaaaagcaacgactacggccgcttgggcgtgatgttgcaatatttcttcgatatggagctgctgattgacgtgccgcccgaatcgttcgaccccgcgccgaaagtggattccgccgtcgtccgtatgattccggtgaaacaccgcatcggcaaggcggacgatttcgagcatttcgccaaactggtgaaactcgccttccaccagcggcgcaaaaccatacgcaacaacctgaaagagcttgcaggcgacgatgatttgcaggcagtcgacatcaatccgcaagaccgtgccgaacatatcgcgccggagaaatatgtggcgttgagcaattatctagcgggcaaggccgtctga

SEQ ID NO: 37605 - DNA, 711 bp, Neisseria meningitidis
atgtttgccgtccgccccgcccttgccgacgagttgaccaacctgctcagcagccgcgagcagattctcagacagtttgccgaagacgaacagcccgttttacccatcaaccgagcccccgcccggcgggcgggcaatgccgacgaactcatcggcagcgcgatggggcttaacgaacagcccgttttacccgtcaaccgagtccccgcccggcgggcgggcaatgccgacgaactcatcggcaacgcgatggggcttaacgaacagcccgttttacccgtcaaccgagcccccgcccggcgggcgggcaatgccgacgaactcatcggcaacgcgatgggacttttgggtattgcctaccgctacggcggcacatcggtttctaccggttttgactgcagcggcttcatgcagcacatcttcaaacgcgccatgggcatcaacctgccgcgcacgtcggcagaacaggcacggatgggtacgccggttgcccgaagcgaattgcagcccggagatatggtgtttttccgcacgctcggcggcagccgcatttcccatgtcggactttatatcggcaacaaccgcttcatccacgcgccgcgcacggggaaaaatatcgaaatcaccagcctgagccacaaatattggagcggcaaatacgcgttcgcccgccgggtcaagaaaaacgacccgtcccgctttctgaactga

SEQ ID NO: 37606 - DNA, 750 bp, Neisseria meningitidis
atgcttatccaggcagttaccattttccccgaaatgttcgacagcattacccgctacggcgtaacgggacgcgcgaacagacagggaatctggcagtttgaagcagtcaatccccgaaagtttgccgacaacagattgggctacatcgacgaccgcccgttcggcggcggtccgggaatgattatgatggctccgccgcttcatgcggcaatagaacacgccaaagcacaatcttcccaaaccgcaaaagtcatctacctcagcccccaaggaaaaccgctgacacaccaaaaagcggcagaactggcagaacttccgcatctgattctgctgtgcggacgctatgagggaatagacgaaagactgctgcaaaccagcgtcgatgaagaaatcagcatcggagacttcgttgtttccggcggagagcttcccgccatgatgctgatggatgcggtattgaggctcgtacccggcgtattgggcgatatgcagtctgccgaacaagattcgttctcaagcggcattttggactgcccccactacaccaaacccttagaatttcaaggcatggctgttccggaagtattacgttccggcaatcatggcttgatagcggaatggcggttggaacaatcgctgcgccgcaccttggagcgcagacccgatcttttggaaaagcgcgttttaatcccaaaggaatcccgcctcttagaaaccatccggcaagagcaacgggaaatccaatcataa

SEQ ID NO: 37607 - DNA, 1524 bp, Neisseria meningitidis
atgaccgtcatcaaacaggaagactttatccaaagcatttgcgatgccttccaattcatcagctactaccatcccaaagactacatcgacgcgctctataaagcgtggcagaaggaagaaaaccccgccgccaaagacgcgatgacgcagattttggtcaacagccgcatgtgtgccgaaaacaaccgccccatctgccaagacacaggtatcgcaaccgtgtttttgaaagtcggtatggatgtgcagtgggatgcggacatgagcgtggaagaaatggttaacgaaggcgtgcgccgcgcctacacttgggaaggcaacaccctgcgcgcctctgtcctcgccgatccggccggcaaacgtcaaaacaccaaagacaacacgcccgccgtcatccacatgagcatcgtgccgggcggtaaagtcgaagtaacctgcgcggcaaaaggcggcggttctgaaaacaaatccaaactcgccatgctcaacccttccgacaacatcgtcgattgggtattgaaaaccattccgacgatgggcgcgggctggtgtcctcccggcatcttgggcatcggcatcggcggcacgcctgaaaaagccgtgttgatggcaaaagagtccctgatgagccacatcgacatccaagaattgcaggaaaaagccgcgtccggcgcagaattatccaccaccgaagccctgcgcctcgaactctttgaaaaagtcaacgcgctgggcatcggcgcacaaggcttgggcggactgaccaccgtgttggacgtgaaaatcctcgattatccgacccatgccgcctccaaaccgattgccatgattccgaactgcgccgccacccgccacgtcgagttcgaattggacggctcaggccctgtcgaactcacgccgccgcgcgtcgaagactggcccgatttgacttacagccccgacaacggcaaacgcgtcgatgtcgacaagctgaccaaagaagaagtggcaagctggaaaaccggcgacgtattgctgttgaacggcaaaatcctcaccggccgcgatgccgcacacaaacgcctcgtcgatatgctcaacaaaggcgaagaattgcccgtcgatttcaccaaccgcctgatttactacgttggtcccgtcgatccggtcggcgatgaagtcgtcggcccggcaggccccaccaccgccacccgcatggacaaattcacccgccaaatgctcgaacaaaccgacctcttgggcatgatcggcaaatccgaacgcggcgcggccacctgcgaagccatcgccgacaacaaagccgtgtacctgatggcagtcggcggcgcggcgtatctcgtggcaaaagccatcaaatcttccaaagtcttggcgttccccgaattgggcatggaagccatttacgaatttgaagtcaaagacatgcccgtaaccgtcgccgtagacagcaaaggcgaatccatccacgccaccgccccgccccaatggcaggcgaaaatcggcatcatccccgtcgaatcttga

SEQ ID NO: 37608 - DNA, 741 bp, Neisseria meningitidis
atgctgattgtccgaccgtcgggcagggcgaaggacgatgtggaaacctgccgtcgtgccggatggcaggcggaagtgttgagcccgattgaaatcgaagcagatgctgccggactggaacttttgtccgaacaatatgcccgtgcggatgccgtgttttgggtcagtccgaccgccgttgaaaccgccgtcccgtaccttaacctttcagacggcataaagatgcacatttccgtagggcagggcagccgccgcgtattggaacgctgtttgggcagaacggtcatcgcgcctgaagacggcaacgacagcgaggcggttttgcgcctgacggtttggaacagtctgcccgaaggtgcgcgcgtattgtttgtgcgcggacacggcgggcgggattttctgatgaatgccttgcaggagaaaggttttcggacggaggtggcagaagtctatttcagacggcataaacctttgaactttcaaaatttccaaaccgaaaatattgccgccgcctatattacgtccacagaactcgtgcgcttgctgttcggacagcttccgccgcaattttcccgattcttcaaatccttgctatactttacccatcatccgcgcattgcggaggcattgaagcgcgaaggcgtgtgttcggtcgaaaccgtccctacgctggaagccgcgctttcccattcttccatttccgtttcagacggcatggtctttcccggaacctcaaattaa

SEQ ID NO: 37609 - DNA, 975 bp, Neisseria meningitidis
atgattgccaaacacatcgaccgtttcccgctattgaagttggatcaagtgattgactggcaaccgatcgaacaatacctgaatcgtcaaagaacccgttacctccgagaccaccgcggtcgtcccgcctgtcccctgttgtccatgttcaaagccgtcctgctcggacaatggcacagtctctccgatcccgaactcgaacacagcctcatcacccgcatcgatttcaacctgttttgccgttttgacgaactaagcatccccgattacagcaccttatgccgctaccgcaattggctggcgcaagacgacaccctgtccgaactgttggaactgattaactgccaactgaccgaaaaaggcttaaaagtagagaaagcatccgccgccgtcattgacgccaccattattcagaccgccggcagcaaacagcgtcaggccatagaagttgacgaagaaggacaagtcagcggccaaaccacaccgagtaaggacagcgatgcccgttggatcaagaaaaacggcctctacaaactcggttacaaacaacatacacgtaccgatgcagaaggctatatcgagaaactgcacattacccccgccaatgcccatgagtgcaaccacctgtcgcctttgctggaagggatagccgacggtacgaccgtctatgccgacaaaggctacgacagtgcggaaaaccggcaacatctgaaagaacatcagttgcaggacggcattatgcgcaaagcccgccgcaaccgtccgctgtcggaagcgcaaaccaaacgcaaccggtatttgtcgaagacccgttatgtggttgaacagagcttcggtacgctgcaccgtaaattccgctatgcgcgggcggcctatttcggactgattaaagtgagtgcgcaaagccatctgaaggcgatgtgtttgaacctgttgaaagccgccaacaggctaagtgcgcccgctgccgcctaa

SEQ ID NO: 37610 - DNA, 696 bp, Neisseria meningitidis
atgcgttttgacttgggcaaaggttttccgctgctgacgaccaaaaagctgcatctgcgttcgattatccacgagctgctttggtttctcaaaggcgataccaatatcaaatacctaaaggacaacaatgtttccatttgggacgagtgggcggacgaaaacggcgacttaggcccggtttacggctaccagtggcgtaactggcccgcgcccgacggcaggcatatcgaccaaatcgccaatgtgctggaacaaatcaagaagaatcccgactcgcgccgcctgattgtatcggcgtggaatccggctttggtcgatgaaatggccttgccgccctgccacacgctgtttcagttttacgttgccgacggcaaactgtcctgccagctttaccagcgtagtgcagatattttccttggtgtgccgtttaatattgccagctacgcgctgttgacgatgatgatggcgcaagtgtgcgggctggaggcgggcgagtttgtccatacgtttggcgacgcgcatttgtaccgcaaccatttcgagcaggccgcattgcagttggaacgcgaaccgcgcgccttgccagtgatgaaaatcaatcctgaagtcaaagatttgttttccttcaagtttgaagatttcgagttggaaggctacgatccgcatccgcacatcaaggcggcagtgtcggtttag

SEQ ID NO: 37611 - DNA, 1158 bp, Neisseria meningitidis
atgaatagtgcactaaagaattatgcagcatatgtaaataataaaattgatgtatgtgaaatttcgcttaaccaatatatttcaacagataatatcttgcaaaataagcaaggaatagagtgtgcagcatctttaccgattcaaggtggaaaagtaactgcatttaaaaagggtgatattttattagctaatatacgaccgtatctaaaaaaaatttggtatgcccaatttgatggaggttgttctgctgatgttttggcaattcgtgctaatgcaaaaacagatagtcatttcttattttatgctttgtttcgtgatgatttttttatccatgcaatgaaaggtgcaaagggtacaaagatgccacggggcgataaaacacaaattatggaatttaaaattccagtttttgacctcaaaacccaacaatccattgccgccgtcctatctgctttggacaaaaaaatcgccctgaacaaacaaatcaacgcgcgcctggaagagatggcgaaaaccctgtacgactactggtttgtgcagttcgatttccccgacgccaacggcaagccctacaaatcctcaggcggcgacatggtgtttgacgaaaccttgaaacgggaaattccgaaggggtggggaagtatagaattacaatcttgcttagcaaaaatcccaaatactacaaaaatattaaataaagatattaaggattttggaaaatatcctgttgttgaccaaagtcaagattttatttgtggatttaccaatgatgaaaaatctatattaaacccacaagatgctcatattatttttggtgatcatacaagaattgttaagttagttaattttcaatatgcgcggggagcagatggtacacaagtaatattaagcaataatgaacgaatgccaaactatttgttttaccaaatcataaatcaaatagatttatcaagttatggttatgctagacattttaaattcttaaaagaatttaaaataattttgcctagtaaagatatttctcaaaaatataatgaaatagcaaatactttctttgttaaagttcgaaataatctaaaacaaaaccaccacctgacccaactacgcgatttcctacttcccatgctgatgaacgggcaggtttctgtggcggaataa

SEQ ID NO: 37612 - DNA, 777 bp, Neisseria meningitidis
atgtccgacaacgctttgacctcttcgcgacgcttcggcggcatcgccagactctacggagactctgccttggcgcacttttcacaggcacacgtctgcgtagtcggcgtgggcggtgtcggctcgtgggcggtcgaggctttggcgcggacgggcatcggacgtttgactttgattgatttggacaacgttgccgaatcgaatgtcaaccgccagctgcacgccctgaccggagacttcggcaaagcaaaagttaccgccttgcgcgaacgcgtcgcccaaatcaacccagaatgccaagtgtttgaaattgaagatttcgttaccgaagacaatttgccggaatacttcggaaaaggttttgatttcgtcatcgacgcgatcgaccaagtgcgcgtcaaagcagcaatggcggcttattttgtggaacgcaaacaaccgtttgtcctcagcggcggcgcgggcggacaaaaaaatccggcgttaatccaaaccgccgatttgagccgcgtaacccacgacccgctgcttgccaacctgcgctacaccttgcggaaacgctacggattcagccgcgatacgaaagcaaatatgcgcgtgccttgcgtgtattcgaccgaaaatatcgtgccgccgcagtctagggaggcttgttcggcagatgccgctccgcaaggcttgtcgtgcgccggctacggtgcaagcatgctcgttaccgcttcgttcgggctatattgcgcacaggcggcggtggaacacatcgcagacaaaaaataa

SEQ ID NO: 37613 - DNA, 1167 bp, Neisseria meningitidis
atgagaaaattcaatttgaccgcattgtccgtgatgcttgccttaggcttgaccgcgtgccagccgccggaggcggagaaagctgcgccggccgcgtccggtgaggcgcaaaccgccaacgagggcggttcggtcagtatcgccgtcaacgacaatgcctgcgaaccgatggaactgaccgtgccgagcggacaggttgtgttcaatattaaaaacaacagcggccgcaagctcgaatgggaaatcctgaaaggcgtgatggtggtggacgagcgcgaaaacatcgcccccggactttccgataaaatgaccgtcaccctgttgccgggcgaatacgaaatgacttgcggtcttttgaccaatccgcgcggcaagctggtggtaaccgacagcggctttaaagacaccgccaacgaagcggatttggaaaaactgtcccaaccgctcgccgattataaagcctacgttcaaggcgaggttaaagagctggtggcgaaaaccaaaacctttaccgaagccgtcaaagcaggcgacattgaaaaggcgaaatccctgtttgccgacacccgcgtccattacgaacgcatcgaaccgattgccgagcttttcagcgaactcgaccccgtcatcgatgcgcgtgaagacgacttcaaagacggcgcgaaagatgccggatttaccggctttcaccgtatcgaatacgccctttgggtggaaaaagacgtgtccggcgtgaaggaaattgcagcgaaactgatgaccgatgtcgaagccctgcaaaaagaaatcgacgcattggcgtttcctccgggcaaggtggtcggcggcgcatccgaactgattgaagaagtggcgggcagtaaaatcagcggcgaagaagaccggtacagccacaccgatttgagcgatttccaagccaatgtggacggttcgaaaaaaatcgtcgatttgttccgtccgctgatcgaggctaaaaacaaagccttgttggaaaaaaccgataccaacttcaaacaggtcaacgaaattctggcgaaataccggactaaagacggttttgaaacctacgacaagctgggcgaagccgaccgcaaagcgttacaggcttctattaacgcgcttgccgaagaccttgcccaacttcgcggcatactcggcttgaaataa

SEQ ID NO: 37614 - DNA, 1380 bp, Neisseria meningitidis
atggcaaaaacgcttaaaaccctttaccaatgcaccgaatgcggcggcacttccccgaaatggcagggcaaatgcccgcattgcggcgagtggaacacacttcaggaaagcttagccgcgcccgagccgaaaaatgcccgtttccaatcttgggcggcggacacttcgaccgtccaatccctctccgccgttaccgccaccgaagtgccgcgcaatccgaccggcatgggcgaactcgaccgcgtattgggcggcggtttggtcgacggtgcggtcatcctgctcggcggcgaccccggcatcggcaaatccacgctgctgctgcaaaccatcgccaaaatggcgcaaagccgcaaagtactgtacgtttccggcgaggaatccgcccaacaggtcgccctgcgcgcgcaacgtttggaactgccgaccgaaggcgtgaacctgcttgccgaaatccgcatggaagccattcagacggccttgaaacagcatcagcccgaagtcgtcgtcatcgactccatccaaaccatgtattccgaccaaatcacttccgcccctggttccgtgtcgcaggtgcgcgagtgtgccgcccaactgacgcgcatggcgaaacagatgggcatcgccatgatactggtcggacacgtgaccaaagacggtgcgattgccggtccgcgcgtgctggagcatatggtcgataccgtgctgtatttcgagggcgaccagcattccaactaccgcatgatacgcgccatcaaaaaccgcttcggcgcggcaaacgaactgggcgtattcgccatgaccgaaaacggtttgaaaggcgtgtccaacccgtccgccatcttccttgccagctaccgcgacgacacgcccggttcgtgcgttttggttacgcaggaaggcagccgaccgcttttggttgaaattcaggcattggtcgatgacgcgcacggattcacccccaaacgccttaccgtcggactggaacaaaaccgccttgcgatgctgcttgccgtgttaaaccgacacggcggcatcgcctgtttcgaccaagacgtgtttctcaatgccgtcggcggcgtgaaaatcggcgaaccggcggcggatttggcagtcatcctcgcgatgctttccagcttccgcaaccgccccatgcccgaaaaaaccgtggttttcggcgaaatcggcttaagcggcgaagtccgccctgtcgcacgcggacaagagcggctcaaagaagcggaaaaactcggcttcaaacgcgccattgttcccaaagccaatatgccgcgcaacgccaaagagtttccgaacctgaaaatctacggcgtttcgagtttgcaggaagccatcgatatttgccgcgacagcagggaataa

SEQ ID NO: 37615 - DNA, 192 bp, Neisseria meningitidis
ttgctgcccacgcgttctgtttcaagtttattattgggtgaatatttggaatttgaagaaaacggtacaaagattgctgcggaaatcgacagtgcatggcattttttgggcgcggcttgtcggatttcaataaatggaaagtattatgcgggtaatcggattgtttggtttgccaaaaaagccgaaagctag

SEQ ID NO: 37616 - DNA, 459 bp, Neisseria meningitidis
ttgttaactaagttgaaaattttgctatttttgttcttatttgtttttgtattggctattaatttgcttttcttcttttttagttcggatatcgagagtttcgggaactatcagtttgaatatgtttacgataaaggttggcctgctaattatattttagtcatgaaagatggaaatgaagggaattttgataaaataatatccggattggttttagaatattataaggaggatgataacatttatttttcttatattgacgggcaaggatttgcttcagactcttgctattacaaaccggaaatttcatatggaaaaattattttaaataaaaatcatatcattaatattaatagcatggaaaaaaataattttctttcagaagataaaataatgaagggaacaagaaattggctagcagaccctaaaaataaatgtaatatacagactctagactaa

SEQ ID NO: 37617 - DNA, 234 bp, Neisseria meningitidis
gtgtccaataccgcctgctcgaactcgggatgcaccgcgcccattactttcaatgggaaggtgcagggaaattcgatgagggatgttttgtttttttgttcggtcatgatgtgctgccttgttgtgtacggtatgccgtctgaaggcgggtttgcctttcagacggcatcggatgtgcgttattttagcctaaaccgcgataacaggctatcgggaaggcggaggcttttttga

SEQ ID NO: 37618 - DNA, 1395 bp, Neisseria meningitidis
atgaccgtcaaaacccgtttcgcccccagcccaaccggctacctgcacatcggcggcgtacgcaccgccctgttttcttgggcgtttgcccgccatcataaaggcgaattcttattgcgcatcgaagacaccgacttggcgcgctctactgccgaatccgtcaacatcatcctcgacggcatgaaatgggtcggactcgattacgacaacgccggcaacgtcgtgtaccaaacccgccgtttcgaccgctataaagaagtcatcgccgaacttttagaaaaaggcgatgcctactactgctattgcagcaaagaagagttggaagccatgcgcgagaaagccgaaaaagaaggcacggcgacttacgaccgccgctggcggccggaagcaggcaaaaccctgcccgaaatccctgccggcgtgcaacccgtcgtccgcttcaaaacgcctttggatggcgtaaccaagtggacggacttggtcaaaggcgaaatctccatccccaacgaagcactcgacgacctgattatcgcccgcgccgacggcacgccgacctacaacttctgcgttgtcgtggacgactacgacatgggcgttacccacgttatccggggcgacgaccatgtgaacaacaccccgaaacaaatcaacatcttaaaagccatcggcgctaccctgcctgaatacggccacctgccgatgattcttaacgaacaaggcaaaaaaatctccaaacgcagcggcgataccgttgccattaccgatttcggcgcgatgggcatcctgcccgaagccatgctcaactatctggcacgtttgggctgggcgcacggcgacgatgagttcttcacgatggaacaatttatcgaatggtttgatttgaaagacgtttctccatctccaagccgcatggatttgaagaaactctactggatcaacggcgaacacatcaaaatcacgcccaacggcaaactcgccgaactcgtcaaaccgcgtctcgctctgcgcgatatccatgaaactgaaaaacctgcattggaagacgtgttggcactggtcaaagaccgcgcccaagacctgaacacacttgccgacgagtgcctctacttctacgtcaaacaaacgcctactgaagcggacgtgcagaaacactgggacgatgaagccgccgcccgtatgctgcgcttcgccgaacgcctcgaagggctggaagactggaataccgaagccatccacgacctcttcaaacccttctgcgacgaagaaggcattaaaatgggcaaactcggcatgcccctgcgccttgccgtctgcggtacggcgaaaacccccagcgtcgatgctgtgttggcattaatcggcaaagaggaagtgttgaaacgcatccgcgcttaa

SEQ ID NO: 37619 - DNA, 1707 bp, Neisseria meningitidis
gtgtgtgcgccagcacgcatgcgttccatgatttacggctcaatgccgtctgaaaagctcacaatttttcagacggcatttgttatgcaagtaaatattcagattccctgtatgctgtacagacgcgggagtgttaagccccccttgtttgaagctccgcggctcctgccgagcttcaccgaccccgttgtgcccaagctctctgctcccggcggctacattgtcgacatccccaaaggcaatctgaaaaccgaaatcgaaaagctggccaaacagcccgagtatgcctatctgaaacagctccaagtagcgaaaaacgtcaactggaaccaggtgcaactggcttacgataaatgggactataagcaggaaggcttaaccagagccggtgcagcgattatcgcgctggctgttaccgtggttactgcgggcgcgggagtcggagccgcactaggcttaaacggcgcagccgcagcagcggccgatgccgcctttgcctcactcgcttctcaggcttccgtatcgctcatcaacaataaaggcgatgtcggcaaaaccctgaaagagctgggcagaagcagcacggtgaaaaatctggtggttgccgccgctaccgcaggcgtagccgacaaaatcggcgcttcggcactgaacaatgtcagcgataagcagtggatcaacaacctgaccgtcaacctagccaatgcgggcagtgccgcactgattaataccgctgtcaacggcggcagcctgaaagacaatctggaagcgaatatccttgcggctttggtcaataccgcgcatggagaagcagccagtaaaatcaaacagttggatcagcactacatagtccacaagattgcccatgccatagcgggctgtgcggcagcggcggcgaataagggcaagtgtcaggatggtgcgatcggtgcggctgtgggtgagattgtcggggaggctttggttaaaaataccgattttagcgatatgaccccggaacaattagatctggaagttaagaaaattaccgcctatgccaaacttgcggcaggtacagttgcaggcgtaacgggaggagatgtcaatactgctgcacaaaccgcacaaaacgcggtagaaaataatgcggttaaagctgttgtaactgctgcaaaagtggtttataaggtagccagaaaaggattaaaaaacgggaaaatcaacgttagagatttaaaacagacgttgaaagacgaaggttataatttagccgacaacctgaccaccttattcgacgaaacattggattggaacgatgccaaagccgttattgatattgtcgtcggaacagagctgaatcgcgctaataaagaggaagcggcacaaaaggtcaaggaagttttagaaaaaaatcgtccttatatccctaataaaggtgctgtaccgaatatgagtacatacatgaaaaataatccttttggaaaacagctggctcaaatttcagaaaagacaacgcttccgacgcagcaagggcagtctgtcttcttggtaaaaagaaaccaagggttattaaaaaccggtgataggttttatttagatggccaacataaaaatcatttagaggtttttgataaaaatgggaactttaagtttgttctaaatatggatggttcgcttaaccaaatgaaaactggggcagcaaaaggtcgtaaattaaacttaaaatag

SEQ ID NO: 37620 - DNA, 486 bp, Neisseria meningitidis
atggacgcgctgcacaccatcgcccgaaacctgacgaaaaaacgtcaaaccgtaagctgtgccgaatcctgcacgggtgggctgcttgccgccgtattcacaagcgttgcaggcagttcgcaatggttcgatcaaagttttgtaacatacagcaacaaagccaaagaagaccgcttgggcgtgttgcccgaaaccctgctcgaacacggcgcggtcagccgccaaaccgtctatgagatggcgcgcggcgcgaaagccgtggcgcaggcggattacgccgtcggtatttccggcatcgccggtccgggcggcggcagcgaaagcaaacccgtcggcacggtttggttcgggtttgcctttccgggcggaagttgcgaagcaatgcgccgttttgacggcaaccgcgaatccgtccgcgcgcaggcggtcgccttcgcgttggaacggttggcggggctgattgaaaacggcggcgatgccgtctaa

SEQ ID NO: 37621 - DNA, 792 bp, Neisseria meningitidis
atggatacgcaggcagttatcacacatatcgcccgatggttggacgaatacgccactcaggcaaatgcaaaaggattcgtcataggcgtttccggcggcatcgattccgccgtcgtctccacactcgccgcccgcaccggccgccccacgctgcttctggatatgccgatacgccaacaccccggccagcttgagcgggcaaggctgcacatccgcaatctgcaacggcaatatgccaatgtaagcgcgcaaacggccgatttgaccgacaccttccagacctttgaacaaaccgtcggcattcatcagacggcatttgacaatcagccgctttccctcgccaacgccaaaagccgcctgcgtatgctgaccctgtactactacgggcagatacacggactgctggttacggggacaggtaataagattgaagatttcggcgtgggattttttaccaaatacggcgacggcggcgtagacatcagcccgattgccgacctgaccaaaacgcaggtttaccggcttgccgaagcattgggcgtggacgaggcgattcaaaaagccccgccgaccgacggcctgtgggatacggaacgcaccgacgaagaacagatgggcgcaagctatcccgaactggagtgggcaatgggcgtgtacggcacgcgcaaacccgaagattttgaagggcggcagcgcgaagttctagaaatctatacgcgacttcaccgcgccatgcagcacaaaatcaacccgattcccgtatgccgcattccgcccgaattgctgggctga

SEQ ID NO: 37622 - DNA, 519 bp, Neisseria meningitidis
atgccgtctgaaacaccgttttccttgtccgaaagccgccattatgaatttgaaggaaactccactataatacggcattcagatttccagacggcatcgcgcccgtcagaccgcacacaaaccaaaaggaaatacatgttccgtactatgcttggcggaaaaatccaccgcgccaccgttaccgaagccgatttgaactacgtcggcagcattaccgtcgatcaagatctgttagacgcggcaggcatctaccccaacgaaaaagtcgccatcgtcaacaacaacaacggcgaacgttttgaaacctataccatttcaggtaaacgcggcagcggcgtgatttgtctgaacggtgctgcggcaaggctggtgcagaaaggcgatatcgtcatcatcatgtcttacgtccaactctccgaacccgaaatcgccgcacacgaacccaaagtcgtcttggtagacggaaacaacaaaatccgcgacatcatctcctatgagccgccgcacaccgtgctgtaa

SEQ ID NO: 37623 - DNA, 588 bp, Neisseria meningitidis
ttgctccttaccgcctgcggcagaaaatccgcccgaacccacgccaaaattcccgaaggaagcaccgtacttgccttgggcgattcgcttaccttcggctacggcgcaaaccccggcgaatcctaccccgcgcaactgcaaaaactgacgggttggaatattgtcaacggcggcgtatcgggcgatacatccgcccaagccctgtcgcgcctgcccgcgctgttggcacgcaaacccaagcttgtgattgtcggcataggcggcaacgactttctgcgcaaagttcccaaggagcagacccgcgccaatatcgcgaaaatcatcgaaaccgtgcagaaggaaaacatccccgccgtcctcgtcggcgtgccgcacatcacactgggtgcgttgttcgggcatttgagcgatcatccgctgtatgaggatttgtccgaggaatacggcattccgctgttcggcggcgcgtgggcggaaattttgggcgataataatctgaaatccgaccaaatccacgccaacggcaaaggctatcggaaatttgccgaagatttgaatcaatttttgagaaaacaggggtttagataa

SEQ ID NO: 37624 - DNA, 1137 bp, Neisseria meningitidis
atgaaaaacatatctctttctccgcccgccatgctcggcattcttggcggcggacaattaggcagaatgtttactgttgctgccaaaaccatgggctacaaagtaaccgttctcgaccccgatccggacgcgccggcagcagaatttgccgactgtcatttatgcgcgccgtttaacgaccaagcggctttggatgaattggcaaaatgcgcggcggtgaccactgaatttgaaaacgtcaatgccgatgcgatgcgctttttggcaaaacataccaatgtttcccctagcggcgattgtgtggcgattgcacaaaaccgcattcaggaaaaggcatggatacgcaaagcgggattgcaaaccgcgccgtatcaagtggtttgtaaggctgaagacatcactgaagcaagcgcgcaatttttgcccggcatcctgaaaacggctacgttgggctacgacggcaaaggtcaaatccgcgtaaaaacattggatgaactcaaagccgcgtttaccgaacacggcggcgtggattgcgttttggaaaaaatggtggatttgcgcagtgagatttccgtaattgtatgccgtttgaacaatgacaacgtgcaaactttcgaccctgccgaaaacatccacgaaaacggcatcttggcttattccatcgtccccgcgcgactgagtgccgacgtgcagcaacaggcgcggcagatggcgcaacgcttggcagacgaattggattatgtcggcgtattggcggtagaaatgtttgttgtcggtgacacacatgaattggtcgtcaacgaaatcgcgccgcgtccgcacaactccggccaccataccgtcgatgcctgcgcggcagaccaattccagcaacaggtccgcctgatgtgcaacctgccacctgctgacaccaaattgctgagttcttgctgtatggcgaatattttgggcgacgtttggcaggaagacggcggcgaaccggattggtttcccctgcaaagccggccggacgcgcacctgcacctttacggcaaaaaaaccgcgcacaaagggcggaaaatgggacactttaccgttttaaccaccgattcggacaccgcatttcaagaagcaaaaaaactgcatcagtccctataa

SEQ ID NO: 37625 - DNA, 2607 bp, Neisseria meningitidis
atggctgccaaccaacgttaccgcaaaccgctgcccggtacggatttggaatactacgacgcgcgtgcggcgtgtgaggacatcaagcccggctcttacgacaagctgccttacacgagccgcattttggcggagaatttggtcaaccgcgcggacaaagtcgatttgccgacgctgcaaagctggctgggtcagctgattgagggaaaacaggaaatcgactttccttggtatccggcgcgggtggtgtgccacgatattctggggcagaccgcgttggtggatttggcaggtctgcgcgatgcgattgccgaaaaaggcggcgatcctgccaaagtgaatccggtggtgcaaacccagctcatcgtcgaccactctttggccgttgaatgcggcggctacgaccccgatgccttccgcaaaaaccgccaaatcgaagacagacgtaacgaagaccgtttccacttcatcaactggacgaaaaccgcctttgaaaatgtggacgtgattccggcgggcaacggcatcatgcaccaaatcaatctggaaaaaatgtcgcccgtcgtccaagtcaaaaacggcgtggcgttccccgatacctgcgtcggcacggattcgcacacgccgcacgtcgatgcgctgggcgtgatttccgtgggcgtgggcggattggaagcggaaaccgtaatgctgggacgcgcgtccatgatgcgcctgcccgatattgtcggcgttgagctgaacggcaaacggcaggcgggcattacggcgacggatattgtgttggcactgaccgagtttctgcgcaaagaacgcgtggtcggggcgtttgtcgaattcttcggcgagggcgcgagaagcctgtctatcggcgaccgcgcgaccatttccaacatgacgccggagttcggcgcgactgccgcgatgttcgctattgatgagcaaaccattgattatttgaaactgaccggacgcgacgacgcgcaggtgaaattggtggaaacctacgccaaaaccgcaggcttgtgggcagatgccttgaaaaccgccgtttatcctcgcgttttgaaatttgatttgagcagcgtaacgcgcaatatggcaggtccaagtaacccgcatgcccgttttgcgaccgccgatttggcggcgaaagggctggcgaagccttacgaagagccttcagacggccaaatgcccgacggcgcggtcatcatcgccgcgattaccagttgcaccaacacttccaacccgcgcaacgtcgttgccgccgcgctcttggcgcgcaacgccaaccgcttcgggctgaaacgcaaaccgtgggtcaaaacctcgtttgcccccggttcgaaagtggcggaaatttatttgaaagaagcaggcctgctgcccgaaatggaaaaactcggcttcggtatcgtcgccttcgcctgcaccacctgcaacggcatgagtggcgcgctggatccgaaaatccagaaagaaatcatcgaccgcgatttgtacgccaccgccgtattatcaggcaaccgcaacttcgacggccgtgtccatccgtatgcgaaacaggctttcctcgcttcgcctccgttggtcgttgcctacgcgctggcaggcagtatccgtttcgatattgaaaacgacgtactcggcgttgcagacggcaaggaaatccgcctgaaagacatttggcctgccgatgaagaaatcgatgccgtcgttgccgaatatgtgaaaccgcagcagttccgcgatgtgtatgtaccgatgttcgacaccggcacagcgcaaaaagcacccagtccgctgtacgattggcgtccgatgtccacctacatccgccgtccgccttactgggaaggcgcgctggcaggggaacgcacattaagaggtatgcgtccgctggcgattttgcccgacaacatcaccaccgaccacctctcgccgtccaatgcgattttggccgtcagtgccgcaggcgagtatttggcgaaaatgggtttgcctgaagaagacttcaactcttacgcaacccaccgtggcgaccacttgaccgcccaacgcgctaccttcgccaatccgaaactgtttaacgaaatggtgaaaaacgaagacggcagcgtgcgccaaggctcgttcgcccgcgtcgaacccgaaggcgaaaccatgcgcatgtgggaagccatcgaaacctatatgaaccgcaaacagccgctcatcatcattgccggtgcggactatggtcaaggctcaagccgcgactgggctgcaaaaggcgtacgcctcgccggcgtagaagcgattgttgccgaaggcttcgagcgtatccaccgcaccaaccttatcggcatgggcgtgttgccgctgcagttcaaacccgacaccaaccgccataccctgcaactggacggtacggaaacctacgacgtggtcggcgaacgcacaccgcgctgcgacctgaccctcgtgattcaccgtaaaaacggcgaaaccgttgaagttcccgttacctgccgcctcgatactgcagaagaagtattggtatatgaagccggcggcgtgttgcaacggtttgcacaggattttttggaagggaacgcggcttag

SEQ ID NO: 37626 - DNA, 627 bp, Neisseria meningitidis
atggctgatatgaaacgcttgaaacatttgatgttttcaccctttatcgacaacaacccgattgccttgcaggttttgggtatttgttcggctttggcggttaccaccaaacttcagacggccatcgtgatgggtatttccgtagctttggtaaccggtttttccagcttcttcatttcgctggtacgcaactacatccccaacagcatccgtattatcgtgcaaatggcgattatcgcgtcgctggttacgctggtcgaccaactcttgcaggcatttgcctacgaattgtccaaacagctttccgtattcgtcggtctgattattaccaactgtatcgtgatgggccgcgccgaagcatttgcgatgaaagagccgccgctggaaagcctgatcgacggcatcggcaacggcgcgggctacgggataatgctgcttgtcgtcgccaccgtccgcgaactgattggctcgggcaaactcttgggctacaccgttttccaaaccgtgcaggacggcggctggtatcagaccaacggcttgttcctgctcgcccccagcgcgttcttcatcatcggctttttgatttggggactgcgtacctggaaacccgaacaggcggaggaataa

SEQ ID NO: 37627 - DNA, 738 bp, Neisseria meningitidis
atgaagcaggttgatttaaacgccgatctcgccgaaggctgcggcagcgacgaagccttgttgcagctgattacttcggccaacatcgcctgcgcccaacacgccggcagcattgccgatattcgggcggcattggcgtatgcccaacaaaacggcgtgcgcatcggagcacaccccggctatcccgatcgggaaaacttcggccgtaccgaaatgaatctgtccgaagccgatttgcgggcgtgtctgaattaccagttgggcgcattgcaggccttgtgccgtgatcagggtttggaaatggcttatgtcaaaccgcacggcgcaatgtacaaccaagcggcgaaaaaccgtgcgctggcggataccgttgcccgaattgtggcggatttcgacccgaaattgaaattgatggcactttccggcagcctgctcttggaagccggaaaagccgcaggcttgggtgtgatttccgaagtattcgccgaccgccgctatatgcccgacggtacgctggttccccgcagccgccccgatgcgcaggtggacagcgacgaagaagccatcgcccaagtattgcagatggtgcgggacgggcgggtcaaagcagtgaacggcagcctggttgccgtgcaagccgacagcatctgtctgcacggagacgggccgcacgccgtggtgtttgccgaaaaaatccggcaggaactactggcggcaggcatcaaagtttctgcttga

SEQ ID NO: 37628 - DNA, 642 bp, Neisseria meningitidis
atgctgaaacccgaaaccatacacatatccggtcctgccggcattttagaaaccatccatatcccgtccgaacaagtaccggcacgcggtgttgccgtcatcaatcatcccaaccccctccagggcggaacaaacaccaacaaagttatccaaactgccgccaaagccttaagcaaactcggcttccactgctacctgcccaaccttcgcggcgtaggcggcagcgaaggcacacacgattacggacgcggcgaaacgcaagactgcctcgccgtcatcgactatgcccgtgcccaacatcccgaagcccccgaatttgccttatccggcttctccttcggcggttatgtcgccacatttgccgcacaagcgcgcatacccgatttattgctgctcatcggcgcggcagtctgccactataccggccgtccggaaccgtcagccgttcccgacgttgcaaaaacgctgatgatacacggcgcggaagatgaagtcgtcgaaatcgggaaagcattgaaatgggcagaaccgcaagatttgcccgtcattaccatcgccggttccacgcatttctttcacggcaaactcatcgtcctgcgcgacaccatcctccgcttcgcgcccgtatgcctgaacggataa

SEQ ID NO: 37629 - DNA, 795 bp, Neisseria meningitidis
atgatgtccgaacaccgagtcaaccacgaacccgtcttcctgttggcttcctcgccatggcgcgaaagcagcctgcgggtcgaagccttcagccgccgttacgggcgtgtggcacttttggcaagaagcgcgcgcaagcggcagagcgaattgcgcggcgtattggttcctttcgtgcccgtcagcgcgtcgtggtacggcagtcaggaactcaaaaccctgcaccgtgccgaatgggtcggcggatggcggcagccgcagggcagggcgttgttcagcggtctgtatgtgaacgaactggtgttgaaactgaccgcgcgcgaagatccgatgcccgaactgtacgacgcgttggcaaaagtgatggaggcggtgtgccgtgaagccaaccatattgccgatttgcgccgcttcgagtggaagctgctcaatgccttgggcgttgcccccgatttgcacgccgacagcacgggcggcgatattttggcggacaaaacctaccggctgatgcccgaagaggcggtcatgcccgtatgcgaggacgcagacgcgctttcgcacgaagccggcgcaattgtcgaagggcaaagcctgatcgatttgcgcgaaggcagtttccgcaccgccgaaagcctgcaacaggcattgaaaatcacacggctgctgatcggcacgctgcttcccgaaggcttgaaatcgcggcaggtgttggaacagatacggcagtttgaccgcaaagaaaccgcccgggaaaccgtcccgacttcggacggcacggcttcaaatgccgtctga

SEQ ID NO: 37630 - DNA, 1716 bp, Neisseria meningitidis
atggcaaatctaaatgtgagtagtaaaaaaattattaatctgctaggtaatcaagatatgcaggaaaaatattttatcattcctgaatatcaacgcccctatcgctgggataccgaaaaatgcgccgtattatggtctgatattgtggattttcgccagtcgtccacaggaaaaaatgaagaatattttcttggtacaatcgttgtttgccccaatgaaaaaggtaatttggaagtaattgatgggcaacagcgtttaacatcattactgctgttattgcgtgcgttttatcgagttttagagcaaacggaaagtacccccgataccgcagccaaaattaccacacttaaaagcaaaattgccccctgtatttgggatgttgatgttctaacggctgaaattaccgatagaaccgcaatccggctgcatacgcaagttgccacagaaacagataacgaaattttgcacgagattttggcaaacggtgaaatctcagaagagtgtcgttctaattacgccgttaattatttgtatttcctgaaacagtgccaagaatacgccagaaccaacccaatggattggtatcatctttgtttaactattttgaatgactgtattttacttccgattgaaagtgacagtttaaatagtgcattaaccatattttccacattaaacgataggggcttgcctttgtcggatgcagatatttttaaagccaggctttataagatggcgcagcagaaagataaatttgttgaacaatggaaggaacttgttgcgttggcagagggtgcatctatttccgtagatgatttgttccgctattacacccatgtattaagggcgaaagaaaagattacggataaagaaattgggcttcgccgtttttatactgacaaccgaaacaaacagttggaaaacgaaaatttgttcaatcacttaattgagctggctggattttggcaggatattaacaacagcaaaactaaccaagacgtggaaacttcgaactttgtaaatgacgaggcggccaagtggctgcaatgtctgaatgtctatcctaatgagttttggaaatacgccgcgagtgtgttcttcattgcaaacaagggtgcgcaatcctttaaagatgattttgcagcattattaaaacagcttactgcatttttgtatgctaaatttttagttgcgccaaccgtaactgcaattaaagatgatatttataaattatgtgttgcgatttatcacggtgaaaaaaacgctttatcatatgttatgcctgcacccatacactatgaacaaaatacaggacgtataactaaagggttgttaatgattaatgcttatctatttgatgaaaagcagaaattattgccaactaaaactgaaatcgaacatatctttccgaaaaaatggcaggaaactaactataatggttggtcaatcatagatgcggaacaatatttagaacaactaggtaataaaattgtttttgaaaaacggttaaatattcaggcaggtaacggctattttggtaagaaaaaggagcaatatcaaaaatccgatattgttgaagtgcgtgaattagcaggtgaaaatgccaatgattggttaccgagtgatattcagaaacgccagcagcagattgtggatagattgaaacagtttttcgataattgttttgaagcagccagcatccccaaaaaaaattaa

SEQ ID NO: 37631 - DNA, 1065 bp, Neisseria meningitidis
atggcttcgtatgacaagataagcggtggatggtatagggtttgcccgaaacggtcaagcaatcgggcgttaattacagtaaaattgccgttttccactttattccgcctgaaaccaatgaccgacatcacaccgtttgccaaccgcttgggcaaaaacatcaaacaccttatgaaatgggcgaaacgcaacggcatcgaagcctggcgcatttacgaccgcgacattccccaattcccttttgccgccgatgtttacggtgatcgaatccaccttcaggaatacgataccggctggctgatgcagcccgaagaatacgaagcgtggcttgccgaagtattggaagccgtcgttttcgttaccggttttgcgcccgaacaaatccacctcaaacgccgcgaacgtcaaaaaggtttgcagcaatacgagaaaaccggcaaaaccggcgatgattttgtcatcaccgaaaacggccgcaagttttgggtcaacctcgacaaatacctcgataccggccttttcctcgaccaccgcaacacgcgcaaaaaagtcggcgaaaccgcagcgggcaaacgcttcctcaacctgttttcctacacaggcagcttcaccgtctacgccgccaccggcggcgcggcatccagtgaaaccgtcgatttgtccaacacttatctcgattgggcgaagcgcaattttgaattgaacggcatcgatacggaacggcacaaaatcgtccgcgccgacgtgttccaatatcttcagacggcatatggggaaggcaggcggtttgacctcattgtgatggatccgcccagtttttccaacagcaagaaaatgtccgacatcctcgacattcagcgcgaccacaaaaagctgattgaccgcgcggtgaagctgctcgcttcagacggcattttgtacttttccaacaacctgcgcagcttcgtcttagacgacttggtatcggaacaatacgccgtcaaagacatttccaaacaatccgttcccgaagatttccgcaacaaaaaaatccataggtgctgggaaatccgccacgaatcttaa

SEQ ID NO: 37632 - DNA, 933 bp, Neisseria meningitidis
atgttaagatgccgtccgaaatccgttttggattcagacggtatttttttgaaatttaattttttaaggagtaaacctaaatatgaaatttccttccttccttccttccttccttcctttaaacggatactctgcctgtcggcagtaatctcggtattgggggcttgtacggtcgttgcagatgtttacggtcaggattccgccacaatgaatgctgcggctgccgaagattatatgaaaacggttgagttgaacaagtctgccggcaatgtcgatactacatccaaaacagcccgtagggtgcaggcagtatttcgacgtatgttgccttatgccgatgcggcaaataataccggccataagtttgactggaaaatgacggttttcaaaaacgatgagctgaacgcgtgggcaatgcccggtggaaaaatggcgttttatacggggatagtcgacaaactcaagctgaccgatgacgaaattgccgccattatggggcatgaaatgacgcacgccctgcatgaacacggtaaaaataaggtcgggcaacaaattttgaccaatacggcggcgcagataggcacgcagattatattagacaaaaaaccggacactaatccggaattggtcggattgggtatggatattttgggaacgtacggtattaccttgccttatagccgcagcttggaagaagaagccgatgaggggggaatgatgttgatggcgcaggcaggctatcatccggcggccgctgtcagggtttgggaaaaaatgaatcaggaaaacgaccaaaacggctttatttatgctattacctctactcatccgacaaacaatgcccgtatagaaaatctaaaacggttgttgccgaccgttatgccggtttatgagcaaagtgtcagaaataaggggcgcgttaatccactataa

SEQ ID NO: 37633 - DNA, 2115 bp, Neisseria meningitidis
atggatttattatcggttttccacaaataccgtctgaaatatgcggtggccgtgctgacgatactgcttttggcggcagtcgggctgcacgcttccgtatatcgcaccttcacgcctgaaaacatccgcagccgcctccaacaaagcattgcacacacacaccggaaaatctcgtttgatgcggacattcagcgcaggctcctgccccggccgaccgtcatcctgaaaaacctgaccattaccgaacccggcggcgaccggactgccgtttccgtccaagaaaccaaaatcggattgagctggaaaaacctgtggtcggatcagatacagattgaaaaatgggtggtttcgagtgcggaacttgccctgacgcgcgacgggaaaggtgtttggaacattcaagacctgatcgacagccaaaaacgccaagcctcagtcaaccgcattatcgtcgaaaacagcaccgtccgcctcaatttcctgcaggaacagcttatcctgaaggaaatcaacctcaacctgcaatcccccgattcgtcggggcagccgtttgaaagttcgggcatactggtttggggaaagctgtccgtcccgtggaaaagcagggggctgttcctttcaaacggcatcggcccgcccgaaatctcaccgttccattttgaagcttccacttcgctggacggacacggcattaccatttccaccaccggcagcccttctgtccgcttcaacgccggcggagcggatgccgccggcctcggcctgcgtgcagacacttccttccgtaacctccacctgaccgcccaaatccctacgctggcactcaggaacaacagcattaaaattgaaaccgtcaacggcgcatttaccgccggcggcgaatatgcccaatgggacggttcgttcaaactcgacaaagccaacctgcactccggcatcgccaacatcggcaacgccgaaatctccggcagcttcaaaacaccgcgccaccagaccaacttctccctcaattcgccgctcgtatggacggaaaacaaagggctggacgcgccgcgcctgtatgtatcgacccttcaggataccgtcaaccgcctgccgcaaccccgtttcatcagccggctcgacggttcgctgtccgtaccgaatctgcaaaattggaatgccgaattaaacggcacattcgaccgccaaaccgttgccgcgaaattcagatacacacatgaagacgcaccgcatctggaagccgccgtcgcactgcaaaaattgaacctgaccccctatcttgacgacgtgcggcaacaaaacggcaaaatatttcccgacaccctcgccaagctgtccggcgacatcgaggcgcacctgaaaatcggaaaagtccaacttcccggcctgcaactggacgatatggaaacctacctccacgccgacaaagaccatatcgcgctcagccgtttcaagtcagggctttacggcggccataccgaaggcggcatcagcatcgccaacacccgtcccgccacttaccgcctgcaacagaatgcaagcaacatccaaatccaaccgctgctgcaagacctgttcggcttccacagcttcagcggcaacggcgacgcggtcatcgacctgaccgcgggcggcgaaacccgaaaagagcttatccgctcgcttcaaggcagcctgtcgctaaatatttccaacggtgcgtggcacggtatcgacatggacaatatcctgaaaaacggcatttcgggcaaaactgccgacaatgccgcacccagcacacccttccaccgattcacgctcaacagcgaaatttcagacggcatcagccgccacatcgataccgaactcttctccgacagcctctatgttaccagcaacggctataccaatctggatacgcaggaattgtctgaagatgtccttatccgcaacgccgtccatccgaaaaacaaaccgattcccctgaaaatcaccggtacggtggacaagccgtccattaccgtcgattacggcaggctgaccggcggcatcaattcgcgcaaagagaaacagaaaatcctcgaagacaccctgctggaacaatggcagtggctcaaacctaaagaaccgtaa

SEQ ID NO: 37634 - DNA, 1200 bp, Neisseria meningitidis
atgtggacgggatttttttcaaaatcaggcactggcattgcagaggaaaggcatcaaaaccgccgtgcttgcaccgatgttccgctacttgcggaaagaaacagcaagcatcctgaccgaccttacggttttgcaaaatatcggcaaagcggtttggacatctatgcatggcacggcatgtatttcttcccccgctttccgttcatcgacatcgaccgcatccgctgggtgcgcgtgggtttgaaagccttcaaacactacatccgcgaaaacgggctgcccgacctgattcacgcccaccgcatgaactatgccggcatactcgcccaaaaaatttcccaaaaatacggcatcccctatgtcgtcacgaaacacagcagcaccattacgcgcggtctgatccgtccccaccaatggcagcctatgaaaaatgcggcggcgcacgccgccgcacgtctcgccatcagccgccatttcgcacacgtcctgcaacacaaatacggctgcgaatggcagtacctccccaacatactgggcggaatattcaaccgaccgtttgaacaaagagaaaaaaacaacaaaccgcatttcgtgttctgcaccgtctcgcaccttcgccgtctcaaaggacacgatgtcctgctcactgcctttgcccgggcgttggcacaatgcccgcaactgcgtctaaacatcggcggcagcggacaggaagaacagcggctgaaacagcaggcggcagacttgggcattacccatgccgttacatttttaggcgcactgcaacccgaagcagtcttggatttgatgaagaacagcgacgcatttgtccttgccagccgcaccgaaaccttcggcgtggtctatatcgaagcactgtcccaaggattgcccgtcattgcgacacgctgcggcggtgcggaatctattgtttcagacggcaacggatatttggttcctgttgacgacgacgatgcccttgccgacgcactcatcaaaatgtatgaacaccactctgattttgaacctgcccgacttagggaaaactgtctgaacgaatttggcgaaaatgccgttataggcaggttgatcggcattttccgacaggcaatcgcagaatacggtaagaaaataccggtgaaatatagtggattaacaaaaatcaggacaaggcgacgaagccgcagacagtacaaatag

SEQ ID NO: 37635 - DNA, 1581 bp, Neisseria meningitidis
atgtccgtcatcaaacgcgccctgatcagcctgtccgacaaggcaggcgcggtcgaatttgcccaaaccctgaccaagctcggtgttgaaatcctctctaccggcggtacagcaaagctcttggctgatgcaggcgttcccgttatcgaagttgccgactataccggcttccccgaaatgctcgatggccgcgtgaaaaccctgcatccgaaaatccacggcggcatcctcggtcgtcgcgatttgggcgaacacgtcgccaagatggaagaacacggtatcggcaacatcgacctcgtgtgcgtcaacctttaccccttcgccgccaccatcgccaaaccaaactgcacactggaagacgcgattgaaaacatcgacatcggcggcccgactatggtgcgttctgccgcgaaaaactggaaacacgtcgccatcgttaccgataccgccgatttccctgccatcgccgccgaactcgaagccaacaacggcgcattgagcgacaaaacccgtttcaacctctcacgcaaagcattcagccataccgcccaatacgacggcatgatttccaactacctgacctcgctttcagacgacgtcttgagcggagagccccaaatcggcgaattcccgagccagttcaaccaaagctggattaaagtgcaagatatgcgctacggcgagaatccgcaccaacgcgccgcgttctaccgcgatgtgtaccccgccgcaggcagcctttccgcctacaaacagctccaaggtaaagaattgtcgtacaacaacatcgccgatgccgatgccgcttgggaagccgtcaaatccttcgacgcgcccgcctgcgtgattgtgaagcacgccaatccgtgcggcgtcgccgttgcagccgataccttgaccgcctacaaactcgcctacgccaccgacaccaccagcgcgttcggcggcatcatcgccttcaaccgcgaagtggacggcgaaaccgtcaaacagattacagacaaccagtttatggaagtcctgatggcgccgaagttcaccgccgaagccctcgaaatcgccgccgccaagaaaaacgtgcgcgtgttggaagtgcctttggaagcaggcgcgaaccgctttgaactcaaacgcgtcggcggcggattgttggtacaaacgcccgacatccaccgcatcagccgcgccgatttgaaagtcgtctccaaacgccaaccgaccgaacaggaatggaacgatttgctgttcgtttggaacgtcgcaaaatacgtcaaatccaacgccatcgtcttcggcaaaggcggtcaaacctacggcatcggcgcaggccaaatgagccgcgtggacagtacccgcatcgccgcccgcaaagcgcaggacgcaggcttggacttaaacggcgcatgtgccgcctctgatgctttcttccccttccgcgacggcgtggacgtgattgccgagcagggcatcaaagccatcatccatccggcaggttcgatgcgcgatcaggaagtcttcgacgcagcggacgaacacggcatcgccatggtcgtaaccgacgtgcgccacttccgccattaa

SEQ ID NO: 37636 - DNA, 1509 bp, Neisseria meningitidis
atgcaaaccgattgcgacgtattgattgccggaaacgggctggcggcactgacgctcgccctgtcgctgcctgaatcgttccgcatcgtcattttgtgcaaaaaccggctggacgacaccgccagccgtcatgcgcaaggcgggattgcggcggcgtggtcgggagaggacgacatcgaaaaacacgtcgccgatactttggaagcgagcgcaggtttgtgcgacgaagccgccgtccgcaccatcctgtcgcagggcaaaccggcaatcgaatggctgctggcgcagggcgtggcgttcgaccgaaattatgacggcctgcacctgacgcgcgaaggcgggcacacctgccgccgaatcgcccacgtcgccgactacacgggcgaagccgtcatgcagagcctgcttgcccaaatacgccgccgcccgcacatccgcgtttgcgagcggcagatggcgttggacattcaaaccgaatcaggtgtggcgtgcggactgatcgtccttgaccgccgaacgcaagaaacctacctcatccgcgcccgccataccgtactcgcaggcggcggcttgggacagatttacgccgccaccaccacgccgcccgaatgcacgggcgacgccatcgccatggcgatacgcgcaggctgtgcagttgagaacctcgaatttatccaattccaccccacaggcttggcaagatcgtctgaaaacggccgtaccttcctgatttccgaagccgtgcgcggcgaaggcggcatcctgaccaaccaagcgggcgaacggtttatgccgcattacgaccgccgcgccgaactcgcgccgcgcgacatcgttgcccgcgccatcgccgccgaaatcgccaaacaaactccagacttcgtctcgctcgacatcagccgccaacccgaagcgttcgtccgccggcattttccgtccatccatcggcactgtttatcccaatgcggcctggacatcacgcgccaagccatccccgtccgccccgtgcaacactacacctgcggcggcatccaaaccgacccctgcggcagaacctccctgccgcagctctacgccttaggcgaaaccgcctgcaccggcttgcacggagccaaccgcctcgccagcaactccctgctcgaatgtgtcgttaccgccagacttgccgcccaaaccatcgcggacggacaagcattccaagccaaaacgtctccaaggccgtctgaaaacccctccgccgaagcaggcatctttgcagacgaccttcaaaacacattcagccgccccgtcctgcaaacgttcaaccaacgccatctcggcatcctacgcagcgataccggcctgcgccgcgccatcgcccaactgcggctttggaagcaaaaccaagccgaaccgcacaccgcgtccgaatacgaaaaccgcaacctgctcgaatgcagcctcgccgtcgcccaagccgcatacaggcggagacagaacatcggcgcgcattttaatagtgattgttaa

SEQ ID NO: 37637 - DNA, 1335 bp, Neisseria meningitidis
atgactgacctgaacaccctgtttgccaacctcaaacaacgcaatcccaatcaggagccgttccatcaggcggttgaagaagtcttcatgagtctcgatccgtttttggcaaaaaatccgaaatacacccagcaaagcctgctggaacgcatcgtcgaacccgaacgcgtcgtcatgttccgcgtaacctggcaggacgataaagggcaagtccaagtcaaccggggctaccgcgtgcaaatgagttccgccatcggtccttacaaaggcggcctgcgcttccatccgaccgtcgatttgggcgtattgaaattcctcgcttttgaacaagtgttcaaaaacgccttgaccaccctgcctatgggcggcggcaaaggcggttccgacttcgaccccaaaggcaaatccgatgccgaagtaatgcgcttctgccaagcctttatgaccgaactctaccgccacatcggcgcggacaccgatgttccggccggcgacatcggcgtaggcgggcgcgaaatcggctacctgttcggacaatacaaaaaaatccgcaacgagttttcttccgtcctaaccggcaaaggtttggaatggggcggcagcctcatccgtcccgaagcgaccggctacggctgcgtctatttcgcccaagcgatgctgcaaacccgcaacgatagttttgaaggcaaacgcgtcctgatttccggttccggcaacgtggcgcaatacgccgccgaaaaagccatccaactgggtgcgaaagtactgaccgtttccgactccaacggcttcgtcctcttccccgacagcggtatgaccgaagcgcaactcgccgccttgatcgaattgaaagaagtccgccgcgaacgcgttgccacctacgccaaagagcaaggtctgcaatactttgaaaaacaaaaaccgtggggcgtcgccgccgaaatcgccctgccctgcgcgacccagaacgaattggacgaagaagccgccaaaaccctgttggcaaacggctgctacgtcgttgccgaaggtgcgaatatgccgtcgactttgggcgcggtcgagcaatttatcaaagccggcatcctctacgccccgggaaaagcctccaatgccggcggcgtagcaacttcaggtttggaaatgagccaaaacgccatccgcctgtcttggactcgtgaagaagtcgaccaacgcctgttcggcatcatgcaaagcatccacgaatcctgtctgaaatacggcaaagtcggcgacacagtaaactacgtcaatggtgcgaacattgccggtttcgtcaaagttgccgatgcgatgctggcgcaaggcttctaa

SEQ ID NO: 37638 - DNA, 471 bp, Neisseria meningitidis
ttgccccttcaaagcgacagcaggcagcctattcagattgaggccgaccaaggttcgctcaatcaagccaaccaaagcactacatttagcggaaacgttgtcatcagacagggtacgctcaatatttccgccgcccgcgtcaacgtaacgcgtaatgacaaaggcgaacagtttatgaaggccgacggctcgcccgtacgcttcagccaaacgttggacgggggcaaagggacggtgcgcggtcaggcaaacaacgttgcttattcgtctgcaggcagcaccgtagtcttaaccggtaatgccaaagtacagcgcggcggcgatgtcgccgaaggcgcggtgattacatacaacaccaaaaccgaagtctataccatcagcggcagtacaaaatccggcgcaaaatccgcttccaaatccggcagggtcagcgtcatcatccagccttcgagtacgcaaaaatccgaataa

SEQ ID NO: 37639 - DNA, 705 bp, Neisseria meningitidis
ttgtggcaaaaccccaaatccatcgtcgaactctacatccaagaaggcaaatcagacgcacgcacgcgcgaagtgttggaaaaggcggcaaacgaaaacatccgcgtatattttgttgacaccacccgtcttgatgccatcagcaaaggcgcgcgccatcagggtgtggccggatttatcgatgcctccaaaaaccacgtccatctcgaagacgtattggaaaacttaagcgaaccgccgctgctgctgatactcgacggcatcaccgacccgcacaacctcggcgcatgcctgcgtaccgccgacgcaatgggcgtacacgccgtcatcgcaccgaaagacaaaagcgcggggctgaacgccaccgtcagcaaagtcgcctgcggtgcggcggaaaccgtcccctatatcaccgtaaccaacctcgcccgcaccctgcgcgaattgaaagaatacggcatttggattatcggcaccgatatgagcggcgagtccgacctttaccattgcaatctgcccgacagagcggcgtgggtaatgggcaacgaaggcgacggtatgcgccgcctcacgcgcgaacattgcgacatgctggtgtctatacccatgttcggcacagtcgaaagcatgaacgtctccgtgtctgccggaatggtattaagtgaaacacgccgacaacgcgtattaaaaaacgaaaaagtataa

SEQ ID NO: 37640 - DNA, 810 bp, Neisseria meningitidis
atgacaccgctcaaaatcgccatcgccggcgcaaacggccgtatggggcgcgtcctcgtcgaagccgtcaacaaccatcccgacaccgtcctttccggtgcgcttgaacactcaggctcagaagccctcgggctggacgcaggctacgccgtcggactcaaaaccggcatcgccatttcagacgacgttgacgccgttctcgcacaaagcgacgtactcatcgacttcacccgccccgagcccaccctcaaacacctgcaaaaatgcgttgaaaaacaagtcaacatcatcatcggcacaacaggcttcgacgatgcgggcaaagccgctatccacactgccgccgaacaaacaggcatcgttttcgccgccaacttcagcgtcggcgtcaacctcaccttccacatcctcgacaccgtcgcccgcgtgttaaacgaaggctacgacatcgaaatcattgaaggccaccaccgccacaaagtcgatgcccccagcggcaccgcgttacgcatgggcgaagtcatcgccggcgcgctcggcagagacctcaaacaatgcgccgtttacggccgcgaaggccacaccggtccgcgcgatccgtcgaccatcggctttgccaccgtccgcgcaggcgacatcgtcggcgaccacaccgccctcttcgccaccgacggcgagcgcgtggaaatcacccacaaagccggcagccgcatgacctttgccgccggcgccgtccgcgccgcagtttgggtaaacggcaaaacgggtttgtacgatatgcaggacgtactcgggctgaacaaccgttaa

SEQ ID NO: 37641 - DNA, 1485 bp, Neisseria meningitidis
atgccgtataatcaagcccctgattttttatgcgccgacactatgcatccgacctattccgccgtacaggcgcggctgctcgaagccaaccgcctttcccccgaactgctcgccaaaagcctgtgcatcatcggcgcgcaccacgtcgattacgccgacatctactgccagcgcaccgcttatgaaagctggcatttggaagagggcatcgtcaaatcgggcagcttccaaatcaatcagggcgtgggcgtgcgcgccgtttcgggcgataaaaccgcctttgcctacgccgacagcctgtgcatcgattcgataaaccgttccgcccgcgccgtccgcgcgattggggcggcaggcggcaaggtgtccgccaaaatgccgtctgaaacgcgcggcaagccggtttgttccgcgtccgaccccattgccggcctcgattccgccgccaaagtcgcgctgttgaacaaagtggaagcaatcgccaaagccgccgatccgcgcatcgtgcaagtgatggccggtttgacctgcgaatacgatatggtttacctcgcccgtctggacggcaaacacgccgccgacatccgcccgatggtgcgcctgaacgttaccgttatcgccaaacagggcgaacgccgcgaacagggcagcgcgggcggcggcggacgctacgacttggcttatttcgatgaaaacttggtgcggcagtttgtcgatgccgccgtcaaacaggcactcaccaacctcgaatcccgccccgcgcccgccggcgaaatgaccgtcgttttgggcaacggctggccgggcgtgttgctgcacgaagcggtcggacacggtttggaaggcgatttcaaccgcaaggggaccagcgtcttttccggcagaataggcgagcgcgtcgccgccaaaggcgttaccgtcgtcgatcagggcgatattgccggccggcgcggttcgctcaacatcgacgacgaaggcaacgaaacccgccgcaccgtattgattgaagacggtattttgaccggctatatgcaggacgaaaccaacgcccgcctgacgggtacgcaatcgaccggcaacggccgccgcgaaagctacgcctccgcccctatgccgcgcatgaccaatacctttatggaaaacggcagctatgagccggaagaaatcatcgcgtccatcgacaaaggcatttacgccgtcaacttcggcggcggacaggtggacattaccagcggcaaatttgtgttcagcgcgtccgaagcatggtgggtggaaggcggcaggctgcaatatcccgtcaaaggcgcgaccattatcggcaacggtcccgaagtgctgaaacacgtttcgatgataggcaacgataccgcgctcgacagcggtgtcggcgtgtgcggcaaagaagggcagagcgtccccgtcggcgtggggcaaccgactttgcggattgatgccggactgaccgtcggcggcagcgcaatctga

SEQ ID NO: 37642 - DNA, 237 bp, Neisseria meningitidis
atgcgcaaagcctgccgcaaccgtccgctggcggaagtgcaaaccaaacgtaaccgatatttatcgaagacccgttatgtggtcgagcaaagcttcggtacgctgcaccgtaagttccgctatgctcgggcagcctatttcgggctgctcaaagtgagtgcgcaaagccatctgaaagcgatgtgtttgaaccttttgaaagccgccaacaggctaagtgcgcccgctgccgcctaa

SEQ ID NO: 37643 - DNA, 120 bp, Neisseria meningitidis
atgagtgataagccaattttattgagccctgcggcgaaaaaagaggctttggatcgggcggtaaaggaaatccgcgcgaaatatggcgataaggcgattgtgaaaggatgtgtgaaatga

SEQ ID NO: 37644 - DNA, 624 bp, Neisseria meningitidis
atgtttttgaggaaaagaaatgacccgtcatctctgcaacaggctgccgaaagccgccgttccatttattcgttaaataaaaatctgcccgtcggcaaagatgaagttgtccaaatcgtcgaacacgccgttttgcacacaccttcttcgttcaattcccaatctgcccgcgtggtcgtgctgtttggcgaagagcatgataaggtgtggcaatttgtcgaagacgcgctgcgtgccgccgtgcctgccgacagttttgaaccgaccgcgcaaaaattgaacctgtttaaggcgggtgcggcaaccattttgttttatgaagatcaaaatgtcgtcaaaggtttgcaggagcagttccctgcttatgccgccaactttcccgtttgggcggaccaggcgaacgcgatggtgcagtatgccgtttggacgacacttgccgcggtcggcgtaggtgcaaacctgcaacattacaatcccttgcccgatgcggcgattgccaaagcgtggaatatccccgaaaactggttgttgcgcgcgcaaatggttatcggcggtattgaaggggcggcaggtgaaaagacctttgaaccagttgcagaacgtttgaaagtgttcggcgcataa

SEQ ID NO: 37645 - DNA, 567 bp, Neisseria meningitidis
atgagcatcaagtccgacaaatggatacgccgaatgagcgaagaattcggcatgatcgaccctttcgagccgaaccaaatcaaagaagccgacggcaaacgcatcatctcctacggtacgtccagctacggctacgacatccgctgcgcaaacgaatttaaaatcttcaccaacatcaacagcaccatcgtcgatcccaaaaacttcgacccgaaaaacttcgttaccgttgaagacgactgctgcatcatcccgcccaattccttcgcactggcgcgcacggtcgaatatttccgcatcccgcgcaacgtcctgaccgtctgcttgggcaaatccacctacgcccgctgcggcatcatcgtcaacgttaccccgttcgagccggaatgggaaggctacgttaccctcgagttttccaacaccacccccctgcccgccaaaatctacgccggcgaaggcgtggcgcaagtcctcttcttcgagagcgacgaaatctgcaaaacctcatacaaagaccgcaacggcaaatatatggggcaaaccggcgttaccctgcctaaagcctga

SEQ ID NO: 37646 - DNA, 1431 bp, Neisseria meningitidis
atgacctgggaaaccgtaatcggcttggaaatccacgtccaattgaacaccaaatccaaaatcttcagcggcgcatcgaccgcattcggcgcagaacccaacgcgcacgccagcgtagtggagtgcgcgctgccgggcgtactgccggtaatgaaccgagaagtcgttgaaaaagccatcaaattgggtttggctttagatgcgaaaatcaatcagaaaaacgtgttcgaccgtaaaaactacttctatcccgacttaccaaaaggctatcaaatcagccagttggacttaccgattgtcgaacacggcaaattggaaatcgtagtcggcgacgatgtgaaaaccatcaacgtaacccgtgcgcacatggaagaagacgcaggcaagtccgtgcatgaaggcttgaacagcgcaaccggtatcgacctgaaccgcgccggcacgccgctgttggaagtcgtatccgaacccgaaatgcactccgccgccgaagccgttgcctacgccaaagccttacacagcttggtaacctggctggacatttgcgacggcaatatggcggaaggttcgttccgcgtcgatgccaacgtatccgttcgcccgaaaggccaagcagagttcggcacgcgccgcgagattaaaaacctcaattccttccgcttcttggagcaggcaattaattacgaagtggaagcgcaaatcgagattttggaagacggcggcaaagtacagcaggcaaccatgctgtttgatcccgaaaaaggcgaaacccgcgtgatgcgcctgaaagaagacgcgcaagactaccgctacttccccgaccccgatttgctgcccgtcatcatttcagacgctcaaatgcaaaaagccaaagcagaaatgcccgagctgccgaaagaaatggcggcacgtttcgtggcggattacggtgtgagcgactacgacgcacgcctgctcaccgccagccgcgcacaggccgcctattttgaagaagccgccaaagagagcggacaaggcaagccgactgccaactggatgaacggcgaactcgccgccgcactgaacaaagccggtctggaacttgccgacagcccgattaccgccccgcgcctcgccgcgctggtaggcaaaatcgccgacggcacattaagcagcaagttagcgaaaaaagcctttgaagccatgtgggcagaacccgaagccaccattgccgaaatcattgaaaaacacggcttgcagcaaatgaccgataccggcgcagttgaagccattgtggacgaagtgctggcaaacaacgccaaagccgtggaacaattcaaatccggcaacgaaaaagccctgaatgcgattgtggggcaagtgatgaaggccagcaaaggcaaagcgaatcccgcgcaggttcaagagctgattaaagccaaactggcttaa

SEQ ID NO: 37647 - DNA, 960 bp, Neisseria meningitidis
atgaaacctgtttttttggattttgaacaacccatagccgaactgaccaacaaaatcgatgagctgcgtttcgtccaagacgagtctgccgtcgatatttcggacgaaatacaccgtttgcagaaaaaaagcaacgacctgaccaaatcgattttcagcaaacttacgcccgcccaggtttcacaggtttcccggcatccgcagcgtccctatactttggattacattgaggcactgtttactgattttgaagagctgcacggcgaccgccactttgccgacgattatgcgattgtcggcggattggcgcgtttcaacggacaaagcgtgatggtcgtcgggcatcagaaagggcgcgacaccaaagaaaaaatccgccgcaacttcggtatgccccgtcctgaaggctaccgcaaagccctgcgcctgatgaagacggcagaaaaattcggcttgcccgtcatgacctttatcgatacgccgggcgcgtatcccggcatcggcgcggaagaacgcgggcagtcggaagccatcggcaaaaacctgtacgaactgacgcgcctgcacgtccccgttttgtgtaccgtcatcggcgaagggggctcgggcggtgcgttggcggtcgccgtaggcgattacgtcaatatgctgcaatactcgacctattccgttatttcccccgaaggctgcgcttcgattttgtggaaaaccgccgaaaaggcggcggatgcggctcaggctttgggcattactgccgaccggctgcaaaagctggacttggtcgataccgtcatcaaagaaccattgggcggcgcgcatcgggatttcgggcaaaccatgaaaaacgtaaaagccgttttggaaaaacaactgcacgaagcgcaaagcatcccgcttgccgatttgctttcgcgccgtttcgaccgcattatggcttacggcaaattttcggaacaataa

SEQ ID NO: 37648 - DNA, 978 bp, Neisseria meningitidis
atgatttatccgtggcataatgagcaatggcggcagattgcggaacattgggagcgtcgtcccaatgcatggctgtttgccggcaaaaaagatacggggaaaactacatttgcccgctttgcggcgaaggcactgttgtgcgaaacccctgcaccgggctgcaaaccctgtggcgaatgtatgtcctgccatctgtttggacagggaagccatcccgatttttacgaaatcacccccttgtcggacgaacccgaaaacggacgcaaactgttgcagatcaaaatcgatgccgtcagggaaatcatcgataatgtgtacctgacttcggtacggggcggtttgcgcgtggttctgattcatcctgcggaaagtatgaatatccaggccgccaacagtttgttgaaagtgttggaagagcctccgccacaagtggtctttttgctggtcagccacgcggcggacaaggttttaccgaccattaaaagccgctgccggaagatggttttgcccgcgccttcccatgaagaggcattggcatatctgcgtgaaaggggtgtggcggaacctgaggaacgtctggctttccattccggagcgccgctgtttgatgaggcggacggtgtccgtgcgttgcggattaaactgttggatattttggcagaaccgaggttgttgaagattttggattacgccgcgcttttcgataaggaaaaacttccgctcgccgtatttgtcgggtggatgcagaaatggctggtcgatttgggattgtgcctgcaacacatgaaacccgtctattatcccgcttatgaagacaggctgcttcagacggcatccggtttccgcctgcgcaatgtatttgcggcggaggatatgctcaaacagcttgccccctacgggtttcatactttaaatgtcaaaatgcagatcgagcatctgctcatcaactatttggaattgaagaaagagaacgggtga

SEQ ID NO: 37649 - DNA, 381 bp, Neisseria meningitidis
atgccgtccgaaccacccgccgcttcaggtctgtccggggcgatacaacaaggaagaaatatgattacccttaccgagaatgccgcaaaacacatcaatgactatctcgccaaacgcggcaaaggcttgggcgtacgcttgggtgtgaaaaccagcggctgctcggggatggcgtacaaccttgaatttgtcgatgaagccgatggcgacgacctgatttttgaaggacacggcgcacgcatttatatcgacccgaaaagcctggtttatctggacggcacacaagtcgattacaccaaagaaggtttgcaggaaggtttcaaatttgaaaaccccaatgtcaaagactcctgcggctgcggcgaaagcttccatgtttaa

SEQ ID NO: 37650 - DNA, 1011 bp, Neisseria meningitidis
atgagcaaaaaacgagttctgaccggcgtaaccaccaccggcatcccgcatctgggcaactacgtcggtgctatccgccccgccgtccgcgcggcgcaaaaccctgataccgaatccttcctcttcctcgccgattaccacggtatcatcaaatgccacgagccggagatgattcaccaatccacccaagccgttgccgccacttggcttgcctgcggactcgaccccgagcgcaccaccttctaccgtcaaagcgacattcccgaagtgatggaattgaactggattctgacctgcatcaccgccaagggtttgatgaaccgcgcccacgcctacaaagccgccgtgcaggcaaatgcggaaaacgggcaggaagaccccgatttcggcgtggaaatgggtttgttcagctatccgattctgatgaccgccgacatccttatgttcaacgccaacgaagtccccgtcgggcgcgaccaaatccaacacgtcgaaatggcgcgcgacatcgccggccgcttcaatcaccgctttaaagaaatctttaccctgcccgaagtgaaaatcgacgaaaacgtcgaactcttggtcggtttggacggacgcaaaatgtccaaatcctacggcaacaccattccgctttgggaaaacgacaaaaaaacccaaaaatcggtcaacaaaatcatcaccaatatgaaagagccgggcgagccgaaacagcccgacgaaagcccattgtttgaaatctacaaagccttctccacgccgtctgaaaccgcagcgttcacgcaaatgcttgccgaaggcttggcttggggcgaggcaaaaaaacttttggcggcgaaaatcaacgccgaactcgccgaaccgcgcgaacgctacaacgagctgaccgccgacccttcgcaaatcgaagagattttgcaggcaggcgcgcaaaaagcgcgtaaagaagcacgcgaattgttggacaaagtacgcgatgcggtcggcatccgcccgttgaaataa

SEQ ID NO: 37651 - DNA, 270 bp, Neisseria meningitidis
atggcaatgaacaaattgaatttccttctgctgcttgcggtgtgcgtttccgctttttccgttgtgatgcagcaaaaccagtacaggctcaacttcacagctttggataaggcgaaaaaacaggaaatcgccttggagcaggattatgcgcaaatgaggctgcaacaggcgcgtttggcgaaccacgaagcgatcagggcggcggcagaaaaacaaaacctccatccgccggtttcgggcaatacctttatggtggcgcatcaaagatag

SEQ ID NO: 37652 - DNA, 588 bp, Neisseria meningitidis
atggaacataagctgccgcaactgccttatgaactggacgcattgtccccgcatctgagcaaagagactttggaattccactatggcaaacaccatcaaacctacatcaccaacctgaacaatcaaatcaaaggcactgaatttgaaaacctgcctttggaagagattgtgaaaaaatcttcaggcggcgtgttcaacaacgcagcccaaacttggaaccacactttctactggctgggtttcacgtccaaaggtcaaggcaaacctgccggcaaactggccgccgccatcgacgcgaaatggggcagcttcgagaaattccaagaagcgttcaatgcctgcgcggccggtactttcggctccggttgggcgtggctggtaaaaacccctgccggcggattggatttggtttccacttccaacgccgctacgccgctgaccactgaaaacacgccgctgctgacctgcgacgtgtgggaacacgcctattacatcgactaccgcaacagccgtcccaactacctgaaaggtttctgggaaatcgtcaactgggacgaagttgccaaacgttttgccgccttgtcctga

SEQ ID NO: 37653 - DNA, 819 bp, Neisseria meningitidis
atgaaaggtatggataaattgagataccaacaggattttttaaatatccgccccatttttacagccggcgaacaagaatacctgaccggattgtccgatcggcttcctttatctgttttaacgggctccgtgcgtaatattgaagaaatcggtatcgattttgtatatagttctgccaaattggaaggaaacacttataatcaatacgatacgcaggcattgcttaaactcgggcaaaccgcaggcgggaagttatattcggatgccgtaatgttaatcaacctgagggaaagttaccggcacctgctgtccggtttggacagccccgagccgtttgactggttggatttcttaaaaaccacccacagcctgatttccgaaaacttactggaaaaaggctccggcggcgtagtccgccgcgacagcgttaccataagcgggacagactacacccctttatctaacccgcaaagtttggatacggaattaaaatggttgcttcaagaagctcccaaaatagaaaatcctttcgaccgcgccgtttatctccataataatttggcgtatcttcaatattttaaagattgcaataaacgtactgccagaaactgcatgaccttgtcgctgatgcgctccggtttttttccttgcgtattcgcccccgacagttatcccgcctatgccgaggctgtcgtagcctattacgaaaccggcgattacggtttattcaagaaatattttatttcggcatacgaaaataccgtaaataagtacggtccccagcctgatatggatatttcccgcaacttctccctttaa

SEQ ID NO: 37654 - DNA, 303 bp, Neisseria meningitidis
atgcaacgtcaatccttaacaaacgctgacggcgaagtgcgggaacttgccgccgaagattttgcgcttgcccgccccattgccgaagccctgcccgaagacttggcacaggtgcttttttcccatcaaaaacaattggaagaaaagggcgtaatgcaaaaacgaaacacaggcaaaaccccgaaacaactcgttaccatacgcctgtccgccgatgtggtcgaaaaattccgcgccggcggcaagggctggcagacgcgcatcaacgaggttttgcgccaatatgtcgcccaattgaaataa

SEQ ID NO: 37655 - DNA, 579 bp, Neisseria meningitidis
atgtcaaacacaatcaaaatggttgtcggcttgggcaacccgggcaaagaatacgaacagacacgccacaatgcgggtttttggttcctcgacgaactggcgtggaaatggaaggcttcatttaaagaagaaaaaaaattcttcggcgaagtcgcccgtgccgccctgcccgacggcgacgtttggctgctcaaacctgccacgttcatgaaccgttccggacaggcaattgccgcccttgcgcagttttataaaatcaaacccgaagaaatcctcgtcgtccacgacgaactcgacattccctgcggacggattaaattcaaactcggcggcggcaacggcggacacaacggcttgaaagacattcaggcaaaactcggcacggcagactattaccgcctgcgcctcggtatcgaccacccaggcgaccgcaacctcgtcgtcggctatgtcctgaacaaacccagtacggaacaccgccgacagattgacgatgccgtcgccaaatccctgcaagccatacccgacatccttgccggcaaatgggaagaagcaacccgcttcctgcacagcaaatga

SEQ ID NO: 37656 - DNA, 375 bp, Neisseria meningitidis
ttgagaaagaaaaccatgtattttgttgaccgcaccgccgtcgtcctcaagccgaccgtccgctttttggaatggctcaaaagcaccgacgaaaatatgcccgacctgaccatagaacagcttcgtgccaactgttccgtcttcctcgttccgcagttcgacgaaccggaagccgtcgtttcctatttcgacgaacgctaccgccagattttcgaggcggagctggcaggttgggacatcgataaggataaatggccgcaagatatggggctgaaggcgttttgggaatttttcgacatcgaaatccacgatatggtgttggacatggaagaagcggaattgaacattacccccgtgttcgacaacatgatgtaa

SEQ ID NO: 37657 - DNA, 1260 bp, Neisseria meningitidis
atgcacgtctccgaattacaaaccctgcacatttccaaactcttagaattggcggaagaacacggcatcgaaaacgccaaccgattccgcaaacaagacctcgtatttgccatcgtccgccaaatgatgaaaaaaggcgagggtttcacctgctccggcacgctcgaaatcctgcccgacggcttcggcttcctccgcagcgcggacacgtcctatcttgcgggccccgacgacatctatgtctcgcccacccaaatccgccgcttcaacctgcatacgggcgacaccatcgaaggcagcgtgcgcgtccccaaagacaacgaacgctattttgccctagtcagactggattccatcaacggcgaccacccggaagtatgccgccataaaatcctgtttgaaaacctgaccccgctgtttccgaccgaacagttgaagctggaacgcgacttaaagtccgaagaaaacctgaccggacgagccatcgacctgatttcgcccatcggcaaaggtcagcgcgccctcttggttgccccgcccaaaagcggtaaaaccgtgatgctgcaaaacattgcccacgccgttacctcaaactatcccgaagtcgaactcatcgtcctcttgattgacgaacgccccgaagaagtaaccgaaatgagccgttccgtccgcggcgaagtggtttcctccacctttgacgaaccggcgcaacgccacgtccaagttgccgaaatggtgcttgaaaaagccaagcgtatggtagaacacaaaaaagacgtggtcatcctgctggattcgattacccgccttgcccgcgcctacaataccgtcgtgcctacctcgggcaaaatcctaaccggcggtgtcgatgccaacgcactgcaccgccccaaacgtttcttcggcgcggcgcgcaacgtggaagaaggcggttcgctgaccatcatcgccaccgcattggttgaaaccggcagccgtatggacgatgtgatttacgaagaattcaaaggcaccggcaatatggaattgcaccttgaccgccgtatggcggaaaaacgcctcttccccgccatcaacatcaacaaatccggcacgcgccgcgaagagctgcttgtgccgaacgaccagttgcaacgtatgtggctcttacgcaagttcctgcacccgatggacgaaatcgaggcagccgaatttttaatcgggaaaatcaaagcctctaaaaacaatgatgatttctttgaactgatgcgcggcaaataa

SEQ ID NO: 37658 - DNA, 561 bp, Neisseria meningitidis
atgaacagactgctactgctgtctgccgccgtcctgctgactgcctgcggcagcggcgaaaccgataaaatcggacgggcaagtaccgttttcaacatactgggcaaaaacgaccgtatcgaagtggaaggattcgacgatcccgacgttcaaggggttgcctgttatatttcgtatgcaaaaaaaggcggcttgaaggaaatggtcaatttggaagaggacgcgtccgacgcatcggtttcgtgcgttcagacggcatcttcgatttcttttgacgaaaccgccgtgcgcaaaccgaaagaagttttcaaacacggtgcgagcttcgcgttcaagagccggcagattgtccgttattacgaccccaaacgcaaaaccttcgcctatttggtgtacagcgataaaatcatccaaggctcgccgaaaaattccttaagcgcggtttcctgtttcggcggcggcataccgcaaaccgatggggtgcaagccgatacttccggcaacctgcttgccggcgcctgcatgatttccaacccgatagaaaatcccgacaaacgctga

SEQ ID NO: 37659 - DNA, 1383 bp, Neisseria meningitidis
atggcaaatattgcccgcgacatcttcaaagcctacgacatccgaggcattgtcggcaaaaccctgactgacgatgccgcctatctcatcggcagggccatcgccgccaaagccgccgaaaaaggcatgacccgcatcgcgctcggacgcgacggacgcttgagcggtcccgaactgatggagcacatccaacgcggctttaccgacagcggtatcggcgtcctcaacgtcggtatggtcgccacgcccatgctctattttgccgctatcaacgaatgcggcggcagcggcgtgatgattaccggcagccacaatccgcctgattacaacggtttcaaaatgatgctcggcggcgacacgcttgccggcgaagccatccaagagcttttgtccatcattgaaaaagacggttttgctgccgccggcaaacaaggcagcgtaaccgaaaaagacatctccggcgaataccacaaccacatcgtcggacacgtcaaactcaaacgcccgatgaacatcgccattgacgcgggcaacggcgtgggcggcgcatttgcaggcaaactctaccgcgctttgaggtgcggcgttaccgaacttttctgcgacgtggacggcaatttccccaaccaccatcccgacccatccaaacccaaaaacctgcaagatttgattgccgcgctgaaaaacggcgatgccgaaatcggcttggcgtttgacggcgatgccgaccgcttgggcgtggttaccaaagacggcaacattatttatcccgaccgccaactgatgctgttcgcgcaagacgtgttgagccgcaaccccggcgcgaaagtcatcttcgacgtgaagtccacccgcctgcttgccccgtggattaaagaacacggcggcgaagccataatggaaaaaaccggccacagctttatcaaatcctccatgaaaaaaaccggcgcactcgtcgccggcgaaatgagcggacacatcttcttcaaagaacgctggttcggattcgacgacggtctgtacgccggcgcacgcctcttggaaatcctgtctgcctccgataatccgtccgaagtgttaaacaacctgccgcaaagcatttccacgcccgaactcaacattgacctgccggaaggcagcaacggccacaaagtgattgaagagctggctgccaatgccaagtttgaaggtgcgaccgaaatcatcaccatcgacggtctgcgcgttgaatttcccgacggcttcggtctgatgcgtgcttccaataccacgccgattctggtgttgcgttttgaggcagatacgcaagaagccatcgagcggattcaaaaccaattcaaagccgtcatcgaaagcaatccgaatctaatctggcctctgtaa

SEQ ID NO: 37660 - DNA, 1422 bp, Neisseria meningitidis
atggacacaaaagaaatcctcggctacgcggcaggctcgatcggcagcgcggttttagccgtcatcatcctgccgctgctgtcgtggtatttccctgccgacgacatcgggcgcatcgtgctgatgcagacggcggcgggactgacggtgtcggtattgtgcctcgggctggatcaggcatacgtccgcgaatactatgccgccgccgacaaagacactttgttcaaaaccctgttcctgccgccgctgctgtctgccgccgcgatagccgccctgctgctttcccgcccgtccctgccgtctgaaatcctgttttcactcgacgatgccgcccccggcatcgggctggtgctgtttgaactgagcttcctgcccatccgctttctcttactggttttgcgtatggaaggacgcgcccttgccttttcgtccgcgcaactcgtgcccaagctcgccatcctgctgctgctgccgctgacggtcgggctgctgcactttccagcgaacaccgccgtcctgaccgccgtttacgcgctggcaaaccttgccgccgccgcctttttgctgtttcaaaaccgatgccgtctgaaggccgtccggcacgcaccgttttcgcccgccgtcctgcaccgggggctgcgctacggcataccgatcgcactgagcagcatcgcctattgggggctggcatccgccgaccgtttgttcctgaaaaaatatgccggcctggaacagctcggcgtttattcgatgggtatttcgttcggcggggcggcattattgttccaaagcatcttttcaacggtctggacaccgtatattttccgcgcaatcgaagaaaacgccccgcccgcccgcctctcggcaacggcagaatccgccgccgccctgcttgcctccgccctctgcctgaccggcattttctcgccccttgcctccctcctgctgccggaaaactacgccgccgtccggtttatcgtcgtatcgtgtatgctgccgccgctgttttgcacgctggcggaaatcagcggcatcggtttgaacgtcgtccgcaaaacgcgcccgatcgcgctcgccaccttgggcgcgctggcggcaaacctgctgctgctggggcttgccgtgccgtccggcggcgcgcgcggcgcggcggttgcctgtgccgcctcattctggctgttttttgccttcaagaccgaaagctcctgccgcctgtggcagccgctcaaacgcctgccgctttatctgcacacattgttctgcctgacctcctcggcggcctacacctgcttcggcacgccggcaaactatcccctgtttgccggcgtatgggcggcatatctggcaggctgcatcctgcgccaccggaaagatttgcacaaactgtttcattatttgaaaaaacaaggtttcccattatga

SEQ ID NO: 37661 - DNA, 1443 bp, Neisseria meningitidis
gtgaattatttccccattttcgccaacctcgccggccgccccgtattggtcgtaggcggcggttcggtcgccgcgcgcaaaatcagcctgttgctggatgccggcgcgcaagtcagggttgttgcaaatcagttgaatgctgaattaagtgcgctggcggcagaaaacaaaatcctgtggcttgccgaagaatttcgtgccgaacacatccgcacagttttcctcatcattgcggcaagcagcgaccaagccctcaaccggcgcgttttccagcttgccgaaagctgccaaaaaccggtcaacgtggtggacgaccgcgattattgcagttttatttttccttcgattatcaatcgcaatccgattcaaattgccgtttccagttcgggcagcgcgcccgtcctcgcccgtttgctgcgtgaaaaactggaagccctgctgcctcattctttgggcgatatggcggaaatctccggaagatggcgcgatgcggtcaaagccaaactgaaatccgttaccgaacgccgccgtttttgggaaaagcagttcaacggccgttttgccgccctcgttaaaaatcaacaaaccgcccaagccgaacaggagttggcaaagcagttggaacaaaattatcaaggcggttttgtgtctttggtcggcgcgggtcccggcgatgcggggctgctgacgctcaaagggctgcaggaaatccagcaggcagacgtggtgctttacgacgcgctggtttcagacggcatactgtccctcgtccgccgcgatgcggaacggatttttgtcggcaagcgcgcccggggcgaccgcaccccgcaagaggacaccaatgcgcttatggtcaggctggcccgcgaaggcaggcgcgtggtgcgtttgaaaggcggagaccctttcgtgttcggacgcggcggcgaagaattggaaaccttggcacgccatcagattccgttttcggtcgtccccggcattaccgccgccgtcggcgcgaccgcctatgccggtatcccgctcacgcaccgcgattatgcccaaagtgcggttttcgtaaccggccaccgcaaggcggatgcgcccgacatcgaatggcagaccctcgcccgcagccgccagaccttggtgatttatatgggtgcgctcaaagccgccctgattgccgaacggctgcaacagcacggacgctcgcccgacacgccggcagccgtcatcagccaaggcacgctgccggctcaaaaaaccgcaaccggcacgctcgccaaccttgccgaactcgccgaaaccgcgccgaatccggcattgattgtcataggcgaagtggtggggctgcacgaaaaactcgcctggttcggtgaaaacggcgaaggagaaaaccgggtcgggcaggcgtatcccgcattgggcggactgaatgccggacaacgggcggcataa

SEQ ID NO: 37662 - DNA, 1011 bp, Neisseria meningitidis
atgaaccacaccgttaccctgcccgaccaaaccacctttgccgccggcgacggtgaaaccgttttggccgctgccgcccgtcaaaaccttaatctgccccattcctgcaaaagcggtgtctgcggacaatgcaaagccgaactggtcagcggcgatattcaaatgggcggacactcggaacaggctttatccgaagcagaaaaagcgcaaggcaagattttgatgtgccgcaccactgcgcaaagcgatatcagcatcaacatccccggctacaaagccgatgccctacccgtccgcactctgcccgcacgcatcgaaagtattattttcaaacacgatgtcgccctcctgaaacttgccctgcccaaagccccgccgtttgccttctacgccgggcaatacattgatttactgctgccgggcaacgtcagccgcagctactccatcgccaattcacccgaccaagaaggcattttggaactgcacatccgcaggcgcgaaaacggtgtctgttcggaaatgattttcggcagcgaacccaaagtcaaagaaaaaggcatcgtccgcgttaaaggcccgctcggttcgtttaccttgcaggaagacagcggcaagcccgtcatcctgctggcaaccggcacaggctacgcccccatccgcagcatcctgctcgaccttatccgccaaaacagcagccgcaccgtccatttctactggggcgcgcgtcatcaagatgatttgtacgccctcgaagaagcgcaagcgttagcagaccgtctgaaaaacgcctgcttcacccccgtattgtcccgccccggagagggctggcagggaagaaaagggcacgtacaagacatcgcggcacaagaccaccccgacctgtcggaatacgaagtatttgcctgcggttctccgaccatgaccgaacaaacaaagaatctgtttgtgcaacagcataagctgccggaaaacttgtttttctccgacgcattcacgccgtccgcatcataa

SEQ ID NO: 37663 - DNA, 600 bp, Neisseria meningitidis
atggtttttattacgcgcttattcaaaagcattaaacaatggcttgtgctgctgccgatgctttccgttttgccggacgcggcggcggagggcattgccgcgacccgcgccgaagcgaggataaccgacggcgggcagctttccatcagcagccgcttccaaaccgagctgcccgaccagctccaacaggcgttgcgccggggcgtgccgctcaactttaccttaagctggcagctttccgccccgataatcgcttcttatcggtttaaattggggcaactgattggcgatgacgacaatattgactacaaactgagtttccatccgctgaccaaccgctaccgcgttaccgtcggcgcgttttcgacagactacgacaccttggatgcggcattgcgcgcgaccggcgcggttgccaactggaaagtcctgaacaaaggcgcgctgtctggtgcggaagcaggggaaaccaaggcggaaatccgcctgacgctgtccacttcaaaactgcccaagccttttcaaatcaatgcattgacttctcaaaactggcatttggattcgggttggaaacctctaaacatcatcgggaacaaataa

SEQ ID NO: 37664 - DNA, 2790 bp, Neisseria meningitidis
atgaccgattacagcaaaaccgtcaacctgctcgagagcccgtttccaatgcgcggcaatcttgccaagcgcgagcctgcatggctgaaaagctggtacgagcaaaaacgctaccaaaaactgcgcgaaatcgccaaaggccgtccgaaattcattctgcacgacggcccgccgtatgccaacggcgacatccacatcggtcatgccgtcaataaaattctcaaagacatcattatccgcagcaaaacccaagccggttttgacgcgccttatgtgccgggttgggactgccacggcctgcccatcgaagtgatggtagaaaaactgcacggcaaagatatgcccaaagcacgtttccgcgaattgtgccgcgaatacgccgccgaacagattgcccgtcagaaaaaagactttatccgcttgggcgtgttgggcgactgggaccatccttacctgactatggatttcaaaaccgaagccgataccgtgcgtatgctcggcgaaatctacaaatccggctatctctaccggggtgcgaaaccggttcaattctgcttggactgcggttcttcattggccgaagcggaagtggaatacaaagacaaagtatcgcctgcgattgacgttgcctatccgtttaaagacaccgccgcgcttgccgccgcattcggtttggcaggtatcgaaggcaaagcgtttgccgtcatctggacgaccacgccttggacgctgccggcgagccaagccgtatctgtcggcgcggacgtggtgtatcaattaatcgatacgcccaaaggcaaattggtgctggcgaaagatttggcggaagacgctttgaaacgctacggcttttcagacggcatcgccatccttgccgaaaccaccggcgacaagctggaaaacctgcatatgaaccatccgtttttggaacgcgatattcctatgctcaacggcgaccacgttactaccgatgccggtaccggcttggtacacaccgcccccgcgcacggtttggaagactacgccgtctgcaataaatacggcatcgagctttacaaccccgtcaacgccgaaggccgatacatcggcgaaacgccgcgtgtcgccggtatgcgcgtttgggaggcgaaccccgtcatcctgcaatggttggaagaaaccggcaaccttttggcaagcagtaaaatcgaacacagctacgcccactgctggcggcacaaaacgccgctgatttaccgcgcgacaggtcaatggtttgtcggtatggacaaagccggtgccgacggcaaaaccctgcgcgacaaagccatcaaggccgtggacgacaccgaattcttcccgtcttggggtcgcgcgcgtttggaagccatgattgaaggtcgtcctgactgggtggtttcacgccaacgctattggggcacgccgatgactttctttgttcacaaagaaacgggcgagctgcatccgaactctgccgaacttttggaaaaagttgccctgaaaatcgaagaaaaaggcatcgaagcgtggttctccctcgataagagcgaactcttgagcgcggaagattgcgaaaattacgataaactttctgacacaatggacgtatggttcgactctggctcgacccattattccgttgtgaaacaacgcgaagaattggaatggccggctgatttgtatctcgaaggcagcgaccaacaccgcggctggtttcaatcgtccatgctgaccggctgcgcctcatcaatgggtcgcgcaccgtataaacagctgctgacccacggttttgttgtagacggcgaaggcaaaaaaatgtcgaaatccatcggcaacgtcgtcgcgccgcaagaagtctataacgaattcggcgcggacatcctgcgtctgtgggcggcatctaccgattacagcggcgaattggcgatttctaaagaaatccttaagcgcgtaaccgaaagctaccgccgtatccgcaataccttgagctttttgtttgccaacttgagcgactttaatccgattgaagatgccgtgcaacaggcggatatggtggaaatcgaccgctatgccctggtgttggcgcgtcggctgcaagagcgtctggcaggcgattactatccgcgttatgccttccattttgccgtgaaagaaatggtttctttctgctcggaagacttgggcgcgttctacctcgatatcctgaaagaccgcctctacaccaccaaagccgacagccgcgcccgccgcagcgcgcaaaccgccctgtaccacatcacgcgcagcctggttctcttgattgcaccgattttgtgctttaccggcgaagaagcgtgggacatcatcggcggcggcgaagaagacagcgtcctcttccatacttggcacgagttcccgaccatcaacgaaaaaaccgaagccgaactggtgaaaaaatggacggcaatccgcgaagcccgcgaagcggtaaccgccgccatcgagcctttgcgcgccgacaaaaccgtcggttcgtccttgcaagccgaagccgaaatcaccgcgccggaagaaatggccggctacctgaacgccttgggcgaagaattgcgctttgccatgctggtgtctaaagcagaagtgaaagtaggcagcgaacttgccgttgccgctaaagccagtgatggtgaaaaatgcgaacgctgctggcactacacccgcgatgtgggcgcggttgcaggctatgaaaccgtctgcaaacgctgtgcagagaatgtcggcggagaaggcgaaacgcgccattacgcctga

SEQ ID NO: 37665 - DNA, 483 bp, Neisseria meningitidis
atgaaatacttgaatcttgccgcaatcacccttgccgccacatttgccgcacataccgcctcggcagacgaactggccggatggaaagacaacaccccacaaagcctgcaatcactcaaagcccccgtacgcatcgtcaacctttgggcaacctggtgcggcccgtgccgaaaagagatgcccgccatgtccaaatggtacaaagcgcagaaaaaaggcagcgtcgatatggtcggcatcgcgctcgacacatccgacaatatcggcaacttcctcaaacaaactcctgtttcctacccgatttggcgttacaccgaggcgaacagccgaaactttatgaaatcctacggaaacaatgtcggcgtactgccctttaccgtcgtcgaagccccgaaatgcgggtacaaacaaaccattaccggggaagtgaacgaaaaaagcctgaccgaagccgtcaaactcgcccattcaaaatgccgttaa

SEQ ID NO: 37666 - DNA, 843 bp, Neisseria meningitidis
atggataaagaacgaattttaacccccgcagtcgtgttttccgtcgcactgctgcatttggcaatggtggcattgctctggcaggcgcacaagctgcccgtgatagagtcaggcaatgttattgaatttgtcgatttgggcgattttggcggaggggacggcgcacccgaaggtgcaggcgcgcctgccgcgcccgaaccgcaacccgtgcccgagccgcccaaacctgtcgagccgcccaagccggttttgaagccggtggttacgaaaaaggcggatgcggatattcagcagcctaaggaagagccgaaacctgaagaaaagccgaaacccgaagaaaaaccgaaaccagagcctaagccggaagcgaagcctgtcccgaaaccggcggaaaaaccggtcgagaagccgtctgaaaaacctgccgaacatcccggcaatgcttctgccaaagcagacagcgagcagggcaatggggaagataagggaaccggtatcaaaggagacggaacggggcgcggagaaggcagcggtaaaggtagcggcggtgtcaaaggcgaacacggggaaggagccggcagcagcaaaggcaatcctttacgcgccaacggcagcattccgcgcccggcttatcccacgctttctatggagaatgatgagcagggtacggttgttttgagcgttttggtttctccgggcggtcatgttgagtccgttaaaatcgtgaaaagcagtggtttttcccggttggacaatgcggcacgcaaggcggcgcaaaacgggcattttcaagccaatgcctggacggagtttaaagtccccgtcaagtttgaattgaattag

SEQ ID NO: 37667 - DNA, 1497 bp, Neisseria meningitidis
atgaccacggaaaaccaagccggcagtccggcatccggaatcggcacgtccgaacaaacaaaagccgcgccgaaagcaaaaaaaacattcgatccgcgagccagcgtgattcaaatccatcccgaaggcgaacgcatccatcccaaaaaggcggaaggacggttcgccaaactgcgtatcgccgccgtattggcgacgcagtttgtgttttacgtcattccgtggttcaactggagcggcaggcaggccgtcgttttcaatatccccgaacggcatttcttcattttcggattgtcgttgggggtgggcgatttgatttaccttgccttgctgctgatgatttgcgccttcgggctgttttggtggacgacgattgcagggcgactgtggtgcggctattcctgcccgcaaacggtttacaccgaaattatgctgtggattgacaacctggtcgaaggcgatagaaacaaacggctgaaactggaaaaatcgccgtggaatttcactaaaatccgcatcaaagccaccaaatacctgctgattttccttgtctgcgcgtggacgggcatcacgtttgcaggctggtttgtccctatccgccagttcgttcccgatttattcactggagcagcaggcggcggcgcgatgtttgccacagcgttttacggctttatgaccttcttcttcgcacatattatgcgcgaaaaagtatgcctgcatatgtgtccgtatgcacgtttccaaagcgcgatgttcgacaaggacacgctgattgtttcttatgacgcggaacgcggcgaaccgcgcggagcccgcaagaaaacggtcaacaaggaagaggcgggtttgggcgactgcatcaactgtgcgatgtgcgtccaagtctgccctgtcggcatcgacatccgcaacggtctgcagtaccaatgtatcggctgcgccgcctgtatcgacgcgtgtgatgagattatggacaaaatgggctatccgcgcggattaatccgttatacgaccgaaagcgcgctggaacacgaatattctgaaaaagacattaaaaaacggctgctcagaccgcgtgtggcaggttacggcgcggtgttggcgttagttatcattgccttcctggccggtttgtccacgcgcaaaatggtcgaggtcgatattttgaaagaccgtggcgtactggtgcgcgaaaacgccaaaggctggctggaaaacgcatacagcctgcgtatcatcaacaaaagtgaaaaagaacagctcattaccgcaagtgtcaaaggctttgacgaaatcgccctgaccgggctgcccgaaggcggtatcaaggttgccccgcgcgaaacggtaacccttcccgtccaagtgtccaccattccggaatacgcggacaaaggcagccaccctatcgaatttaccttccaataccgcgaaagcggcgcgcccgacggcaagccggtcgtcttggaagaagatgcaacctttatcggagaataa

SEQ ID NO: 37668 - DNA, 1869 bp, Neisseria meningitidis
ttgccgagcaagccccaaaacttacccgagcgacagcaatcggttattgataaagtaaaaacagacgatggcagcaatatttacacttccccttatctcacgcaatcaaaccatcaaaacggcagcactaatagcggtgcaaaccaaccaaaaaacgaagcaacaggttacaaaaatttcgaatatgtttattccggttggttttataaacatgcagcgaatgaaacagatttcagtaaaaacaaatttaagtcaggcgacgacggctatatcttttatcacggtgaaaaaccttcccgacaacttcccgcttctggaaaaattacctataaaggtgtgtggcattttgtaaccgatacgaaaaagggacaaaaatttaacgatattcttgaagcctcaaaagggcaaggcgacaggtatagcggattttcgggcgatgaaggcgaaacaatttccaatagaactgattccgagcttaagacggatcaagagggttatggttttacctcaaatttagaagtggatttcggcagtaaaaaattgacgggtaaattaatacgcaataatagagttacaaacgctactactaacgataaatacaccacccaatactacagccttgatgcccaaataacaggcaaccgcttcaacggtaaggcgatagcgaccgacaaacccgacactggaggaaccaaactacatccctttgtttccgactcgtcttctttgagcggcagctttttcggcccgaagggtgaggaattgggtttccgctttttgagcgacgataaaaaagttgcggttgtcggcagcgcgaaaaccaaagacaaaaacgcaaatggcaatactccggcggcttcaagcggcgcaggtgcggcaactatgccgtctgaaaccaggctgaccacggttttggatgcggtcgagctgaaatcggacggtaagaaagtcgaaaatctcgacaacttcagcgacgctacccgactggttgtcgacggcattatgattccgctcctgcccgagacttccgaaagtgggagcaatcaggcagataaaggtaaaaaaggtaaaaacggtaaaaacggcggaacagactttacctacaaaacaacctacacgccgaaaagcgatgaaaaagacacccaagcaggtacgccgacgaatggggcgcaaaccgcttcaaatacggcaggtgataccaatggcaaaacaaaaacctatgaagtcgaagtctgctgttccaacctcaattatttgaaatatggaatgttgacgcgcaaaaacagcaagtccgcgatgcaggcaggagaaagcagtagtcaagctgatgctaaaacggaacaagttgaacaaagtatgttcctccaaggcgagcgcaccgatgaaaaagagattccaaccgaccaaaacgtcgtttatcgggggtcttggtacgggcatattgccaacgacaaaagcacaagctggagcggcaatgcttcagataaagagggcggcaacagggcggaatttactgtgaattttggcgagaaaaaaattaccggcaagttaaccgctgaaaacaggcaggcgcaaacctttaccattgagggaatgattcagggcaacggctttgaaggtacggcgaaaactgctgagtcaggttttgatctcgatcaaaaaaataccacccgcacgcctaaggcatatatcacagatgccaaggtaaagggcggtttttacgggcctaaagccgaagagttgggcggatggtttgcctatccgggcgataaacaaacggaaaaggcaacagctacatccagcgatggaaaatcagcaagcagcgcgaccgtggtattcggtgcgaaacgccaacagcctgtgcaataa

SEQ ID NO: 37669 - DNA, 273 bp, Neisseria meningitidis
atgaataagagaatgaaaatgtgtcctgcttgtcaacaaggctatctctaccattcgaaacctaaatatcttcatgatgaaattattctgtgtgatgaatgcgatgcagtatggctcaaaggtatgaatatattttatggagaatatgaaaaagatttttattcttatgttcctttcatggaatcccaaggtataacgagtgaatgtatttgggaaggagatttgtttgatcatccatattatgaagatgaaaactcaaatggtatggattga

SEQ ID NO: 37670 - DNA, 654 bp, Neisseria meningitidis
atgaagttcaaatatgtttttctgttggcgtgtgttgtcgtttctttatcttatcgtttgaatgctgcaccgatgtttaacgataatcctgttgtttacggaaaaatcaaagtgcagagttggaaagaaaggcgcgatttcaatattgtaaagcaggatttggatttttcctgcggggcggcttcggtggcgacgcttttgaacaatttttacgggcaaacgctgacggaagaagaagtgttgaaaaagctggataaggagcagatgcgcgcgtcgtttgaggatatgcggcgcattatgcctgatttgggttttgaagcgaaaggctatgccctgtctttcgagcagctcgcgcagttgaaaatccccgtcatcgtgtatctgaaataccgcaaggatgatcatttctcggtattgcgcgggatagacggcaatacggttttgcttgccgacccgtcgctggggcatgtttcgatgagcagggcgcagtttttggatgcttggcaaacccgtgagggaaatttggcaggtaagattttggcggtcgtgccgaaaaaagccgagacaatttcaaataaattgtttttcacacatcatcccaagcggcagacggagtttgcagtcgaacaaatcaggcaagcacgtgcagagtaa

SEQ ID NO: 37671 - DNA, 1188 bp, Neisseria meningitidis
atgacagaggacgaacgtttcgcgtggctgcaattggcgtttacgccctatatcggcgcggaaagtttcctgctgctgatgcgccgtttcggcagcgcgcaaaatgccctgtccgcaccggcggaacaggtggcggcactgatacggcacaaacaggcgcttgaggcttggcgcaatgcggaaaaacgcgctctggcgcggcaggcggcagaagcggcattggaatgggaaatgcgggacggatgccgtctgatgctgcttcaggatgaagattttcccgaaatgctgacgcaggggctgaccgcgccgccggttttgtttttgcgcggcaacgtgcggctgctgcacaagccttccgccgccatcgtcggcagccgccatgccacgccgcaggcgatgcggattgccaaagatttcggcaagtcgttgggcgggcaaaatatccccgttgtgtcgggtatggcttccggtatcgatactgccgcccatcagggcgcactggaggcagaaggcggcaccatcgccgtgtgggggacgggtatagaccgcatttacccgccgtccaataaaaaccttgcctatgaaatcgccgaaaaaggattgattgtcagcgagtttcccatcggtacgcgcccgtatgccggcaactttccgcgccgcaaccgcctgattgccgcgctgtcgcaggttacgctggtggttgaagctgcgttggaatccggttcgctgattaccgccggcttggcggcagaaatggggcgcgaagtgatggcagtacccggttcgatagacagtccacacagcaaaggctgccacaaactgattaaagacggcgcgaaattggtggaatgcctggacgacatcctgaacgaatgcccggggctattgcaaaatacgggtgcttcatcatattctataaataaggatacgcccgacacgggacgccgcgccgttcagacggcatacgccccgccgcctgccgcaaaaatgccgtctgaagcggcggcaggcggcacagcccacggcggcatactggataaaatgggtttcgaccccgtccatcccgacgtgcttgccgagcagcttgctatgcctgccgcagatttgtatgccgcactgttggaattggaattggacggcagcgttgccgcaatgcccggcggcagataccagcgtatccgaacttga

SEQ ID NO: 37672 - DNA, 1089 bp, Neisseria meningitidis
atgtcccaaactatcgacgaactcctccttccccaccgcaacgccatcgacaccatcgatgccgaaatcctgcgcctgctcaacgaacgcgcgcaacacgcccacgccatcggcgaactgaaaggcacgggcgcagtataccgtccggagcgcgaggtcgccgtgttgcgccgcattcaggatttgaacaaaggcccgctgcccgacgaatcggtagcacgcctgtttcgggaagtgatgagcgagtgtctcgccgtcgaacgcccgctgaccatcgcctatctggggccgcagggcacgtttacccagcaggcggcgattaagcatttcggacacgccgcgcacaccatggcgtgtccgaccatagacaactgcttcaagcaggttgaaacccgtcaggcagactatctggtcgcccccgtggaaaactcgaccgaaggctcggtcgggcgcacgttggatttgcttgccgttaccgcgttgcaggcgtgcggcgaagtcgttttgcgcatccaccacaaccttttgcgtaaaaacaacggcagcaccgaaggcattgccaaagtcttttcccacgcgcaggcgttggcgcagtgcaacgactggttgggcagacacctgcccaacgccgaacggattgctgtgtccagcaatgccgaagccgcaaggctggttgccgaatcggacgacggtacggttgccgccatcgccggacgcacggcggcggaaatctacggactcgatatggttgccgagtgcatcgaagacgaaccgaacaacaccacgcgcttcttggtgatgggacatcacgaaaccggtgcaagcagcagcgacaagacttcgctggccgtttccgcgcccaaccgcgccggtgcggttgcctcgctgctgcaaccgctgaccgagtcgggtatttccatgaccaagtttgagagccgtccgagcaaatccgttttgtgggaatacctgttcttcatcgacatcgaaggacaccgccgggatgcacagattcagacggcattggaacgcttgggcgaacgcgcttcgttcgtcaaagtcatcggttcgtacccgaccgccgttttgtag

SEQ ID NO: 37673 - DNA, 324 bp, Neisseria meningitidis
atgcaaaacgaaaccatcaacctgaaacagcaccttgccgccatcaaagaatactggcagcccgaaatcatcaaccgccacgggttccaattccgtttggtcaaacttttgggcgattacggctggcatacgcacggatacagcgacaaagtgctgtttgccgtggagggcgacatggcggtggacttcgccgacggcggcagcatgacgatacgcgagggcgagatggcggtcgtgccgaagtcggtgtcgcaccgcccgcgttcggaaaacggctgctcggtggtgctgattgagttgtccgacccgtccgaggccgtctga

SEQ ID NO: 37674 - DNA, 363 bp, Neisseria meningitidis
atggctcgtattgcaggggtaaatatccctaataacgcacacatcgtaattggtcttcaggctatttacggtattggtgctactcgtgctaaattgatttgtgaggctgcaaatattgcgcctgatactaaagcaaaagatttggacgagactcaattagatgctttgcgtgaccaagttgccaagtatgaagtagaaggtgatttgcgtcgtgaggtaactatgagtatcaagcgattgatggacatgggctgctatcgtggcttccgtcatcgtcgcggcttaccatgccgcggtcaacgcactcgtacaaatgcgcgtacccgcaaaggtccgcgtaaagcgattgctggtaagaaataa

SEQ ID NO: 37675 - DNA, 897 bp, Neisseria meningitidis
ttgaatccgacgaatgatttgaaagcgtggcaacagagggcgcaggcacagacagagctgctgctggaacgctttttgccgtctgaaaacgaaatcccgcacacgctgcacgaagcgatgcgctatgcggctttggacggcggcaagcgtctgcgtccgatgctggtgctggcggcttcggaattgggcggggtcgtgcatgaagcagtagaacaggcaatggcggcaatcgaaatgatccacgtctattctttggttcacgacgatatgccggcgatggacaacgacagcctgcggcgcggcaaaccgacttgccatgtgcaatacgacgaagccaccgcgctactggtcggcgacgctttgcaaacccaagccttcgacgtgttaagccgtccgacagaactgcccgcagcacgccagttggcaatgttgtcggtgttggcgaaagcgggcggcagcgcgggcatggcgggcggtcaggcaatcgatttggcgaatgtcggcaaacaaatggttcaagccgatttggaacagatgcacagcctgaaaacgggtgcgctaatccgtgcggcggttttattgggggcgacggcgtgtcctgatctgtcagatgcggaactttccgtattggacgcttacgcggcaaaactggggctggcgttccaagtcattgacgatgtgttggattgtgaagcggacacggcgactttgggcaaaacggcgggcaaagacgcagacaacgacaagccgacttatgtgaaactgatgggcttggaagcggcgcgctcatacgcacacaaactggttgccgaagcggtcgcgctgctcgaacccttcggcgacaaagccctgcgcctgcggcagttggcagaatttgcagtcgcccgcaaatattaa

SEQ ID NO: 37676 - DNA, 501 bp, Neisseria meningitidis
atgaatgcaatgccccaaaccgccgcacaaaacgaaaccctgcacacttgcagcattattgtcgatgatgcacaggatttttcccccatgcttctcgatgcagggcgggacgacacacttatcagcgaatcgatgattccgcaaatccgcactgttgccgccctgatagccgccgaacggcacgacttcagccgcagcagccccgccgagtttaccgatgccgccgatttttttgccgcacggattctcgtattgggcgtgcgacgcttccatctggacgtatcgctgcttcagattttgaaaaccgccaacagccgcgcccgccgctttgccgaaaaacaccgcctgtttttcacacccgcacaagccgaattgagcctgaacaaacacaaaaaccgccgcctgctgaccgtagaaaccgaacacgaagtcgaaaacaaaggcaacccagtcgccaacagcctcgcatttgtccgcaaactgcacaccctgcccctgtaa

SEQ ID NO: 37677 - DNA, 435 bp, Neisseria meningitidis
atgactgagccgaaacacgaaatgctgacgaaagagcaggttgccgcgcgcaaaaaagcaaaagccaaaatccgcaccatccgcatttgggcgtgggtcattttggcgttgctcgctttaaccgccctgctctcccaatgcgcgatgtccaaacctcaggcaaaacagaaaattgtcgagtcttgcgtgaagaatattccgtttgccgaaaaatggcaaaacgatttgcgggcccgcggtttagattcaaacaatacccgcctcgccgtcgactactgcaaatgtatgtgggagcagcctttggacagattgagcgagaaacagattagatccttcggcaaactcggcgcacaagaacagcttgacctgctcggcggcgcaaatgcctttgaagcacgtgacaagcagtgtgttgccgatttgaaatcagaataa

SEQ ID NO: 37678 - DNA, 948 bp, Neisseria meningitidis
atgaatatcctcagtaaaatcagcagctttatcggaaaaacattttccctctgggccgcgctctttgccgccgccgcttttttcgcgcccgacaccttcaaatgggcggggccttatattccttggctgttgggcattattatgttcggtatgggtttgacgctcaaaccttccgacttcgatattttgttcaaacatcccaaagtcgtcatcatcggcgtaatcgcacaattcgccattatgccggcaaccgcctggctgctgtccaaactgttgaacctgcctgccgaaatcgcggtcggcgtgattttggtcggctgctgcccgggcggtacggcttccaatgtgatgacctatctggcgcgtggcaatgtggctttgtcggttgccgttacgtctgtttccaccctgatttccccattgctgactcccgccatcttcctgatgcttgccggcgaaatgctggaaatccaagcggccggtatgttgatgtccatcgtcaaaatggttttgctccccattgttttgggtttgattgtccataaggttttgggcagtaaaaccgaaaagctgaccgatgcgctgccgctggtttccgttgccgccatcgtgctgattatcggcgcggttgttggggcaagcaaaggcaagattatggaaagcggcctgctgatttttgcggttgtcgtactccacaacggcatcggctacctgctcggcttctttgccgccaaatggaccggcctgccttatgatgcacaaaaaacgctgaccatcgaagtcggtatgcaaaactcgggcctggccgccgcgcttgccgccgcacactttgccgccgcgccggtcgttgccgttccgggcgcattgttcagcgtgtggcacaatatctccggctcgctgctggcaacttattgggcggccaaagccggtaaacataaaaaaccctaa

SEQ ID NO: 37679 - DNA, 1989 bp, Neisseria meningitidis
atggggataacgattggtgagctgcttaaacttaatattcaagggcttcctacaacagcaagaggattaagggagagagcaaaaacccagaactggccgtacatcgaagaggttggcaaagcgcgtggaggccgtctgaaaaaatacttaatcgcttccctccctgccgaaatccgagcagccatcatgaaacggcagtcggacgagctgacggagaagatgccgaaaaccttgccccaagtcagaccggggacggcgatgtcggctcaggcactggctgaagcggccaagctgttgaatgagaaacaacggtcggtggcggatgcgcgatgtgcggtggtggcggcggtgttggggattaaatatcaatacggttgctctgccaaggctgcggtggctcagtttttgggcttgctggcagaaggtaaattggacgcggtcacgcttgggaacttggaaaaggccaatgaccgcagccggtcggcgaaggttggcgaacgtactttagacggctggatatctgcttatttgaaagcggaaaacgcgacggagcggttggttgctttagctccgaagacgacgaaggcggttaagccgattgagagctacggttggttgccgatgtttatgcagtttcacaatattccgtccgcgccgaaactggcgcacagctaccgccggtttgtgcagtgggctgaagcggaaaatatgccggtcaatgatgtgcctaatttgagtatggtgcggcgcgtttgggacaagctgccgatgattatgcaggagcgcggcaggaaaacgggggcggcttataaatcgctgctgccttatgtgaaacgtgattggggggctttaaagccaaacgatgtttggatcggcgacggccacagctttaaagcgaaggtggcacatccggtacacggcaggccgtttaagccggaagtgacggtgattattgatggttgtacgcggtttgtggtcggtttttcggtttcgttggctgaaagttgtgtggcggtatcggatgctctgcgtatcggggtcaagcattttggtttgcctattatctactactcggataacggcggcggccaaaccggcaagacgatagaccatgaaatcacgggtattacgtcccgactgggtatccgccatgaaacgggtatcgcgggtaatccgcaaggtcgaggcatcatcgaacgatggtggaaagacaatctgattgagatggcgcggcagtatgagacgtttgcgggcgcggggatggacagcagcacgaagaacctgatgtaccgcaagatggaaagtgcttttaatgctttggaaaaaggcaaggatttgacggaggaacaacagaaatatttgaaaaaactgccgagctggtcgcgtttcattgcggatgttgtcaaatgtatagacgaatacaacaaccgcccgcacggcgagctgccccgacatcctgacggcgggcattatacgccgaaggcttatcgggaaatgaggctggaacaggacggtatcgcgccggatatgttgtcggcggaagagctggcaacgatgtttatgccgcaagaggtgcgaaaggtacagcgcggttggctggatttattcaacaactcttatttctcaacagagctggcggagtatcacaaggacgaggtacgggtcagctacgatttgagcgatgcgtcggcggtcaatgtgtttgatatggacggcaagtttatcactaaggcgcaggccaacggcaatagccgcgaggctttcccgacggcgcgtatcgaccaactggcggaaaaacgccgaaaaggcaaaatcaagcgggcggaaaatgcaatcaagctcgcaaatgcggaagtcaatccggctttggaacaggcggcggtttgggacgagctgggacatttgggcggaaacgtcatcgaggcggagtatgcggtattgccgagaacgggcacggacgattttgtgctatttgaggcggatagataa

SEQ ID NO: 37680 - DNA, 1167 bp, Neisseria meningitidis
atgaatctacacgagtatcaggctaaagaactgctggctggctacggtttgcccgtacaaggcggtattttggcacgcaacggcgaagaagccgctgcagcttacgacaaattgggcggtaagtttgccgttgtcaaagcacaagtacacgccggcggccgcggtaaagcgggcggcgtaaaagtcgtcaaaagccgcgaagaagccaaagaagtggctgaaagcctgattggcaccaacttggtaacttaccaaaccgatgccaacggccaacctgtcaacagcgttttggtttgcgaagacatgtatcctgttcaaaccgagctgtatttgggcgcagtggtcgatcgttctacccgccgcattacattcatggcttctaccgaaggcggcgtggaaattgaaaaagttgctgccgaaactcctgaaaaaatcttcaaagtaaccgttgatcctctggtcggcctgcaaccttgccaagcgcgcgaagtggcgttccaactgggcttgaaagacaaacaaatcaacgagttcgttaaactgatgaccggtgcgtacaaagcgtttgtcgacaacgacttcgccctgtttgaagtaaacccgctggcagttcgcgaaaacggcgcactggcttgcgtggacggcaaaatcggcatcgacagcaacgcgctctaccgcctgccaaaaatcgctgaattgcgcgacaaatctcaagaaaacgaacgtgagctgaaagcttctgaattcgacctgaactatgttgccctggaaggcaacattggctgtatggttaatggtgcaggtttggcgatggccactatggacatcatcaaactcaaaggcggccaacctgccaacttcttggacgttggcggtggcgcaaccaaagaccgcgtggttgaagcgttcaaactgattttggaagacaaatccgttaaaggcgtattgatcaacatcttcggcggtatcgtacgttgcgacatgattgcggaagccatcgtggcagccgttaaagaaatcaacgtcaacgttcctgtcgttgttcgtttggaaggtaacaacgccgaactcggcgcgaaaatcctgaacgaatcaggtctgaaactgacttctgcagacggcctgaatgacgcagccgaaaaaattgttgcagccgtaaacgcctaa

SEQ ID NO: 37681 - DNA, 318 bp, Neisseria meningitidis
atgcaaaaacgtattgatgaaatccaaagcaaataccgcgaatggtgtcatttactaccgcaactggaagaagacatccgccgttggaaatatgtcgtcactttaattcgcgacatggacaatttctatacccacgagtatcaggcgtgtcatcaggctattgaagacggggtagaactggatttgcgtacggaaggcgaatacagcattatgagtgaagatgcgctatggaacgcgctgggcgaattccatcaattggcttggttatatttgcgctccagcgtcgatgccttagacaaatatacacaagaagattag

SEQ ID NO: 37682 - DNA, 327 bp, Neisseria meningitidis
atgattgccaaacacatcgaccgtttcccgctattgaagttggaccaggtgattgattggcagccgatcgaacaatacctgaatcgtcaaagaaccagttaccttagagaccaccgcggccgtcccgcctatcccctgttgtccatattcaaagccgtcctgctcggacaatggcacagcctctccgatcccgaactcgaacacagcctcatcacccgcatcgacttcaacctgttttgccgctttgacgaactgagcatccccgattacagcaccttgtgccgctaccgcaactggcaccctgtccgaattgctcaaactgattaa

SEQ ID NO: 37683 - DNA, 1008 bp, Neisseria meningitidis
atgagcaccttcttccggcaaaccgcacaagccatgattgccaaacacatcgaccgtttcccgctattgaagttggatcaagtgattgattggcagcagatcgaacaatacctgaatcgtcaaagaacccgttaccttagagaccaccgcggccgtcccgcctaccccctgctgtccatgttcaaagccgtcctgctcggacaatggcacagcctctccgatcccgaactcgaacacagcctcatcacccgcatcgatttcaacctgttttgccgctttgacgaactgagcatccccgattacagtactttatgccgttaccgcaactggctggcgcaagacgacaccctgtccgaattgctggaactgattaaccgccaactgaccgaaaaaggtttaaaaatagagaaagcatccgccgccgtcgttgatgccaccattattcagaccgccggcagcacacagcgtcaggccatagaagtcgatgaagaaggacaaatcaacggccaaaccacaccgagtaaggacaaagatgcccgttggacaaagaaaaacggtttatacagactcggttacaaacaacatacccgtaccgatgaggaaggctatatcaagaaactgcacatcacccccgccaatgcccatgagtgcaaacacctgttgcctttgttggaagggttacccaaaggtacgaccgtctatgccgataaaggctacgacagtgaggaaaaccggcaacatctggaagagcatcagttgttagacggtattatgcgcaaagcccaccgcaaacatccactgtcggaagtgcaaaccaaacgcaaccgatatttgtcgaagacccgttatgtggtcgaacaaagcttcggtacgctgcaccgtaaattccgctatgcgcgggcggcctatttcggactgattaaagtgagtgcgcaaagccatctgaaggcgatgtgtttgaacctgttgaaagccgccaacaggctaagtgcgcccgctgccgcctaa

SEQ ID NO: 37684 - DNA, 804 bp, Neisseria meningitidis
atgaaaaaaattcttttaacggtttcattaggtttggcactgagtgcctgtgccactcaaggtacggtcgataaagatgcccagattacccaagattggagtgtggagaagctctatgccgaagcccaggacgaattgaacagcagcaattatacgcgggctgtcaagttatacgaaatcttggaatcgcgcttccccaccagccgccatgcccggcagtcgcaactggataccgcatacgcctattataaagacgatgaaaaagacaaagctctggcggcaatcgaacgcttccgccgcctccatccgcagcatccgaatatggattacgcgctgtatctgcgcggcttggtgctgttcaacgaagaccagtccttcttgaacaaactggcctcgcaagactggtccgaccgcgacccgaaagccaaccgcgaagcgtaccaggcgtttgcggaactcgtccaacgtttccccaacagcaaatacgccgccgatgcgaccgcacgcatggtcaaactggtcgatgcactgggcggcaatgaaatatcggtggcgcgctactacatgaaacgcggtgcatacatcgccgccgccaaccgcgcccaaaaaattatcggcagctatcaaaatacgcgttatgttgaagaatcgctcgccatattggaacttgcctaccaaaaactcggcaaaccacagcttgccgccgatacgcgccgcgtgttggaaaccaacttcccgaaaagcccgtttttgacgcacgcttggcagcccgacgatatgccctggtggcgttactggcattaa

SEQ ID NO: 37685 - DNA, 273 bp, Neisseria meningitidis
gtgtttgctgttattttcttttcgacattgggctgtattttagcatggataagagatattcctaaaataaaatcaaaaaaaattttggcaagatccttatatattataggaataataaatataataatcagctatgtattaattaaaaatatattggtttctgtttcggatgaaggtggaataaaatatgttgcaatatatttatcaaatctttttttttggacagtattgatgtatgttcttgtgaaaagattatctaaaaagccaagctga

SEQ ID NO: 37686 - DNA, 183 bp, Neisseria meningitidis
atggaaaaaaaattcttagacatcctcgtctgccccgttaccaaaggcaggctggaatatcatcaggacaaacaggaattgtggagccgtcaggcgaagctggcgtatccgattaaagacggcatcccctatatgctggaaaacgaagcgcgagcgttgggcgaagaggagctcaaagtatga

SEQ ID NO: 37687 - DNA, 648 bp, Neisseria meningitidis
atggcttctaaatcatctaaaaccaacttggatctcaacaaccttcacctgctcaaccttcctgccaggctttttatcgccctgctggccgttgccgccgtgctggggctcggttatgccggattgttcaaaagccagatggaatcccttgaggaatacgaagcaaaagaaaccgaactgaaaaacacctacaaacagaaaagtatcgacgcggccagcctgaacaacctgagggacgaacttgcctcaatccgctctgccttcgatatcatgttgaaacagctgccgacagatgcagaaattcccaacctggttcaagagcttcatcaggcaggttcgagcaacggcctgcgcttggacagcgttatgccccaacctcccgtagatgacggccccatcaaaagattaccctattccatttccattaccggaaattacgaacagatcagccaatttacccgcgatgtcggcagcctctcccgaatcattacccttgagtcgctgaaaatcgcccaatctccggaaaacggcggcaatcctgacggcaagagcagcatcctgaacctcagtgccattgccaccacctaccaagcaaaatccgtagaagagcttgccgcagaagcggcacaaaatgccgagcaaaaataa

SEQ ID NO: 37688 - DNA, 312 bp, Neisseria meningitidis
atgaaatacaaaagcgaggcattagccgccattcatgaaatgatggaaggggcttacaacatcggcgcaatcgacaaaaagactatgcgcggctttgacaagtcctgcctgaccgaaatcaaaccgttgagcggcggagacatcaaggcaatcagggagaaggaggcactatcgcaagccgctttcgccatctatctcaacgtgggaaaaaatcacgtttcggcttgggagcggggcgttaaaaagccgagcggcgcggcgttgaagctgctgaccatcgtcaaaaacaagggcatcgaagccattgcgtag

SEQ ID NO: 37689 - DNA, 441 bp, Neisseria meningitidis
gtgcgcgcctttcagacggcattgaggccgtcccgcatcctgaacatcctgactgtatcgcttcacgccgcctcccttgccgtctgcctgacttggttttacggctggatgatgtggttcggtttggcggctttggtggcaagttacgcatactcgctcaggataacgaatctgaaacaccgccatgccataaccgccattaccatagaccgcgacggacaggcggaaatcgtatccggcaaagacaaaacagcggcaacacttgcgggcagcggtatggttacgccttatgccttattcttacaatgggacaccggcggcaaaaccgtccgccactgcatcacccacgatatggcggacccggaatcctaccggcggctgaaagtctgggtgctttggcggcagccgaaaaaaaccgccgaaaccgatacgccaagctga

SEQ ID NO: 37690 - DNA, 2451 bp, Neisseria meningitidis
atgacacaaaaagaaaagcattttgaggaatatgccgccttggcaacccttcctttgcgggatgtcgtcgtttacccgcatatggttctgccgctgtttgtcggcaggccgaaatccatcgccgcactggaaaacgccattacccgcgaggagccggttttcctgttggcgcaaaccgatgcggcggtagaagaaccggttgccgccgacctgtatcagaccggtacggtcgcacaagtcctgcaagtgttgaaactacccgacggcacggtaaaagtattggtcgaagggctgtatcgcggacgtgttctgaccattgaagacacgggcggtctgttcgtttcccatatagagacggtcgtggaagaagacacgggcggcaataccgacctcgaagccgtgcgccgcaccctgttggcgcagtttgaacaatacgccaaactcaataaaaaaatccccgccgaaattatcggcagcattaacggcattgccgaaaacagccggctaaccgatacggtcgcagcgcatttgcagttgaaactggcgcaacgccaacagattttggaaattcccgaaatcggcaaacggatggaattcctgctggcacagctggaatccgaactcgacattatgcaggccgaaaaacgcatacgcggacgcgtcaaacgccaaatggaaaaatcccagcgcgaatattatctgaacgaacagattaaagcgatacacaaagaattgggcgaagaagacgaaaacggcgaactggatgccttggaagcaggcatcaaaaaggcggggatgagcaaagaagcggaagaaaaatgcctgtccgaactgaaaaaactcaaaatgatgccgccgatgtctgccgaatccaccgtcgtacgcaactacatcgacaccctgctcgaactgccgtggaagaaaaaatcccgcgtcagcaaagacatcgccaaagccggactggtgctggatgccgaccactacggcatggaaaaagtcaaagaacggattttggaatacctcgccgtccaaaaacgtatggacaaactcaaaggcccgattctgtgcttggtcggccctccgggcgtgggcaaaacctctttgggcgaatccatcgccaaagcaacagggcggaaatatgtccgcatggctttgggcggcgtgcgcgacgaaagcgaaatccggggacaccgccgcacctatatcggctccatgcctggtaagattctgcagaatatggcaaaagccggcgtaaaaaacccattgttcctgctcgacgaaatcgacaaattgggtagcgacttccggggcgatcccgccagcgcgttgctcgaagtgcttgatcccgagcaaaacaacaagttcgccgatcattatgcggaagtggattacgatttgagtgatgtgatgtttatcgccacatccaatagtctgaatatcccgacaccgctgctcgaccgtatggaaatcatccgtctgtccggctataccgaagacgaaaaaatcaatatcgcgatgcagtacctcgtgccgaagcaaatgaagcgcaacggcgtaaaagaaggggaattggcaatcgaagaaagcgcggtgcgcgatattatccgttactacacccgcgaggcgggcgtgcgttcgctcgaccgcgagattgccaaaatctgccgcaaggtggtgatgcagattaccttggacgaagactcaaaaaccaaaaaaaccggaaaagccaagcccagggcggttaaagtaaatgagaaaaatctgcacgactatttgggtgtgcgccgcttcgattacggcgttgccgaaagcgaaaaccgtatcggacaagtaaccggtctggcgtggacagaagtcggcggcgaactgctgaccgtcgaagccgcagcattgccgggtaagggcgtgattcagtgcaccggccagttgggcgatgtgatgaaggaatccgtgtccgcagcatggtcggttgtccgctcccgcgcggaatcagtgggcttggctcctgatttttacgagaaaaaagacatccatgtccatgttcccgaaggtgcgacgccgaaagacggtccgagtgcgggcattgccatgactttggcgatggtgtctgcattcaccaaaatcccggtgcgcgccgatgtagcgatgacgggcgaaattaccctgcgcggcgaagtcctgccgattggcggtctgaaggaaaaactgttggctgcgcttcgcggcggcatcaaacacgttttaattccaaaagacaacctcaaagacttggaagaaatccctgaaaacgtgaaaaccggcctgaccatccatccggtcaaatggatagacgaggtattggctctgggtttggaaagccagcctgagccttgggcagaaccttctggcgcggaagcggcggcggaatccgcttcaaaaccgaaaccccgcagcagggcaaccaaacattga

SEQ ID NO: 37691 - DNA, 534 bp, Neisseria meningitidis
atggcagacttcaaccaaatcctgacccccggcgacgtggacggcggcatcatcaacgttgtcaacgaaatccccgccggcagcaaccacaaaatcgaatggaaccgcaaactggccgcattccaactcgaccgcgtcgaacccgccatcttcgccaaaccgaccaactacggcttcattccccaaactttggacgaagacggcgacgaattggacgtgctgctcgttaccgaacaacctttggcaaccggcgtattcttggaagcgcgcgttatcggcgtgatgaaattcgttgacgacggcgaagtggacgacaaaatcgtctgcgttcctgccgacgaccgcaacaacggcaacgcctacaaaactttgtccgatttgccgcaacagctcatcaaacaaatcgagttccacttcaaccattacaaagacctgaaaaaagcaggtacgaccaaagtcgaatcgtggggcgatgcggaagaagcgaaaaaagtcatcaaagaatccatcgaacgttggaacaaacaggcataa

SEQ ID NO: 37692 - DNA, 648 bp, Neisseria meningitidis
atgagaatagagatcacaccaatcagcgaatccgctttggtctgccgactgaatgcaccttccgaactgggcaaacagcaaaagttgtgggcgtttgccgctgcgctcgggcagcacgacaggattgaggaagtggtggtcggcatgaacaatctgaccgtgttcacccgtttcgataccgatttggcgacgcttgccgatgaattgcaatatgtgtgggaacacaccgccgttacagaccatcagggcaaactggtggaaattcccgtctgctacggcggcgaatacggcccggatttggcggaagtcgctgctttccatcagacggttatttccgaaatcgtccgccgccatacggcgcaaacttataccgtatttatgatgggcttccagcctggtttcccttatctgggcggcttgcccgaagcattgcacacgccccgccgtgccgtgccgagaacgtccgttcctgccggttcggtcggtatcggcggcagtcagaccggtgtgtatccgttcgcttcgcccggcggctggcagattatcggcagaaccgaattacccttgttccgagccgatttgaatccgccgaccctgctggcggcgggtgaccaagtccgctttgttgcagaaaggattgagccatga

SEQ ID NO: 37693 - DNA, 330 bp, Neisseria meningitidis
gtgttagagcgggtgacgggcaagcggtcgtgtacggagtgcagtatccctgagctggaacgcgtggtcgaggatttgcgccaacatggttttacgccgaaaaaaacggcaggccgacggccaaaccgccgctcttctgccgacccgatgatgcgcaaaatcgaagccctgctgctggataacggctggtcttggaattatgcgcagggtacggcgaaaaagatgtttaaggttgaccgcgtggaatggttgtccgacggcaatatgcacaagttggtggcggctttgcagattagcgcgaaccgcaagaaaaaggagaaaacgggatga

SEQ ID NO: 37694 - DNA, 3486 bp, Neisseria meningitidis
atgcgcctgacccatatcaaactctccggcttcaaatcttttaccgacccgaccacaattcatgtgccggggcagcttgtcgcggttatcgggcccaacggctgcggcaagtcgaatgtgattgacgcggtgcgctgggtgttgggcgaggcttcggcgaagcagcttcgcggcgagagtatgcaggacgtgatttttaacggtgcggcaacgcgccgtcctgcgccaagagcttcggtggagctggtgtttgacaacagcgaccacagtttgcagggcgcgtgggggcagtatgccgaggtgagcatcaagcggcagctgacgcggcagggcgaatcgacttatttcatcaacaatcagaccgtgcgccgccgcgatattaccgatttgtttttgggtacgggcgtgggcgcgcgcggttatgccgttatcgagcaggggatgatttcgcgcatcatcgaagcgcggccggaggagttgcgcgcctatatcgaggaggcggcaggcgtgtccaaatataaggaacgccgcaaggagacggaaggccgtctgaaagacacgcgcgagcatttgcagcgtttgggtgatttgcagaacgagttggcgcgtcaggtggaaaagctggagaaacaggcggaaaccgccgaacgctacaaatccctgactgcgcagttgaatcgccagcaggatttgctcgattacgcccaatggcagcaatcgcttgccgccgccgacaaagcgaccgcgcagcatcagtctttgcaggcgcagcaggacgaaaccgccactcaggttcaggcgttaaacgatgaagtacacgccttgcagaccgccgaacagtcgcaacagcaggcggtacacgaattgagcaacaaacgcggcgtgttgcgcgagcagattgcccgtttggaagaacaaatccgccatcagcaaaacctgcaccaacgcatcgaacgcgacaagcaggcggcacaggcgcagatgcagcgcatccatcaggagcagcagcaaattcgcgtgcagcttgaagaaaacgagttgcaggccgaagaaaagcaaaccgagttggcggagtgggcgatgcaggttgccgaacacgaagagcgtctgcccgaattggaagaagcccaagccacgctcaacgccgccttccaaacccagcaggacgaggcaaaccgcatccgccgcgaactggcgttgaagcagcagcagcttgcccatgccgaacaaaccgttgccaagcacgaagagcgcaaagatcgtctgaaacaggaaaaccaagccctgaacctgcccgacgaagccgaaaccgctgccgcgcaggaagccgccgccttgctgcaaagccggcaagagcattacgaagaacaaatcattgccgccgaagaagccttgcacgccgcccgcgaggcgtttcagacgacctcgagccgcttccaaagcctgaaacagcaacacatcaccttgcaggcgcagcagcaggcgttgtcgcaaatcctgtcgcaacagcaggaagccgccgacttctggcaggcaagcgaccacaccgccgcgccgcaactgtggcaacacatcaccgcgcccgccgagtggcagcacgccttgtccgtcatccttgccgaacgcctgcacgcccgcgccgtgccgcaaggtttcgttccccccgaacctttgccgcaggggcaggcggcgtggctttcagacggcctctccggcggcatcaaaaaatccctgcccgtacaggcattgctgaaccaaatccaagcgcagccgccgtttcagacggcattgcaccactggctcgacggcgtattgtgcgcgcccgatttgaattacgccctcgcgcatcaaagcgatttgggcgcacaccaaatctggctcacgcccgaaggccatcaggtcgataaagtcagcgtcctgctctatgccaagcccgcgcaggaaagtctgattgcccaaaaagcgcgcctcgacggcatcgcatccgaactggacaacctagcccccgaactctccgctgacgaagccgcgttcaaacaggcagaagccgccgtgcgctcgtccgaagtgcaacataaaaacctgatgcagcagcaacagcagcacacgcgccaatacagccaagcgcagcaacgcgccgccgaactcttggcgcgcaccaaccaagggcaaatccgccgcgaacacatcgagcgcgaactggcgcagttggcggaagagcagaccgtgttgcaacacacgtccgacgggctttcagacgacattgccattttgcaggaagccgccgccgaactcgaacaccagcagcaaaccaccgcgcacagccgccaagagcagcaaggccgtctgaaacaggcgcagcttgccctgttggaagccaaccgccaatacgggctggccgaagtcgccgttcacaagctcaaccagcaaaaacaaaactaccggcagcaaattgcccagctcgaacagcaaacctttgattggcaggaacgccaacaagagcttgccctcgcctatgaaaccgagttccaaaacgacgagcagcacatcaagcttgaagaattaagcgaagccgtacagaccttggacgaagaatatattgttgtgcaagagaaactcgcgcagattcaggaacagggcagggaacaatacgctaaagtacaaaccctgcaaacccagttgccacagcttcaggcagccacccaaaccgccctgttgcagcagcaggaagccctgattaacgccaaacgctaccatcaaaacctgaccgaacgtgccgccgatttggacgcgctcgaagcgttgacgcaagaatcgccgaaagtattgaacagcagcataggcagcctcacccagcaaatcgaagccctcggcgccgtcaacctcgccgccctgcaagaactcgaagaagcgcgcgaacgcgacggctactaccgcagccaaagcgaagacgtgcagaccgccatcacccttttggaagaagccatcgcccaaatcgacgacaaaaccaaagcgcgtttcaaagaaaccttcgacgccgtcaacggcaaagtccaaaccttcttcccgaccctgttcggcggcggcgaagccactctcaaaatgataggcgacgacctactgaccgccggtgtgtccattatggcgcgtccgcccggcaagaaaaacagcaccatccacctcctctccggcggcgaaaaagccctcaccgccatgagcctcgtgttcgctctgttcagcctcaaccccgctccgttctgccttttggacgaagtcgatgccccgctggacgatgccaacacttcgcgtttctgcaacctggtcaaagaaatgtcggcgcaaacccagtttctctacatctcccacaaccgcctgaccatggaaatggcggagcagctcgtcggtgtaaccatgcaggaaaaaggcgtgtcgcgcgtcgtcgccgtggacatcaaacaggcgttggaaatggcggaagccgtttga

SEQ ID NO: 37695 - DNA, 435 bp, Neisseria meningitidis
ttgaacttcaagatttccgagggttctacgcgtgtagagtccgactttaaagagactttggttcggttcggtagagatatgcttcaagatatgccccctaaaatccgttcggcaacgctggtagcgttgacgaccctgcttgtcggaggggcgttgggttacggttatttggaatacctgaagcaggttgcttcggaagggtatcagaccgagcgtctgtataatgccgtcgaccgtcttgcagaatcccaagaacggataacgtccgccatcctgaagggtgctagaggtgccgatttcgtgcaaatcggcagacgttcctacagtagggaggatatatcggaggcaaatagacgtgcagagcgtgtcccgtatggcgcagagttggtttcagacggcaattttaccgctgttttatctgatataggggattaa

SEQ ID NO: 37696 - DNA, 1746 bp, Neisseria meningitidis
ttgaatttaaccgaaagaccgaacttcatgaacctacatcaaaccgtcgaacacgaagccgccgccgcctttgccgccgcaggcatcgccgacagtcccgttgttttgcagccgaccaaaaatgccgaacacggcgatttccaaatcaacggcgtgatgggtgcggcgaaaaaagccaaacaaaacccgcgcgaactggcgcaaaaggtcgccgacgcattggcaggcaacgccgtcatcgaaagcgcggaagtcgccggtcccggttttatcaacctgcgcctgcgccccgaatttctcgcgcaaaacattcagacggccttgaacgacgcacgtttcggcgtggcaaaaaccgacaaaccgcaaaccgtcgttatcgactattcttcgcccaatctggcgaaggaaatgcacgtcggccacctgcgttccagcatcatcggcgacagcatttcgcgcgtgttagaatttatgggcaataccgttatccgtcaaaaccacgtcggcgactggggtacgcagtttggcatgttggtcgcttatttggtcgagcagcaaaaagacaatgccgcgttcgagttggcggatttggagcagttttaccgcgccgccaaagtgcgctttgacgaagaccctgcctttgccgacaccgcacgcgaatacgttgtgaagctgcaaggcggcgatgaaaccgttttggcattgtggaaacagtttgtcgatatttcgctctcgcacgcccaagccgtttacgacacgctgggcttgaagctgcgccctgaagacgtggcaggcgaatcgaaatacaacgacgatttgcaagccgtggtcgatgatttggttcaaaaaggcttggcggtcgaagacgacggcgcgaaagtcgtgttcttggacgagtttaaaaacaaagaaggcgaacccgccgcatttatcgtgcaaaaacaaggcggcggcttcctttatgcttccaccgatttggcgtgtctgcgctaccgtgtcggcacgcttcatgccgaccgcctgctgtacgtcgtcgaccaccgccaagccctgcactttgagcaactctttaccacttcacgcaaagccggctatctgccggaaaacgtcggcgcggcatttgtcggcttcggcacgatgatgggcaaagacggcaaaccgttcaaaacacgcagcggcgacaccgtgaaactggtcgatctgctgaccgaagccgtcgaacgcgccaccgctttggtgaaagaaaaaaatcccgaattgggtgcagacgaagcggcaaaaataggcaaaaccgtcggcatcggcgcggtcaaatacgccgacttgagcaaaaaccgcaccagcgattatgtgttcgactgggacgccatgctctcgtttgaaggcaacaccgccccctatctgcaatacgcctacacccgcgtgcaaagcgtgttccgcaaagcaggcgaatgggatgcaaatgcgccaaccgttttgaccgaaccgctggaaaaacagcttgccgccgagctgctgaaatttgaagacgtactgcaaagcgtggcggacacggcgtatccgcactacctcgccgcctacctctatcaaattgcgaccctgttcagccgcttctacgaagcctgtccgatactcaaagccgaaggcgcaagccgcaacagccgcctgcaactggcaaaactcaccggcgacacgctgaaacaaggcttggatttgctgggcatcgatgtgttggacgtaatgtaa

SEQ ID NO: 37697 - DNA, 651 bp, Neisseria meningitidis
atgcccgtgacccgccccgccaaaatcaatacttacacacgcatcatcgacgccagccttgcgctcttcaacgaggaaggcgagcgcaacatcagcaccaaccatattgccgcccacttgggcatcagtccgggcaacctctattaccacttccgcaacaaagacgaaatcatcgtccaactgttcaaacgttacagcgaagccctgctggaatacctcaacgaagccgtgttgccgtctgatgtggaagactccatcaactatatggcgggcatttacgacgtgatgtgggaataccgcttcctattcagcgacgtgaacaccctgcttgcacgcagtgccgaactattgggcgaacacaataccttcacccaagccaaagtctccccgctcttggtcaacctgctcacccagctcaacggtctgaacatcatccaagccgaccaaaccgctatgaacgacctcgccgtcaatatgtggatggtcacgaaatactggttcgacttcgacagctccctgcgcggccgcaccaagctgaccgaagactccaaagcacgcggcatccgccgcaccttaagcctcctgcgcccttatcttttgcccgaacaccgcgcggaatacgaccggaaaatcggcaacggcaacctgtaa

SEQ ID NO: 37698 - DNA, 1044 bp, Neisseria meningitidis
atgcagattaccgacttactcgccttcggcgctaaaaacaaagcatccgaccttcacctgagttcgggcatatcccctatgattcgggttcacggcgatatgcggcgcatcaaccttcccgaaatgagcgcggaagaggtcggtaatatggtaacttcggtaatgaacgaccaccagcggaaaatctaccagcaaaacttggaagtcgacttctcgttcgaactgcccaacgtcgcccgattccgcgtcaacgccttcaacaccggccgcggtcccgccgccgtattccgcaccattcccagcaccgtcttatcgctggaagaattgaaagccccgagcattttccaaaaaatcgcagaatcgccgcgcggcatggtattggttaccggccctaccggttcgggcaaatcgaccacgcttgccgcgatgatcaactacatcaacgaaacccagccggcacacatcctgaccatcgaagacccgatcgaattcgtccaccaaagcaaaaaatccctgattaaccagcgcgagctgcaccagcacaccctcagcttcgccaacgcgctgcgttccgcattgcgcgaagaccccgacgttatccttgtcggcgagatgcgcgaccccgaaaccatcggcttggcactgaccgccgccgaaaccggacacttggttttcggcacgctgcacacgaccggcgcagcaaaaaccgtcgaccgtatcgtggacgtattcccggcgggagaaaaagaaatggtgcgctctatgctgtccgaatcgctgaccgccgtcatctcccaaaacctgctgaaaacgcacgacggcaacggccgtgtcgcctcgcacgaaatcctgattgccaaccccgccgtccgcaacctcatccgcgaaaacaaaatcacgcagattaactccgtcctgcaaaccgggcaggcgagcggtatgcagacaatggaccaatcgctgcaatcgctggtgcgccaagggctgatcgcaccggaagtcgcacgcagacgcgcgcaaaacagcgaaagtatgagtttctga

SEQ ID NO: 37699 - DNA, 456 bp, Neisseria meningitidis
atggtcgacgcggtcgttaaaactcccgaatttgtaccttttacttctgtaggaatattccgttttggtgcggatataacacaatacaaaaacatactggaaacttttatgtatgaacctcctgatgagtttagaacagaatattatgaatctcccgactcaaatttactcattgccgtcaaaaaaaacaaaattatttcgatattttgttatcaggagctatattttatgggcgttaatttaataggtctaaattttgaagattttaaacaacttttccatcaccctaaatcatacggtgttgatgaatattatttatcaaatgaatcttatccgacatatgtctatgagtttgatgaaataggggtacaagcatgggaagcaaaagggaaagttgttactatcattgccgggggtaaagacaattattcaacagaaccttactacgatgaataa

SEQ ID NO: 37700 - DNA, 867 bp, Neisseria meningitidis
atggcaggtgaaaccattaccgctgccgactacatcaagcaccacttgcagagcttgaccagtttgtcggatgttactcagggtcagggactgaaaaacattgctgatttttcgtttattaaccttgatgccgtcttttttgccgtcctgttgggcgtaatcggcagctttctgttgtggcgcggtgcaaaaaaagcgacggcaggcgttcccggacgtttccaggccgcagtggaattcttgtttgagtttgtggacgatatgtgtaagagcatcattcacaacgaaaagtctagaaaagccgtcgcgccgttgggtctgacgctgtttgtctggatttttctgatgaacgcgatggatatgctgccggtcgatttgctgccgatggtatggcagggcattaccggcaaccatcacgccctgctgcgcgtcgtaccgactgccgatttgaacaccactttggcactcgctgtcggcgtgttgctgatttgtatctattacaacatcaaaatcaaaggattgggtggctggtttcacgagttgttcagcgcgccgttcggtgcaaaactcgcacctgcgaactttctgttgaatttggtcgagtttctttctaaaaccgtatcccacggtatgcggttgttcggcaatatgtatgcaggcgagttggtattcttgttgatagccttgcttggcggtgcttgggcggcttccggcagcgtcgaagtcatggatccgattctgtttgtattccacattattgccggtttggcatgggcgattttccatattttggtgattaccctgcaggcgtttattttcatggcgttggcgttcgtctatatcggacaggcacatgatgcgcactga

SEQ ID NO: 37701 - DNA, 1311 bp, Neisseria meningitidis
gtggctaatcaacaaacgtcatcaggttcatccaaatttggagatcttaagaaacgtcttttgtttctatttggagcattgattgtttttcgaattggtgcccatatacccgtacctggagttgatgctgttgctttagctaaattatacgaaagcgctggaaacggcatcctgggaatattgaatatgttttccggtgggtcgttagagcgctttagtatatttgcaataggaattatgccatatatttcagcttctattattgtacagcttgcttctgaaattttgccatcattgaaggctttaaaaaaagaaggggaggctggtagaaaggtaattacgaaatatactaggtatggtactgttttgttagcaattcttcaaagtctaggtgttgcatctttcgtatttcagcaaggaattgttgtaacaagttcatttgagtttcatgtttccacggtagtttctttggtaacgggaaccatgtttcttatgtggcttggggagcaaattactgaaaggggtatcgggaacggtatttctttaatcattacggcaggtattgcttcaggtattccttcgggtattgcaaagctggttacactgacgaaccaaggttctatgagcatgcttacggcgttgtttattgtatttggtgccttattattaatttatttggttgtatactttgaaagtgcacagcggaagattcctattcattatgcaaaacgccagtttaatggtagggcgggtagtcaaaatacgcatatgcctttcaagttgaatatggctggtgttattcccccaatttttgcttccagtattattctatttccatctactcttttaggttggtttggttcggctgatacaaatagtgttttgcacaaaatagctggattgttacaacacggtcaattgctgtatatggctttatttgcagcgacagttattttcttttgttatttttatacggctttggtttttagccctaaagaaatggcagagaatttaaaaaagagtggtgcttttgttcctgggattagacctggtgagcagacctctaggtatttagaaaaagttgtattacgtttgacattgtttggagctctttatattacaactatttgtttaattccagagttcttaactacggttttaaatgtacctttttatttgggtggcacgtctttgttgattctagttgttgtaacgatggattttagtacacaaataaattcgtataggcttactcaacagtatgataagttaatgactcgttcagaaatgaaatcattttctcggaaatag

SEQ ID NO: 37702 - DNA, 357 bp, Neisseria meningitidis
gtgggaatgacgggatttaatgatgccgccggcgtggcatcctcctccgacatcaaaggcaaatatgttgagaaagttgaagtcgcaaaaggcgtcattaccgccacaatgctttcaaccggcgtaaacaaagaaatccaaggcaaaaaactctccctgtgggccaagcgtcaagacggttcggtaaaatggttctgcggacagccggttgagcgcgccgccaaagacgacaccatcaaagccgccaccgacaccaccaccaacatcaacaccaagcacctgccgtcaacctgccgcaatgaatcaactgccggttgcatagaaacaccacctacggctttctataaaaatacctaa

SEQ ID NO: 37703 - DNA, 948 bp, Neisseria meningitidis
ttggggagagggtacagacagcaggccttaagcaaacgctgcctgaaaaacgcaagctcgaccctctccctaaccctctcccacgggagagggaacaaatcacagcaccatcgacattttcagacggcatcggtaaagaaaccatctatgaacgcgttcaacctcatcatcatcggcgacgaaatcctgcacggcagccgccaagacaagcatttcgcctttttcaaatccctgctcgaatccaaagggctgaagctcaatcaggtgcaatatctgcccgacgaacccgatttgctggtcaggcaactgcgccgcagcttttcagacggcataccgacgtttgttaccggcggcatcggcgccacgcccgacgaccacacgcgccaagccgcagccgctgctttggatttgcccgtcgtccgccattctgaagccgccaagtttatcgaaggcataacccagaaacgcggcgagccgcttgattcgccggaacacgcccaacgcctgaaaatggcagattttcccgaaggcgcggaattggtgcccaatccgtttaacaacatcgccggattttctatccgcgagcattatttcttccccggctttcctgtgatggcgcacccgatggcggaatgggtattggaaacttattacgccgaccgcttcaaccaaaccgaacgcggcagccgcagcgtgtatgtgtttgagcagcccgaatcgcgcattacgccgattatggagcatatcgagcaaacttatcccggcgtgcgttcgtacagcctgcccagcgtcggttggacgcattcagacggcacgcaggtcaaaccgcacattgagttcggcatcaaagccgaaggagaagccgtcaaccttttggacgcggcgtgggcggaagtgttgcacagcttggacggattgggagcagagctgaaaaatcgggtaaactga

SEQ ID NO: 37704 - DNA, 594 bp, Neisseria meningitidis
atgacgacattacaagaacgcgttgccgcccattttgccgaaagcatccgtgccaaacaggaagccgaaaaagtactggtcgagccgaccgtacaggctgccgagctgatgctgcaatgcctgatgaacgacggcaagattctggcgtgcggcaacggcggttcggccgccgatgcccagcacttcgccgccgaaatgaccggacgctttgaaaaagagcgcatggaactcgccgccgtcgccctgaccacagacacctccgcgctgaccgccatcggtaacgactacggcttcaaccacgtcttcagcaaacaggtacgcgccctcggacgtgcaggcgacgtcttggtcggcatttccacttccggcaattccgccaacgtcatcgaagccgtcaaagccgcacacgaacgcgatatgcacgtcatcgccctgaccggccgcgacggcggcaaaatcgccgccatgctcaaagacaccgacgttttactcaacgttccctatcctcgaactgcccgtattcaggaaaaccacatcctgctgatacacgccatgtgcgactgtatcgactccgtactgctggaaggaatgtaa

SEQ ID NO: 37705 - DNA, 564 bp, Neisseria meningitidis
atgaaaaaaatcatcatcgccgcactcgcagcggcagccgtcggcactgcctccgccgccacctacaaagtggacgaatatcacgccaacgcccgtttcgccatcgaccatttcaacaccagcaccaacgtcggcggtttttacggtctgaccggttccgttgagttcgaccaagcaaaacgcgacggtaaaatcgacatcaccatccccgttgccaacctgcaaagcggttcgcaacactttaccgaccacctgaaatcagccgacatcttcgatgccgcccaatatccggacatccgctttgtttccaccaaattcaacttcaacggcaaaaaactggtttccgttgacggcaacctgaccatgcacggcaaaaccgcccccgtcaaactcaaagccgaaaaattcaactgctaccaaagcccgatggcgaaaaccgaagtttgcggcggcgacttcagcaccagcatcgaccgcaccaaatggggcgtggactacctcgttaacgttggtatgaccaaaagcgtccgcatcgacatccaaatcgaggcagccaaacaataa

SEQ ID NO: 37706 - DNA, 132 bp, Neisseria meningitidis
ttgcgcgcctgtcagataaaccctgtgtttaaacgggcggcaatgaggtacgcgcagagccttgaagcgcaatcgatatattatttccaccaaaacggacgaccccgcctgccttgcaaacccttaaaatga

SEQ ID NO: 37707 - DNA, 444 bp, Neisseria meningitidis
atgaagtggttattaaatatgataatgagacctattaaatttagtatggtaaatacgttattatttattgttatatgtagttcattttttgatctgctcgttcaattatgtacaattttatttcatagccaaaaaatatactttattacattatttttattatttatttttaattttgttacaaaatctatctatatggcaattatttatcctattttatatttttttacgataaaaaaatattatccttactctaggaaagtgataattctattatcattagcattatctatatattttagttttatggacttttactttttttccatatattcagataaccttagctatgaaacggagtctttacatttatacatccctattattattaattttttctcacttttagtttctaattttattttatcttttatcaacaagtaa

SEQ ID NO: 37708 - DNA, 1218 bp, Neisseria meningitidis
atggatatgcaaagcaaagcgaaaaaattgattgagatgattcagacggcaccggtggagtggaagccgttgggtggagaaaatgggatagctatcataaaaacaggacaagctgtaagtaagcagaaaatctcaaataatattggtagttatccagttattaacagtggcaaagagccgcttggctatattgatgaatggaacactgaaaatgaccctatcggcatcacaacaagaggagcgggagtcggctcaataacgtggcaagaaggaagatattttcgtggcaacttaaattatgcagttactattaagaatagaacagaattggatgttcgttttctctatcatatattacttgaatttgaacaagagattcatgccttatgtacatttacaggtattcctgctctaaatgccagtaacttgaaaaaattattaatccctatcccacccctggaaacccaacaaaaaattgtaaaaatacttgacaaattcaccgagctggaagctgaattagccctgcgcaaacgccaataccggtattaccgcgactttcttttagattttgacaatcaaatcggggggatagctgatggctataaaggccgtctgaaagatgtggtttggaagacgttgggggaggtgtttgacttgaagaatggctataccccttccaaatcaaataaagaatattgggaaaatggctcaatcccttggtttagaatggaagatattagggaaaatggccgtattttagataattcattgaagcatatatcaaaaagcgcagttaagggcggcaagctgtttcctgctaaatcaataatgatgtcgacaacggcaaccataggagagcatgcgttaataaaagttaattatattagtaaccaacaactgaccaattttacaattaaagatgaatttaaggatgctttagatataaatttcgctttctattattttttcattattgcggagcagagcaaaaaacttattaatacttcaagtttacctattattagcatgaaagaattaaagaaattaaaaatccccatcccaccactccccgaacaggaaaaaattgccgccatcctagacaaattcgataccctgacccactctatcagcgaaggcctgccgcacgaaatcgccctgcgccgcaaacaatacgaatattaccgcgaacagctgcttgccttccctaaggctacctga

SEQ ID NO: 37709 - DNA, 279 bp, Neisseria meningitidis; identical to SEQ ID NO: 36778

SEQ ID NO: 37710 - DNA, 762 bp, Neisseria meningitidis
atggatgcgaataaagagccgaattgggaaaaacgtttggaaaacctgcgtcagacgcgccgtatgaaggcagtgccgacttacgcgccgctgtcccgcccctctgaaaccggaacggacgcgcctgtgccgaaactggacgatgagagccgagcccgtgtgttgaaggcgtatctgaaaaaatggcaggaggaacacaatgccgccgttgccgattgcggcgaggaagtcgaaaccgacccgatgattgtccttcaggaaaactggctcaacgcgcaggcttccctgcaaatgtcggtttcggaaaaacacatcgaatcgcggcggagaatcctgttcgatgccaaaaaagacagtgccgaatttgaaaccggacagattgaaggcggggaaaacgccgatgcggcagaatcgggtacggcggcagacggggttgcggaaaacggcgaaggcggtgcggaagaggcgttgatgcccgtccaaatcaatatcctgaatccgaaagccgtcaaccggcgcgaagtgttctgcctgtccgaacaggagctgaccgaacggctgattaaacgtctgcgcccgcatctgaccgataccgtcaacggcatcatccgtacggcggtgcaaaagcagatggcggtttttacctatcagctccagcagatgctgcacgagcaggcgggtgcggtagtcgaagacgtgttggaacacgatgtccgcaaaatcctcaacgacatcaagtacgagttaaaatacaaacgctga

SEQ ID NO: 37711 - DNA, 2265 bp, Neisseria meningitidis
atgcttgcacccgaattggaacagattttgcagcagctttaccgcgaggcgcgtaaggctcattatgaatttatcagcctcgagcatctgcttttggtactcatcgaagaagatgcctccgtgccgaacgtcttaaaactatgcggcgcggatttgaaagtggtgtccgaacagctcgccgccagcgttgccgaaaacacccccctgattcccgaacaccttttagacacggtcgaaacacggcccacgctcggcttccaacgcgtgatgcaacgggcgatggtgcatacccagtctgccggaaaagccgcagtcgaaccgttggacgttttggtcgcgctgatgagcgaaaccgacagccacaccgtctatttcctcaagctgcaatcggttacgcgttttgaagttttgcgctgtattgcccacggctcgcccgatgacgaggatggcaatgattcagacggcctgggacgcgagggcgaagaagcggaacaaaaaaccggctccctttccgactacaccgtcaacctcaacgccgaagtcaaagccggccgtatcgaccctttgattggtcgcaaacacgaaatggaacggctggtgcaaatcctgtgccgccgccgcaaaaacaatccgcttttggtcggcgaagcaggtgtgggcaaaaccgcgctggcggaaggtttggcacatcaaatcgtcaacagcgacattcccgacgcgctcaaagataccgaagtgtacgcgctggatatgggttcgctgttggcgggcacgaaataccgcggcgactttgaagcgcgggtcaaatccgtcttgaaacagctcgaaaaaatcccgcacgccattttgtttatcgacgaaatccacaccatcatcggcgcgggcagcaccagcggcggcaccatggacgcgtccaacctgctcaaacccgcgctggcaaaaggttcgctgcgctgcatcggcgcgaccacctacgacgaataccgcaccattttcgacaaagaccatgccttaagccgccgcttccaaaaaatcgacgtggtcgaacccaccgtttccgaaaccgttcaaatcctgcgcggcttgaaaccgatgtttgaagccttccaccaagtccgctacactcaaggcgcactcgaagccgccgccgaactctccgcacgctacatcaacgagcgtttcctgcccgacaaagccatcgacgtaatggatgaagcaggcgcggcgcaacggattctgcccaaatccaaacagaaaaaagtcatcggcaaagcacaaatcgaaaccgtcatcgccaaagtttcgcggattcccgaaaaaaccgtgtcgcacgacgacaaacaagtgctgcaattcctcggtcgcgatttgaaaaacatggtttacggtcaagaaaacgccatcgacgcgctggttgccgccgtcaaaatgtcgcgttccggccttgccctgcccgacaaaccgataggcagcttcctcttctccggcccgaccggcgtgggcaaaaccgaagccgccaaacagcttgcctactcgctgggcgtaccgctgcaacgctttgatatgtccgaatacatggaacgccatgccgtatcgcgcctcatcggcgcgccaccgggctacgtcggctttgaacaaggcggccttttgaccgaagccgtcaacaaacagccgcattgcgtattgctcttggacgaaatcgaaaaagcccaccccgacattttcaacgtcctcctgcaagtcatggacgcaggcaaactgaccgacaacaacggcaagagtgccgatttccgcaacgtcatcctgattatgaccaccaacgcaggcgcggaaagcctcagccgccccagcctcggctttaccgccaagcgcgaacgcggcgacgaaatgcaggcaatcaacaagctcttcacgcccgagttccgcaaccgcttggacgcgattatcccgtttgcgcccttgtccgaacccatcatcgtcaaagtcgtggacaaattcctgctccagctcgaacaccagctcctcgacaaaaaagtcgaagccgaattcacgtcggcattgcacaaatatctggcggaaaaaggtttcgacccgcaaatgggcgcgcgcccgatgcaccgcctgattcaggaaaaaatccgcaaaccgctcgccgacgaactcctgttcggcaaactcgccgacggcggctttgtgcggatagactgggatacggcaaaagaagaagccgtgttgaagtttaagaaaagcaaggtcaaaatgtag

SEQ ID NO: 37712 - DNA, 1848 bp, Neisseria meningitidis
gtgcacgacacccgtaccatgatgattaaaccgaccgccctgctcctgccggctttatttttctttccgcacacatacgcgcctgccgccgacctttccgaaaacaaggcggcgggtttcgcattgttcaaaaacaaaagccccgacaccgaatcagttaaattaaaacccaaattccccgtccgcatcgacacgcaggatagtgaaatcaaagatatggtcgaagaacacctgccgctcatcacgcagcagcaggaagaagtattggacaaggaacagacgggcttcctcgccgaagaagcaccggacaacgttaaaacaatgctccacagcaaaggctatttcagcagcaaagtcagcctgacggaaaaagacggagcttatacggtacacatcacaccgggcccgcgcaccaaaatcgccaacgtcggcgtcgccatcctcggcgacatcctttcagacggcaacctcgccgaatactaccgcaacgcgctggaaaactggcagcagccggtaggcagtgatttcgatcaggacagttgggaaaacagcaaaacttccgtcctcggcgcggtaacgcgcaaaggctacccgcttgccaagctcggcaacacccgggcggccgtcaaccccgataccgccaccgtcgatttgaacgtcgtcgtggacagcggccgccccatcgccttcggcgactttgaaatcaccggcacacagcgttaccccgaacaaatcgtctccggcctggcgcgcttccaaccgggcacgccctacgacctcgacctgctgctcgacttccaacaggcactcgaacaaaacgggcattattccggcgcgtccgtacaagccgacttcgaccgtctccaaggcgaccgcgtccccgtcaaagtcagcgtaaccgaggtcaaacgccacaagctcgaaaccggcatccgcctcgattcggaatacggtttgggcggcaaaatcgcctacgactattacaacctcttcaacaaaggctatatcggctcggtcgtctgggatatggacaaatacgaaaccacgcttgccgccggcatcagccagccgcgcaactatcggggcaactactggacaagcaacgtttcctacaaccgttcgaccacccaaaacctcgaaaaacgcgccttctccggcggcatctggtatgtgcgcgaccgcgcgggcatcgatgccaggctgggggcagagtttctcgcagaaggccggaaaatccccggctcggatatcgatttgggcaacagccacgccacgatgctgaccgcctcttggaaacgccagctgctcaacaacgtgctgcatcccgaaaacggccattacctcgacggcaaaatcggtacgactttgggcacattcctgtcctccaccgcgctgatccgcacctctgcccgcgcaggttatttcttcacgcccgaaaacaagaaactcggcacgttcatcatacgcggacaagcgggttacacccttgcccgcgacaatgccgatgtcccctcggggctgatgttccgcagcggtggcgcgtcttccgtgcgcggttacgaactcgacagcatcggacttgccggcccgaacggatcggtcctgcccgaacgcgccctcttggtgggcagcctggaataccaactgccgtttacgcgcaccctttccggcgcggtattccacgatatgggcgatgccgccgccaatttcaaacgtatgaagctgaaacacggttcgggactgggcgtgcgctggttcagcccgcttgcgccgttttccttcgacatcgcctacgggcacagcgataagaaaatccgctggcacatcagcttgggaacacgcttctaa

SEQ ID NO: 37713 - DNA, 960 bp, Neisseria meningitidis
atgacccagcccttgttccgccgtttgaaggaacttcaccccggttgcacgattgatgtgttcgcaccgaagtggtcgatggcggtgtttgagcgtatgccggaagtgaatgagattcttgaaaatccgttcggacatggtgcgttggagttgaaacgccgctggcgggtcggtagggatttggggcggcgcggatacgatcaggttatcgtgttgcccggttctttgaaatcggcaatcatcgcgctggcgacaggtatcggtaaaaggacgggttatgtcggtgaaagccgttattttctgttgaacgatatacgcaggctggataaggaacgtctgcctttgatggtggacagatatacggctctcgcgcatccgagccaggaggattttgacgggcattcgggattccccgagttttccattgatgaacggcggcgggaaatttctgtcgaaacctttggcttggatattggaaagcctgttctggctttttgtccgggtgcggaattcgggccggcaaagcgttggccgacaaggtattttgccgagttgggcaaacattattcggcggcgggttggcaggtttggctgttcggttcgcaaaaagatgatgaaattgccgaggaaatcaactgcctttcagacggtatgtgtgtgaatttatgcggaaagaccgatttgtcgcaggcaatggatttgctgtcgttggcggacacggtcgtgtgcaacgacagcgggctgatgcacttggcggcggcattgggcaggaaggtggtggcggtttacggttcttccagcccgacgcatacgccgcctttgagcgacagggcgaaaatcgtcagcctgcacttggaatgttcgccctgttttaagcgggaatgtccgctggggcataccgactgcctcaacaggctgtatcccgagaagattgtgcaggcggttgaagaggcggtatga

SEQ ID NO: 37714 - DNA, 156 bp, Neisseria meningitidis
atgcgcgataaaatcaaactggaatccagtgcaggtactggtcacttctacaccactaccaaaaacaaacgcactatgcccggcaaactggaaatcaaaaaattcgatccggttgcccgcaaacacgtagtgtacaaagaaaccaaactgaaataa

SEQ ID NO: 37715 - DNA, 552 bp, Neisseria meningitidis
ttgagcggcatcaacatcaaactcaaaagcggcgattccctgctgatacgcggcccgagcggttgcggcaaaacttcgttgctgcgcgcgctggctgggctttggccgttcggcagcagcggcaaagtcagccgtccgccgcatcaagacatcctcttcctgccgcaacgcccgtacacggcacagggcagcctgcgcgacgcggtttgttatcccgacatcgacaaacagcatccggagctaatcgaagccatgaacacctgccgcttgggttatctgattgacaaattggacaaaacagacgactggcagcacaaactctccctgggcgaactgcaacgcgtcgccttcgtccgcgccctgctttccaagcccaaaatcgtcctgctcgacgaagccaccgccgccttggacgaaccggccgaagccgcgctctaccgcgccttaaagcaaaaactgcccgacagcatcatcatcagcatcggacaccgaagcacgctcaacgcgttccacaatatgcgcctcgatgtcggcaacgttgcctgcggttga

SEQ ID NO: 37716 - DNA, 1155 bp, Neisseria meningitidis
atgtcctgcgaacacttaactatgtcatacagcacctttcccaaaaccaaaaacgacgcgctgaatgagccgatgttttttggtcagcctgtgaatgtcgcccgttatgaccagcagaaatacgaggtatttgaaaaactgattgaaaaacaattgtcgtttttttggcggccggaagaaatcgacgtgtcgcgcgaccgtatcgactacgccaacctgcctgaacacgaaaaacatattttcatcagcaatctgaaataccaaacactgctcgattccatccaagggcgcagtccgaatgttgccttgctgcctttggtttcgattcccgagttggaaacgtggattgaaacgtggagcttcagcgaaaccatacactcgcgcagctatacccacatcatccgcaatattgtgaatgatccgtcggtcgtgtttgatgatattgtcgaaaacgaatacattaccgcccgcgccgaagacattgcctgctattacgatgacttaatcgaatacacccagtattacaacctgttgggcgaagggatgcacaatgtcggcggaaaacccgttaccgtatctttgcgcgggttgaagaaaaaactctatctctgcctgatgtgcgtcaacgtgttggaagccatccgtttctacgtttcattcgcctgctcgtttgcttttgccgagcgcgagttgatggaaggcaacgccaaaatcatcaaactgattgcccgcgacgaagccctgcacctgaccggcacgcagcatatgcttaatctgatgcgttctggtgttgatgattctgaaatggcggaaattgccgccgagttgcaggacgaatgtttccaactcttcaaaaaagcggcggaacaggaaaaagaatgggcggcatatttgtttaaggacggttcgatgatcggtttgaacaaagaaatcttatcccaatacgtcgaatatattaccaatctgcgtatgcaggcggtggggttgccggccggatttgaaggcgcaaatcaaaacccgattccgtggattaatgcgtggctgtcgtccgacaacgtacaggtcgcgccgcaggaagtggaaatatcctcttatttgatcggtcagatagattctgaagtgaatacggatgatttgggcgattttgagttgtaa

SEQ ID NO: 37717 - DNA, 666 bp, Neisseria meningitidis
atgacgtttaccgcagtgctcttcgatctcgacggcgtcatcaccgacaccgccgaataccactaccgcgcatggaaaaagctcgccgaagaactgggcatcggcatagaccgcaagtttaacgagcagctcaaaggcgtgtcgcgcgacgattcgctcaaacgcatcctcgcacacggcggcaaaaccgtcggcgaagccgagttcgccgaactgacccgccgcaaaaacgacaactacgtcgagatgattcaggcagtcaaacccgaagacgtgtatctcggcattttgccgctgctggaagcattaaaagcaaacggcaaaaaaatcgcccttgcgtccgccagtaaaaacggccccttcctgctcgaacgcatggggctgacccacttcttcgacaccgtcgccgaccctgccgccgtcgcgcattccaaacccgcccccgacatcttcctcgccgccgccgagggcgtgggcgcggacatccgccgctgcatcggcattgaagacgctgccgcaggtgtcgccgccatcaaagccgccggcgccttgcctatcggcgtgggcaaagccgaagacttgggcagcgacatcgcgctggtgtccgataccgccgagctgacctacgcctacctgcaaaacgtgtgggcacagtcgggcaggtaa

SEQ ID NO: 37718 - DNA, 873 bp, Neisseria meningitidis
atggaaatatggaatatgttggacacttggctcggtgccgtcccgatacgtgcggaggcggtcgaatccgtggcggcggttgcggctttgctgctggcgcgcgcccttctgttgaatatccacttcaaacggcatccggatttcggcatcgaaagcaagcggcggtttttggttgccagccgcaatataacgctgcttttggtgctgttttcgctggcatttatctggtcggcgcaaatccaaacgctggctttgtcgatgtttgcggtggcggcggcggtcgtcgtggcgacgaaggaactgattatgtgtctgtcgggcagtattttaaggtctgccacccagcaatactcggtcggcgactatatcgaaatcaacggcctgcgcgggcgcgtggtcgacatcaacctgttgaacacgctgatgatgcaggtcggtccgaaccccttggtcggacagcttgcgggaaccaccgtttctttccccaacagcctgttgttgagccaccccgtgcgccgcgacaatattttgggcgactatgtcatccatacggtcgaaatccccgttcccatccatttggattcggatgaagccgtatgccgtctgaaagccgtactcgagcccttgtgcgcgccctacatccccgccatccaacggcatttggaaaacgtgcaggcggaaaaactgtttatcacgcccgccgccagaccgcgcgttacccgcgtgccgtacgatgacaaggcataccgcatcatcgtccgcttcgcctcccccgtttcaaagcggctggaaatccaacaggcggttatggacgaatttttgcgcgtacaataccgcctgttaaattaccccgccggctccgaaacactttaa

SEQ ID NO: 37719 - DNA, 1914 bp, Neisseria meningitidis
atgttgaatattaccttgccggacggctcagtccgccaatacgaatcccccgttaccgtggctcaaattgctgcgtctatcggtgccggtttggcgaaggcggcagtggcaggcaaggtaaacggcaaattggtcgatgcgtgcgatccgattaccgaagattcaagcgtccaaatcattactccgaaagatcaggaaggcatcgaaatcatccgccattcctgcgcgcatcttgtcgggcatgccgtcaagcaactctatcctaatgcaaaaatggttatcggccccgtcattgaagagggcttttattacgacatcgccacggaaaaaccgtttacaccggaagatgttgccgccattgaagcgcgtatgaaagaattgattgcccaagactatgatgtggtcaaaatcatgactccgcgtgcggaggcgattaaaatttttcaagagcgcggcgaagaatacaaactgcgcctgattgacgatatgcccgaagtggaagcgatggggatgtatcatcaccaggaatatgtcgatatgtgccgcggcccacacgttccgaatacccgtttcctgaaaaacttcaaactgaccaagttggcgggcgcatactggcgcggcgacagcaacaatgaaatgctgcaacgcatctacggtacggcttgggcgacaaaagacgagttgaaagcctatattcaacgtatcgaagaagccgaaaagcgcgaccaccgcaaattgggcaaacaactggatttgttccacttgcaagacgaagcaccgggtatggtgttttggcatcccaaaggctgggctttgtggcaagtgattgagcagcatatgcggaaagagctgaatgccgccggttataaagaggtcaaaacgcctcaaatcatggataaaaccttttgggaaaaatccggccattgggacaactacaaagacaatatgttcgtgaccagttcagaaaaacgcgaatatgcggttaaaccgatgaactgtccgggtcatgttcaaatttttaacaacggtttgcgttcgtatcgagatttgccgatgcgtttggcggaattcggttcttgccaccgcaatgagccgagcggtgcgctgcacggtctgatgcgggttcgcggttttgtgcaggatgatgcgcatattttctgtaccgaagatcaaatcgtcagcgaggctcgtgcgttcaatgaattgttggttcgcatctacaaacagttcggtttccatgatgtatccgtcaagctttctcttcgccctgaaaaacgtgcaggttcagatgacgtgtgggataaggcagagcagggtttgcgcgaggcattgactgcctgcggcgtggaatggggcgaattgccgggcgagggtgcgttttacgggcctaaaatcgaatatcatgtcagagatgccttgggtcgttcttggcaatgcggtacattacaactggatttcgtcttgccggaacgcttgggtgcagaatatgtaaccgaaaacaacgaccgtgcgcgtcctgtaatgttgcatcgtgctattttgggttctttggagcgatttatcggcattctgattgagaaccatgcaggctctttcccgttatggctggctccggttcaattggtaattatgaatattaccgaaaatcaggcagattattgtcgggaagtggctgccaaattgcaggcggcaggattccgcgccgagttggatttgcgtaacgaaaaaatcggttacaaaatccgcgacaacagccaataccgttttccttatcaaatcgttgtcggcgataaagagaaacaagaaaacaaagttgcggtacgccgcaaagcagaagacttgggttctttggatttggatgatttcattgcgcaattgcagcaagaaatcactgatgccctcgtcaatcattaa

SEQ ID NO: 37720 - DNA, 1170 bp, Neisseria meningitidis
atgagcaaaaaactccatccgcaaacgctcgccatacgcggcggcaaagaacaaaccgaataccgcgaacacaatcaggcattgttcctgaccagcagcttcatgtgggacaacgcccaacacgctgccgatttgttttcaaaaaaaatcaaaggcttcacttatacccgtaccgccaacccgaccacagccgcctttgaaaaacgcatcgccgctttggaaggtgcggaacgcgcggtcgccacttcgaccggcatgtccgcgattcaggcggcgtttttcacctttttgcaggcgggcgaccatgtgatttccagccgcagcctgttcggcacgaccgtcggctttatcaataacatcgttaccaaattcggcatcgaagtgagtcacgtgtcgccgactgatataaacgaatggaaagccgccgtcaaagccaacaccaaactgctgtttttggaaacgccgtccaatcccttgggcgaagtggccgacttggaagccttggcggaattggcgcacggcatcggcgcgctcttggtggtggacaacagcctgctgtcgcctgtcggctctcagcctttgaaacacggcgcggatatttccgtttcctccgcgaccaaagccatagacggacacgggcgcgtgatgggcggcgtgttggcgggttcggaagaactgatggcgcaggtcgccgtttactgcaactcttgcgggctggcaatgtcgccgtttaacgcatggcagttgttgagcggcgtggaaaccctgtctctgcgtatggaaaaacagttcgacaacgccttgaaaatcgcgcaatggctgcaagcgcagccgcaggttcaagccgtgtattacaccggattacccgaccatcctcaggcggagcttatccgcaaacagcaaaacggcggcggcatcgtcatcggctttgaagtcgccgaccaagcagccgcgtggaaagtcgtggacggcgtcgaacttttctcccgtaccgccaacctcggcgacgtgcgctcgaccatcacccatccgtggacaaccacgcacggcaggatgcagcccgaagaaaaactcgccgccaacatccgccccggattggtgcgcctgtcggtcggtttggaatatgttggcgatttgattgacgatttgaaacaggcactcgcgcgctga

SEQ ID NO: 37721 - DNA, 669 bp, Neisseria meningitidis
atgaaaaacctcgccatcttcgacctcgacaacaccctcatcaacaccgattccgaccacgcctggccgcaatacctcatcaaaaaaggcttggttgacgctgccgaaaccgaagcgcaaaacgaaaaattctaccgcgactaccaaaacggctgcctcgacatcgacgcattcctcaaattccacctcgccccgctcgcccgttacagcaaagaagagctggcggaatttcaccgcgaatttatggcggaatacatcatctcccacatctcgcctatgcagcgtatgctggtgcagagccaccaaatggcaggcgacgaaaccctcgtgatttcctcaaccaacgagttcatcatcacccccatctgccaccttttcggcatcaccaacatcatcggcacacaactcgaaaccgatcccgacggtcgctacaccggcaattacatcggtacgcccagcctcaaagaaggcaaaattacccgcctgaaccaatggcttgccgaacgcggcgaaacgctccaaagctacggcaaaacctatttttacagcgactccagaaacgacctgccgctgctgcgcctcgtcagcgaacccgtcaccgtcaaccccgatgccgagctggaaaaagaagccaaagaaaaaggctggccggttttaaatttcaaatga

SEQ ID NO: 37722 - DNA, 1854 bp, Neisseria meningitidis
atgaaccgttatcctttatggaaatatctgctgattgtgttcacgattgcggttgccgcagtgtattcgctgcccaacctattcggcgaaacacccgccgtgcaggtatcgaccaaccgacaagccatcatcatcaacgaacagactcaattcaaagtggatgccgcgctgaaaaacgcaggtattcagaccgacgggatgtttgttgtggacaattcactgaaagtgcgtttcaaagacacagaaacgcagcttaaagcgcgcgacgtcatcgaaaacactttgggcgaagggtatattaccgcgctcaacctgttggcggacagccccgaatggatggcgaaaatcaaagccaatccgatgtttttgggtttggacttgcgcggcggcgtgcatttcaccatgcaggtcgatatgaaagcggcgatgcagaaaacgtttgaacgttattcgggcgacatccgccgcgaactgcgccgcgaaaaaatccgcagcggcacggtgcgtcaggctggaaacagcctgaccgtccctttgcaggatgcaggtgatgtgcaaaaggctctgccgcagttgcgcaagctgtttcctgaagcaacgctgaattcagacggcagcaatatcgtcttgacgctttcggaagaggcggtcaataaagtgcgttccgatgcggtcaaacagaacatcactaccctgcacaaccgtgtgaacgagttgggcgtggccgagcccgtcatccagcagtccggtgcagaccgtatcgtcgtgcagcttccgggcgttcaggatactgccaaggcaaaagacatcatcggccgtaccgcgactttggaattgcgtatggtggaggacgatcctgccaagttgcgcgaggcattggaaggcaacgtgccgagcggttatgagctgctttcaagcggcggagatcgtcccgaaattctgctgattagcaaacaggtcgagctgacgggcgacaacatcaacgatgcgcaaccgagtttcgaccaaatgggcgcacctgccgtcagtctgagcttggacagcgcgggcggcagcattttcggcgaactgactgccgcaaatgtcggcaaacgcatggcgatggttttgatcgaccaaggaaaatccgaggttgtaaccgcgccggttatccgtactgccattacaggcggacgcgtggaaatttccggaagcatgacgacagccgaagccaatgatacgtctttgctgttgcgtgccggttctcttgccgcaccgatgcagattgtcgaagaacgtaccatcggtccgtctttgggtaaggagaacatcgaaaaaggcttccattcgactttatggggttttgccatcgttgctgcattcatggtggtttactatcgtctgatgggtttcttttctaccattgcattgagtgccaacatactgttcctaatcggtattttgtctgccatgcaggcaacgttgacgttaccgggtatggccgcgctggcgttgactttgggtatggcaatcgactccaacgtcttgattaacgaacgtatccgcgaagaattgcgtgtcggcgtgccgccgcagcaggcaatcaatctcggtttccaacacgcatgggcgaccattgtcgattccaacctgacttcgctgattgccggtatcgcgcttttggtattcggttccggcccggtacgcggttttgcggtcgtacactgtttgggtattctgacttcgatgtattcgtccgtcgtcgtattccgtgcgttggtcaatctgtggtacggacgcagacgcaaattgcagaatatttccatcggtgcggtatggaaacctgaagccgaaactgcggcaggtaaggagtaa

SEQ ID NO: 37723 - DNA, 447 bp, Neisseria meningitidis
atgcagcacgaagaaggcaaccgccaacgccctcaaggcgaactgctcctgcgtaccgtcgctatgccgcgcgataccaatcccaaccaagacattttcggcggctggattatgtcgcagatggatttgggcggcggcatattggcggcggaaatcgcgcggggacgcatcgttaccgtcgccgttcaggaaatgaacttcatccgcccggtcaaggtcggcaacgtcgtctgctgctacgggcattgcgtccgcgtgggcaatacttccctccagcttaaaatcgaagtctgggtgaaaactttgatgaacgattgcgttaccgaagaccgctacctcgtaaccgaggcggtgttcacttatgttgccatcgatgcggaaggcaatccgcgcccgattccgaaagaaggcaaccccaaattgtcgggcttattgcctactccgtaa

SEQ ID NO: 37724 - DNA, 3615 bp, Neisseria meningitidis
atgtctgcacccatccaagcatttgacccgctgaccgtccccatttccggcaccaacctgattgaggcctctgccggcaccggcaaaacctacggcattgccgccctgtttacgcgcctgatcgtattagaacaaaaaaacgtcgaacgcgtattggtcgtaaccttcaccaaagccgccaccgccgagttgaaaacacgcctgcgcgcacgtttggacgatgtgttgcaggttttagaaagtaaagaaattgccaaacttggagacgacacgctttcagacggcatcgccgcctattgtgcggaacaccacaaaggcgacaccttcctgcccgcactcttaaaacaggctttgcaaaaagagggccggacgcgtctgattgtccgcctcaaggccgccatcgggcaattcgacaacgccgccatctataccatccacggcttctgccaacgtatcctgcgcgactacgccttcttgtgccaagcaccgttcgatgtcgaactgaccgaagaagacggcgaccgcctgcttatcccggcgcaagatttttggcgggaacgcgtcagcaatgatccggtgcttgccgcattggcgtttaaacgcaaagctgtgccgcaaaccgtccttgcccaaatccgcgcctacctgtcccgcccgtacctgaatttccgccgtccgcaggcggatttgaaacaggcgcagcgcaacgccgaaacctcatggcaaaccgtctgccgcctgctgcccgagctggaagccggcttttggcgcatccatcccgacctcaacggcaacagttaccgcaaaaacagcttcggcaacctttttaaagaactggcacaaaaatccgccgccggacaactgccctttctggacaaagacacgcacgacagactcttgaaacttgcgtccgacaaactcgaagccggactgaaaaaaggcaaaacgcccgatgcggcagtatttgccgaattgcagaaactggcagacttcgggcgcgatttgaacgcactcgaagaagcggaagaagcaacaatgatccggctgcaactggatttaatcgaatacctcaaccgcagccttgccgagatgaaaaaatcgcgccgcgaacgcggtttcgacgacctgctgctcgatgtccacaccgcgctgaccgacaatccgcacgccgaaaccctcgcccgcgccgttgccgaaaactgggaaaccgcgctgatcgacgagttccaagacaccgacccgctgcaatacgaaatcttccaaaaaatcttcatcgcccaaaaccgaccgctgttcctcgtcggcgatcccaaacaggcgatttacagctttcgcggagcggacatttacgcctaccttcaggcggcggaagacgcgcggcaccgctacacgctcgccaccaactaccgcagccacgccgcgcttatcggcagcataggcgcgctgttccgcctcaaagaacgcccgttcgttttggaaaacatcggctattcggaagtcggtgcggcgcgtgccgaaagcagattgtcgcccaaacgtcctgccgtacaggttcgttggctgcacgaaaacgacaatgaaaaagccaacaaagacgttttgcgccgacgtgccgccgactattgcgccgacgaaatcgcccacgcgctcaacgaagccgccggaggccgtctgaatttcaaaggctacccgttgcagtcgggcgatattgccgtgctggtccgcacgcacaacgaggcggtgatggtttccgccgccctgaaaaaacggcaggtgcaaagcgtcctgctttcgcgcgaatccgtgttcgcctcgcccgaagccgccgccctttccgcactcatcggcttctggctcgaaccgcgccgcgccggaacgctgcgctttgtcctgacaagcggcatattcggttatgacgcgcagcaattgcacgacttcaaccaaaacgaaagcgagattttgcattgggcggaatctgcccgaaccgcgctcgacaactggaatcaatacggcattttcgccgccatgcagcaattttcccaaacacacggcatcgaaacgcgcctcttaagccggaacaacgggcgcagcctgaccaattatttccaactgctcgaactgcttgccgccgaagacgcccaaaaccgcaaccccgccgcgctgcacaaatggctgcgcgaccaaatcagcctagccgacaacaacggcggcgacaaccgcgccatccgtctggaaagcgacgaagatttggtcaaaatcgttaccatgcacgcctcgaaaggtttgcagtatccgctggtgtactgcccgtttgcgtgggacgcgcaagataccgggccgtccgactggcaaatcctccaccaaagcgccaaccgaaccgaactgttggcaaaggcgcaactgtcggaagacgaacagaagcaatacgccgatgaggaaatggcggaacgcctgcgcctgctttatgtcgcgctgacgcgtgcagaggaacagctcaacatctacgccgcatactccaccaatactgccgacacccccctcgcctacctgattgaaggctcgccccaagacagccgcgaaaccgtccgccaaacctatgcccaagaaaaggacggcatcgcgatgctcaaacgcaactggcggcgtttggcggacaacgccccagccggcacggatttcgtcttcacagaagatgcgccgccccctgccgcctatcgcggcaacgccgatcaaaccgccgaatttgccgcaaacagcattcccgaacgcggattccgatttgtccgccacaccagctttaccaccttaagccgccatacccaaacgcccgacggcagtgaagaagatgcctgcccgtccttggatgccgccgaaacctcagtgccggcaatgccgtctgaaacgccgacggcttcagacggcatatcgatacacaactttccgaaaggcacgcaggcggggctgtgcctgcacgaaattcttgaaaatttcaaattcggacaagcagccgccggacaggaaaccttcatcaccgacaagctgaaaaaatacggatttgaagaaatatggctgcctgccgttgccgaaatggcggaagcctgccaaaaaacgccgctgacgggggcatacggcctgtccgacatcctatccgagtgccgctgtcccgaaatgggctttaccctccacaccgaagacttcggtctcaaacggctgcgcgactggtttgcccgcgacgacatcaggctacccgaagtctgccgtgccgccgccgaaacgctcgacttccacaccgtcaacggctttttaaacggctttatcgacatggtctgccaagaccccgacggcaatatctgcgtcatcgactacaagtcgaaccacctcggcacggacgcatccgcctacacgcaacaggcaatggacgaagccgtcgcgcaccaccactattaccttcaggcactgatttacgccgttgccgccgcacgctacttcaagctgcgcggacaaccgcccgccgccgtttccgtccgctacctgtttttgcgcggattggatggcaaaggcggcggcgtttggcgttgggacatagatgccgacactttggaacagataaaataa

SEQ ID NO: 37725 - DNA, 1293 bp, Neisseria meningitidis
atgggcattgccaccgtcgccgtgcattccgaggccgacaaagacagcctgcacgtcaaactcgccgacgaatccgtgtgcatcggccctgccgcttccgcgcaaagctaccttaacgtccccgccattatcgccgccgccgaagtaagctgcgcggacgctgtccatccgggctacggtttccttgccgaaaacgccgatttcgccgaacaggtcgagcagtccggctttacctttatcggcccgaaacccgacaccatccgcctgatgggcgacaaagtctccgccaaacacgcgatgatagcggcaggcgtaccctgcgtccccggttctgacggcgcattgcccgacgacggcgaagaaatcctcaaaatcgccgataaagtcggttatcccgtcattatcaaagcctccggtggcggcggcggtcgcggtatgcgcgtggtcgagaaaaaagaagacctcctccaatctgtcgaaatgaccaaggccgaagcgggcgcggcattcggcaacccgatggtttacatggaacgctatttgcaacgtccgcgccacgtcgaaatccaagtgattgccgacgaacacggcaacgccatctaccttgccgagcgcgactgttcgctgcaacgccgccaccaaaaagtcatcgaggaagcaccggctccgttcatcactgaaaaagaacgcgccaaaatcggcaacgcctgtgccgatgcctgcaaacgcatcggctaccggggcgcgggtacgtttgagtttttatacgaagacggcgaatttttctttatcgagatgaacacgcgcgttcaggtcgagcatccggttaccgagctcatcaccggcgtggacatcgtgcaggagcaactccgcatcgccgccggcctgcctttgcaatacaaacaaaaggatattcaagtcgaaggccacgcgtttgagtgccgtatcaacgccgaagacccatacaacttcatccccagcccgggcccgattgaaagctgccacctgcccggcggcttcggtatccgcgtggacagccacatttaccaaggctaccgcatcccaccgtactacgacagcctgatcggcaaaatctgcgtacacggcaaaacgcgtgaacaggcaatggcgaaaatgcgcgtcgcactcgccgagctggcggtaaccggcatcaaaaccaatacgccgcttcaccgcgacctgttcgccgatgcgggtttccaaaaaggcggtgtcagcatccactatttggaacactggctggaagatcgcaaagccaaacaggacaagtaa

SEQ ID NO: 37726 - DNA, 1302 bp, Neisseria meningitidis
atggctatttaccaatcaggcgtgatttttgaccaagtggataccgccaatcccgattgttggacattggacgaatacgtcaaacgtggcggttataccgccctgcgtaaaatcctgtccgaaaacatctcgcaaaccgatgtgattgatgaagtcaaaacctccggcttgcgcgggcgtggcggtgcgggcttcccgaccggtttgaaatggagctttatgccccgttccttcccgggcgaaaaatatgtggtttgcaacaccgacgaaggcgagccgggtacatttaaagaccgcgacatcatcatgttcaatcctcatgccctgattgaaggcatgattattgccggttacgcgatgggcgcaaaagcgggctacaactatatccacggcgaaattttcgaaggctatcaacgctttgagaccgctttggcgcaggcgcgtgccgcaggctttttgggtaaaaatattttaggctcggattttgaatttgaactcttcgcccaccacggctacggcgcatatatttgcggcgaagaaaccgcattgctcgaatcgctggaaggcaaaaaaggccagccgcgctttaaaccgccattccctgcttcgttcggcctgtacggcaaaccgactaccatcaacaataccgaaacgttctcctccgttccattcattatccgtgacggcggacaggcgtttgccgataaaggtattccgaatgcaggcggtaccaaattattctgtatttccggccatgtcgagcgtccgggcaactatgaagtgccattgggcacgccgtttgccgaagtcctgaaaatggcaggcggtatgcgcggcggtaaaaaactcaaagccgttattcccggcggttcgtccgcgcccgtgttgcctgccgatatcatgatgcagaccaatatggactatgactcgatttccaaagcaggctcgatgttgggttccggcgcgattatcgtcatggacgaagacgtgtgcatggtgaaagctctcgaacggttaagctacttctactacgacgagtcttgcggccaatgtaccccctgccgcgaaggtaccggctggctttaccgcatcgtccaccgcatcgtagaaggcaaaggctgtatggaagacttggatttgctggattctatcggtaaccaaatggcaggccgcaccatctgcgcccttgccgatgccgctgttttccctgttcgcagctttaccaagcatttccgtgatgagtttgtgtattacatcgaacacggcgggccgatgaaagagcataagtggggagggtggtaa

SEQ ID NO: 37727 - DNA, 1131 bp, Neisseria meningitidis
atggccaaacatctgccactcgccgtcctgactgctttgctgcttgcagcgtgcggcggttcggacaaaccatctgccgaaaatccgacatcggcggaaaaccgaaacgtattaaaaatttacaactggtcggaatatgtcgatccggaaaccgttgccgattttgaaaagaaaaacggcatcaaggttacttatgatgtgtacgacagcgatgaaacgctggaaagcaaggtgctgacaggcaagtccggttacgacattgtcgcgccgtccaatgcgtttgtgggcaggcagattaaggcaggtgcgtatcagaaaatcgataagtcgctgattcccaattataaacacctcaaccccgaaatgatgaggctgatggacggggtcgatcccggccacgaatacgccgtgccgttttattgggggacaaataccttcgccatcaataccgaacgcgtgaaaaaggctttgggtacggacaagctgccggacaaccagtgggatttggtgttcgaccccgaatacacgtccaaactcaagcaatgcggcatcagctatttggacagcgcggcggaaatctatcctatggtgttgaactatttgggtaaaaacccgaacagcagcaatacggaagacatcagggaggcaaccgccctactcaagaaaaaccgccccaatatcaaacgctttacttcgtccggctttatcgatgatttggcgcgcggcgatacctgcgtaacaatcggtttcggcggcgatttgaacatcgccaaacgccgtgccgaagaagcgggcggcaaggaaaaaatccgcgtgatgatgcccaaagagggcgtggggatttgggtggattctttcgtgattccgaaagatgcgaaaaacgtcgccaacgcgcacaaatacatcaacgacttcctcgacccggaagtgtcggcgaaaaacggcaatttcgttacttatgcgccttcgagcaagccggcgcgtgagctgatggaagacgaatttaaaaacgacaatacgattttcccaaccgaggaggatttgaaaaacagctttatcatggtgcctatccagccggcggcattgaagtttatggtgcgccagtggcaggatgtgaaggcggggaaataa

SEQ ID NO: 37728 - DNA, 498 bp, Neisseria meningitidis; identical to SEQ ID NO: 37021

SEQ ID NO: 37729 - DNA, 594 bp, Neisseria meningitidis
atggaacactatttgagcctcttcatcaaatccgtcttcattgaaaatatggcactatccttctttttgggtatgtgcacgtttttggcggtatccaaaaaagtatccaccgcattcggtttgggtgtggcggtaattttcgtactcgggctgtccgtccctgtcaaccaactcgtttactcgctgctcaaagacggcgcgattgtcgaaggcgtggatttgacctttttgaaattcatcaccttcatcggcgtgattgccgctttggtgcagattttggaaatgttcttggataaattcgtccccgccctctataacgcattgggcatctacctgccgctgattaccgtgaactgcgcgattttcggcgccgtatcgtttatggcgcaacgcgaatacaacttcggcgagtccgttgtatacggcttcggcgcgggcttgggctggatgttggcgattgtcgctttggcgggcattaccgaaaaaatgaaatattcggacgctcccaaaggcctcaaaggcttgggcattacctttatcgccgccggcctgatggcgatggcgtttatgtcgttctctggcatccagttataa

SEQ ID NO: 37730 - DNA, 546 bp, Neisseria meningitidis
atgacttatgaaaaactttatgagcttcgccaaacactcagaccgactaccaaagacggtctctatacagataatgaaaaaagtcgagaaatcctaacggttagatggagcggcaacacagaaaatcctaaaaatttctcagctgttgctataggaattaatccaagtaaagcaaatgatgaaagaagcgacaaaacccttacccaacttgcacgtttcttggatatgtacggttttaccaacttcaaaatgttaaatattttttccagttactctacacagcaaacaggaattagggcaaacacccaaaccgatttttccaaatttaaaggatgtttggaagatgctgatatgattattcttgcatggggtacagaccgcagtgcttataaggatgaaaaaaacagaatactggaatttctaaaagcagaaaaatttatggaaaaagtattctgtatttctgaaactggtaattccagcgatacaagacatccgtcaagaattagttatagctatcaacttgtacaatttgaagagtcagcatga

SEQ ID NO: 37731 - DNA, 1101 bp, Neisseria meningitidis
atggcaggcaacactttcggacaactcttcaccgtgaccacgttcggcgaaagccacggcgcaggtttgggctgcatcatcgacggctgcccgcccggcttggaattaagcgaagcggatatccaatttgacctcgaccgacgcaaacccggcaccagccgccacgttacccaacgccgcgaaaccgaccaagtagaaatcctctccggcgtattcaaaggcaaaaccaccggcacgcccatcgccctcttaatccgcaataccgaccagcgcagcaaagactacggcaacatcgcccaaagtttccgccccggccatgccgactatacctattggcacaaatacggcacgcgcgactaccgcggcggcggcaggagctccgcccgtgaaaccgccgcccgcgttgctgccggagccgttgccaaaaaatggttgaaagaaaaattcggcacggaaatcaccgcctacgttacccaagtcggcgaaaaagaaatccggtttgaaggctgcgaacacatttcccaaaatcctttttttgccgccaaccatagccaaattgccgagctggaaaactatatggacagcgtgcgcaaatcgttggattccgtcggcgcgaagctgcatattgaagccgccaatgtccccgtcggcttgggcgaacccgttttcgaccgcctcgatgccgaaatcgcctacgcgatgatgggcatcaacgccgtaaaaggcgtggaaatcggcgcaggttttgacagcgtaacgcaacgcggcagcgaacacggcgacgaactgaccccgcaaggcttcctgtccaaccattcgggcggcatcctcggcggcatcagtaccgggcaagacatctgcgtcaatatcgccatcaaacccaccagctccatcgccaccccgcgccgcagtatcgacatcaacggcaaccccatcgaactcgccacgcacggcaggcacgacccctgcgtcggcttgcgcgccgcgccgattgccgaagctatgctcgccttggttttaatcgaccacgccctgcgccatcgtgcgcaaaatgcggatgttgccgtggatacgcccgatatcgcccgctcggacaagtaa

SEQ ID NO: 37732 - DNA, 957 bp, Neisseria meningitidis
atgaccgtctgtttcaccacatacccgaacgcaacaatgaaaatcaggctggggcggcacaacgcgcccgactttccgcacggggccgccgtaaccataggcaattttgacggcgtacacctcggacacaaacacatcctccaaaaactccgcttcgaagccgatacgcgcggattacctgtcgtggtcgtcattttcgaaccccaacccaaagaatttttcgcactccgcaccggcaggatgccgccgtgtcggatcagccccctgcgcaccaagctcgaattattggaaggcacaggctgtgtcgatgccgtctgggttttgcgtttcgatcaaaatttttccgaaatatccgcgcaagggtttatcgaccgcctgctgcgtcaaaccttgaatacgcgttatttgctcgtcggcgacgatttccgtttcggggcggggcgggaaggctgttttgaacttttggcacaacagcccgatatgcaaaccgagcgcacgccttccgttatcgtcgaggacatccgcaccagcagtaccgccgtgcgacaagccctttcagacggcaaccttgcctatgcgaaaaaacttttgggacacgactacgttttggggggcagagtggtgcacggcagaaaactcggacgcaccctaaacgccccgactgccaacatccgcctgcccggccaccgttatgccctcggcggcgtgtttgtcgtcgaagcggacggcgcattcggcacgcggcgcggcgtggcgagcttcggcttcaatcccaccgttgatagcggctgttctcaaaagcttgaagtccacctgttcgactttcaaggcgacctgtacggacaacggctgaacgtccgcttcctgcacaaactgcgcgatgaagaaaagtttgacggtatggaagaactgaaaaggcagattgaagccgatatggaagccgcaaagtgttggtag

SEQ ID NO: 37733 - DNA, 318 bp, Neisseria meningitidis
atggtagtacgcggcggaatctatctggtctccttagacccgaccgtaggaagcgaaatcaaaaagacacgtccttgtgtcgtagtatctcctcctgaaatacacaactatctcaagactgtgctgatcattcccatgacgagcggaagccgtcctgccccgttccgcgtcaatgtccgctttcaggataaagacggtttgcttttgcccgaacagattagggctgtggataaagccggattggtcaaacatcttggaaatttagacaacagtacggctgaaaaactgtttgcagtattgcaggagatgtttgcctga

SEQ ID NO: 37734 - DNA, 807 bp, Neisseria meningitidis
atgaatatgaaaaaatggattgccgccgcccttgcctgttccgcgctcgcgctgtctgcctgcggcggtcagggcaaagatgccgccgcgcccgccgcaaaccccgacaaagtgtaccgcgtggcttccaacgccgagtttgccccctttgaatctttagactcgaaaggcaatgtcgaaggtttcgatgtggatttgatgaacgcgatggcgaaggcgggcaattttaaaatcgaattcaaacaccagccgtgggacagccttttccccgccttgaacaacggcgatgcggacgttgtgatgtcgggcgtaaccattaccgacgaccgcaaacagtctatggacttcagcgacccgtattttgaaatcacccaagtcgtcctcgttccgaaaggcaaaaaaatatcttcttccgacgatttgaaaaacatgaacaaagtcggcgtggtaaccggctacacgggcgatttctccgtttccaaactcttgggcaacgacaacccgaaaatcgcgcgctttgaaaacgttcccctgattatcaaagaactggaaaacggcggcttggattccgtggtcagcgacagcgcggtcatcgccaattatgtgaaaaacaatccgaccaaaggaatggacttcgttaccctgcccgacttcaccaccgaacactacggcatcgcggtacgcaaaggcgacgaagcaaccgtcaaaatgctgaacgatgcgttgaaaaaagtacgcgaaagcggcgaatacgacaaaatctacgccaaatattttgcaaaagaaaacggacaggccgcaaaataa

SEQ ID NO: 37735 - DNA, 423 bp, Neisseria meningitidis
atggaatgggtgtctttattttctgatccgcaaagagacgatgatagtcttataacccttaaagatgaaaaaatcactgtaaaaaactatattgtgccttggtggaaaaaaggtgaaaactttagaaaattagaacttattaccactggtaaaaatgataatggaaatttaacggtaaatggaatttacggcatccaatcttttgcagactctcaattgggatatacgcctgaattattggtaaaaagcaataatgatattctatttaaaaataatttccaatctgttgacgtgaagccccattccggaaatatccatttggatgccaaaggaaaaattcaatttaatttgaatgttcccgatgttgatggggtacaagatgtagccagtggaaaaaaataccgacaaacaatagtgccttag

SEQ ID NO: 37736 - DNA, 312 bp, Neisseria meningitidis
atggcaaaccaaaaaatccgtatccgcctgaaagcttatgattacgccctgattgaccgttctgcacaagaaatcgttgaaactgcaaaacgtaccggtgccgttgtaaaaggcccgattcctttgccgaccaaaatcgaacgtttcaacattctgcgttctccgcacgtgaacaaaacttcccgtgaacaattggaaatccgcacccacttgcgcctgatggacatcgtggattggaccgataaaactaccgatgcgctgatgaagctggatttgccggccggtgttgatgtagaaatcaaagtccaataa

SEQ ID NO: 37737 - DNA, 642 bp, Neisseria meningitidis
atgattgttttagtcggtttgggaaataaaaaaatgaagaataatgattgcttccgcctgaaaaacccccagtccggtatggcgctgatagaagtcttggtcgctatgctcgttctgaccatcggtattttggcactattgtccgtacagttgcggacagtcgcttccgtcagggaggcggagacgcaaaccatcgtcagccaaatcacgcaaaacctgatggaaggaatgttgatgaatccgaccattgattcggacagcaacaagaaaaactataatctttacatgggaaacaatacactatcagctgtggatggtgagtttgcgattgatgccataaaaactaagacgcagttggcagaggcacaattgaagagatttagttatgagctgaaaaatgccttgccggatgcggcagccatccattacgccgtctgcaaagattcgtcgggtaacgcgccgacattgtccggcaatgctttttcttcaaattgcgacaataaggcaaacggggatactttaattaaagtattgtgggtaaatgattcggcaggggattcggatatttcccgtacgaatcttgaggtgagcggcgacaatatcgtatatacttatcaggcaagggtcggaggtcgggaatga

SEQ ID NO: 37738 - DNA, 330 bp, Neisseria meningitidis
atgactgataaaagtaaaacagaaaagttgatttcttctgatgataaacaaagtgttatagatggcattcttgatatggtatttaattccaaagcatatgaagtaccgtggatttctgagaaattgatggaattatcgaaaaataaagacttggatattgccggattatcgctaacctgtttcggacatctcgccaggctacattcaaatatcggtgattacgataaagttatttctttactacattcaaagcaagatgatccagagcttcaaggtagggctgaagatgcgttagaagatatttctttatttttatctgaaaatcattag

SEQ ID NO: 37739 - DNA, 942 bp, Neisseria meningitidis; identical to SEQ ID NO: 36575

SEQ ID NO: 37740 - DNA, 480 bp, Neisseria meningitidis
atgagtttgaactgggagatgacagagcaggactttgaggctgtgaaacatctgctgccgcacagtgtggtggcgatgattacggttatcgggctggaggcggcgtttcacatggttaaggtttggggcgggacgaattatccgatttccaaccgccgccgcaatacgcgtcagagccgcatcttacacgctcaactggtcgaggacatcggcgaagaagcagcgggacggttggagcgtgcttatgtcgggcagcctttcttggcgattccgcgctgctgggatgcgatgcgcgaacttcgcaaccggttcatccgccgccaatatgatgcgatgagcgcggaaggtttgagcgatttgtttattgtgcgcgagctggtattggctcatcggctgtctgcgcgcaatatccgatacattttgaaagaggccgaccgcgaggcggcggcaagagcgcagacggatttatttgtagcttga

SEQ ID NO: 37741 - DNA, 1623 bp, Neisseria meningitidis
atgaaaacaaaagaattcctcaaatcccttgccgaactggccgccagcctgcgccaagtcatcgaagcggaagtggacggcttcgatgcgtcgcccaaggctattgctgcacgccgtgccaaggtgtttgacccggtaggcggttacgagtatttcgtcaacacctactttccgcattatatccgctcccctgaaaaatccgaactgcatgagttcttattcagccgtctgccggagattatccactcccccaaaggggaaaatgaggcggtaggtgcgccgcgtggcgagggtaagtcgacgcaggttactcagttgtttacgctgtggtgtattgtgacaggccaaaaacattatgccgttattgtgatggacagtattgaccaggcatacccgatgctcgaagccatcaaggcggaattggaatttaatccgcgcttgaaaaccgactttccggaagtatgcgggcagggccgtgtatggcaggccggtacgattgtgacggccaatgacgttaaagtccaagtggccggtagcggtaaaaagctgcgcggtttgcgtcacggcccttaccgtcctgacttaactgttttggacgatattgagaatgacgagcaagtccgcaacccggaacagcgcgacaagctcaatgcgtggctaactaagactgtattgcctttgggcggggtcggccagaaatacgatgtgatatatatcggcacgattttgcattacgacagcgtacttaaccgcactttgaataacccgttttggcacggtattaagtttaaggcgatgaaacgctggcccgaccgcatggatttgtgggacagatgggaggaacttttccgcaacgacggcgagacggtggccgaggcgttttatctcgccaacaaagacgagatggagcgcggcgcagtcacttcttgggcggcgcgtggcgtactcgcgctgatgaaaatccgcgcccgcgacggtcatgcgacgtttgacagcgaatatcaaaacgacccggtcagcggcgaagatgcgccgtttgccaagtcgatgaagttttggaacgacctgccgtccgatttggtgtatttcggtgcgctcgacccgtcgctgggtaaagcgggggcgagccgtgacccgtcggcgattatcattggcggttatcaacgtgaaaccggcaaactgtatgtcgtggaagctcagattaaaaaacgtctccctgatttgattattgaggacgttatcagattgcaccgtcaatatcgttgcaaactgtggtttgttgagacggtgcagtttcaggagtttttaaaagacgagctggtcaagcgcagtgcggcgcgtggaatacctgtcccggcgcgggcggtcaagccggtatcggacaagctcttgcggattgagactttgcagcctcacatggcgaacggtttgattctgttgaatgagagccaacaaacgctgatacagcagttccgccattttccaaaggctgatcatgatgatggtcctgatgccgtgcatatgctctggtcgggggcggtggcgaattgtgtgccgatagaatggcaaagccctaccgataacgattttgatgacgagataaaaagtaaatggagccgataa

SEQ ID NO: 37742 - DNA, 405 bp, Neisseria meningitidis
ttggctgaaggtcaaaaatcagccgtcaccgagtattacctgaatcacggcatatggcccggcgacaacagttctgccggcgtggcaacctcctctaaaatcaaaggaaaatatgttaaggaagttacagtcgcaaacggcgtcgttaccgccacaatgctttcaagcggcgtaaacaaagaaatccaaggcaaaaaactctccctgtgggccaagcgtcaagacggttcggtaaaatggttctgcggacagccggttacgcgcgacgccaacgccagcgccgacgccgtcaaagccgacaccgacaagaagatcgacaccaagcacctgccgtcaacctgccgcgacgcttcatctgccgtttgcatagaaacaccacctacggctttctataaaaatacctaa

SEQ ID NO: 37743 - DNA, 1677 bp, Neisseria meningitidis
atgagcttcaaaaccgatgccgaaatcgcccagtcttccaccatgcgcccgattggcgaaattgccgccaagctgggcctgaacgccgacaacattgagccttacggtcactacaaagccaaaatcaatcctgccgaagcattcaagctgccgcaaaaacaaggccgtctgattttggttactgccattaatccgactcctgcgggtgagggtaaaaccacagtaaccatcggtttggcggatgcgttgcgccatatcggcaaagactcggttatcgccctacgcgaaccttctttggggccggtgttcggtgttaaaggcggtgcggcaggcggcggctatgcccaagttttgccgatggaagacatcaacctgcacttcaccggagattttcacgccatcggtgcggcaaataatctgcttgccgcgatgctcgacaaccatatctatcagggcaacgagttggacatcgaccccaaacgcgtgctgtggcggcgcgtggtcgatatgaacgaccgtcagttgcgcaacatcatcgacggcatgggcaaacctgttgacggcgtgatgcgtcccgacggtttcgatattaccgttgcctccgaagtgatggcggtattctgtcttgccaaagacatcagcgatttgaaagagcgtttgggcaacatccttgtcgcctacgccaaagacggcagccccgtttacgccaaagatttgaaagcgaatggcgcgatggcggcattgcttaaagatgcgattaagcccaacttggtgcaaaccatcgaaggcacgcccgccttcgtacacggcggcccgttcgccaacatcgcccacggctgcaactccgtaaccgcaacccgtctggcgaaacaccttgccgattacgccgtaaccgaagcaggcttcggcgcggacttgggcgcggaaaaattctgcgacatcaaatgccgccttgccggtttgaaacctgatgcggctgttgtcgtggcgactgtccgcgcgttgaaatataacggcggcgtggaacgcgccaacctcggcgaagaaaatttagacgctttggaaaaaggtttgcccaacctgctgaaacacatttccaacctgaaaaacgtattcggactgcccgtcgtcgttgcgctcaaccgcttcgtgtccgactccgatgccgagttggcgatgattgaaaaagcctgtgccgaacacggcgttgaagtttccctgaccgaagtgtggggcaaaggtggtgcgggcggcgcggatttggcgcgcaaagtcgtcaacgccattgaaagtcaaaccaataacttcggtttcgcctacgatgtcgagttgggcatcaaagacaaaatccgtgcgattgcccaaaaagtgtacggcgcggaagatgttgatttcagcgcggaagcgtctgccgaaatcgcttcactggaaaaactgggcttggacaaaatgccgatctgcatggcgaaaacccaatactctttgagtgacaacgccaaactgttgggctgccccgaaggcttccgcatcgccgtgcgcggcatcaccgtttccgccggcgcgggcttcatcgtcgcgctgtgcggcaatatgatgaagatgccgggtctgccgaaagttccggccgccgagaaaatcgatgtggacgaacacggcgtgattcacggcttgttctga

SEQ ID NO: 37744 - DNA, 2658 bp, Neisseria meningitidis
atgacaagacatttgagagacattgaaaaaattatgaaaacctccgaactgcgccaaaaattcctaaaattttttgaaaccaaaggccacaccgtcgtccgctcttccagcctcgtgccgcacgacgacccgaccctgctgtttaccaacgcgggcatgaaccaatttaaagacgtattcttaggtttcgacaaacgcccgtacagccgcgccaccaccgcgcaaaaatgcgtacgcgccggcggcaaacacaacgacttggaaaacgtcggctacaccgcccgccaccacaccttctttgaaatgatgggcaacttctccttcggcgactacttcaaacgcgacgccatccatttcgcttgggagtttctgacttcccccgaatggctcaacatccctaaagacaaactgttggcgaccgtttacgcggaagacgacgaagcctacaacatctggttgaacgaaatcggtatgccgtccgagcgcatcgtccgcatcggcgacaacaaaggcgcgaaatacgtgtccgacaacttctggcaaatgggcgacaccggcccttgcggcccctgctccgaaattttctacgaccacggcgaagaaatctggggcggcattcccggcagccccgaagaagacggcgaccgctggatcgaaatttggaactgcgtatttatgcagttcaaccgcgacgaacaaggcaatatgaatccgctgcccaagccgtccgtcgataccggtatgggcttggaacgtatggccgccgtcatgcagcatgttcacagcaactacgaaatcgacttgttccaagacctgctcaaagccgttgcccgcgaaaccggcgcagctttcagcatggatgaacccagcctgaaagtcatcgccgaccacatccgctcctgctccttcctgattgcagacggcgtattgccgtccaacgaaggccgcggctacgtattgcgccgcattatccgccgcgccgtgcgccacggttacaaactgggtcaaagcaaaccgttcttccacaaactggtggccgatttggtcaaagagatgggcggtgcctaccctgaattgaaagaaaaacaagcacaaattgaagaagcattgaaaaacgaagaaagccgttttgcccaaacgctggaaaccggtatggctttgttggaaaacgcgctggccaaaggcggcaaaacactcgacggcgaaatcatcttcaaactctacgacacctacggcttcccatacgacttgactgccgacatctgccgcgaacgcaatatcgaactggacgaagcaggcttcgagcgcgaaatggaagcccaacgcgcacgcgcacgcgccgcccaaagcttcaaagccaacgcccaactgccttatgacggtcaagacaccgagtttaaaggttatagcgaacgccaaaccgaatccaaagtcctcgccctctacaaagacggcgagcaagtcaacgaattgaacgaaggcgacagcggcgcagtcgtcatcgactttaccccgttctatgcagaatccggcggccaagtcggcgatgtcggctatatcttctcaagcgaaaaccgctttgaagtacgcgatacccaaaaaatcaaagcggccgtgttcggacaattcggcgtacaaacttcaggccgtctgaaagtcggcgacagcgttaccgccaaagtggacgacgaaatccgcaatgccaatatgcgcaaccacagcgcaacccacttgatgcacaaagccctgcgcgacgtattgggcggacacgtcgaacaaaaaggctctttagttaccgccgaatccacccgtttcgacatttcccatccccaagcggtcactgccgaagaaatcgccgaagtcgaacgccgcgtcaacgaagccgttttggcgaacgttgccgtcaatgcagccattatgagcatggaagacgcgcaaaaaaccggcgcgatgatgctcttcggcgaaaaatacggcgaagaagtgcgcgtactgcaaatgggcggtttctctaccgaattgtgcggcggcacacacgtttcacgcaccggcgacatcggcctcttcaaaatcatcagcgaaggcggtattgccgcaggcgtgcgccgtatcgaagccatcaccggcctgaacgcactcaaatgggcgcaagagcaagagcgtttggtgaaagacatcattgctgaaaccaaagcccaaaccgaaaaagacgtactggcgaaaatccaagcaggcgcggcacacgccaaagccttggaaaaagagttggcaaaagccaaagccgaactcgccgtccacgcaggcgcaaaactcttggacgacgcaaaagacttgggcgcagccaaactcgttgctgcccaaatcgaagccgacgcagccgccctgcgcgaaatcgttaccgatttaaccggtaaatccgacaacgccgtgattcttttagcggcagtaaacgacggcaaagtctccctgtgcgccggcgtatccaaaccgttgaccggcaaagtgaaagcaggcgatctggttaaatttgcagccgaacaagtcggcggcaaaggaggcggccgtcccgacttggcgcaggccggcggcacggatgccggcaaattgcccgaaatgctggtaagcgtggaaagctggctttgtcagaaattaagttaa

SEQ ID NO: 37745 - DNA, 279 bp, Neisseria meningitidis
atgttgctggcaacagacggggagaatgtgtatgaagcgcgtatggcggcacgtcccgaacacctcaaacggctggagacgctgaagtcggaaggccggctgttgacggcaggcccgaatcctttgccggaggactccaaccgcgtttcgggcagtttgattgtggcgcagttcgagtctttggatgcggcagaggcgtgggcggaagacgatccctatgttcatgcaggcgtgtacagcgaagtgctgatcaagccgtttaaagcggtgttcaaataa

SEQ ID NO: 37746 - DNA, 1689 bp, Neisseria meningitidis
atggacagcaacgacctcgaaaaagaacgcggcatcaccatcctcgccaaaaacaccgccatcgattacgaaggctaccacatcaatatcgtcgacacgccgggacacgccgacttcggcggcgaagtagagcgcgttttggggatggtggactgcgtcgtcttgttggtggacgcgcaggaaggcccgatgccgcaaacccgtttcgtgaccaaaaaagccttggctttggggctgaaaccgattgtcgtcatcaataaaatcgacaaaccgtccgcccgtccgagctgggtcatcgaccaaactttcgagctgttcgacaacttgggcgcgaccgacgagcagttggatttcccgattgtttatgcttccggtctgtccggtttcgccaaattggaagaaaccgacgagagcaacgacatgcgtccgctgttcgatactatcttaaaatatacgcctgcaccgagcggcagcgcggacgaaacgctgcaactgcaaatttcccaactcgactacgacaactacaccggccgcctcggcatcggtcgtatcttgaacggacgcatcaaacccggccaaaccgttgccgtcatgaaccacgagcagcaaatcgcccaaggccgcatcaaccagcttttgggtttcaaaggcttggaacgcgtaccgcttgaagaagccgaagccggcgacatcgtgattatttccggtatcgaagacatcggcatcggcgtaaccatcaccgacaaagacaaccccaaaggcctgccgatgttgagcgtggacgaaccgacgctgacgatggactttatggtcaacaccagcccgctggcgggtacggaaggcaaattcgtaaccagccgccaaatccgcgaccgcctgcaaaaagaattgctgaccaacgtcgccctgcgcgtggaagacaccgccgatgccgacgtgttccgcgtatccggacgcggcgagctgcacctgaccattttgttggaaaatatgcgccgcgaaggctacgaactcgccgtcggcaaaccgcgcgtcgtgtaccgcgacatcgacggtcaaaaatgcgaaccttatgaaaacctgaccgtggacgtacccgacgacaaccaaggcgcggtaatggaagaactcggccgccgccgtggcgaactgactaatatggaaagcgacggcaacggacgcacccgcctcgaataccatattccagcgcgcggcttgatcggtttccaaggcgaatttatgaccctgacgcgcggggtcgggctgatgagccacgtgttcgacgattacgcgcccgtcaaacccgatatgcccggccgccacaacggcgtgctggtgtcccaagagcagggcgaggcagtcgcttacgccttgtggaatctggaagaccgcggccgtatgttcgtatcgcccaacgacaaaatctacgaaggtatgattatcggcatccacagtcgcgacaacgatttggtggtcaacccgctcaaaggcaaaaaacttaccaacatccgtgccagcggtaccgacgaagccgttcgcctgaccacgccgattaagctgacgctggaaggtgcggtcgagtttatcgacgatgatgagctggtagaaatcacgccgcaatccatccgtctgcgcaagcgttacttgagcgaattggaacgccgccgccactttaaaaagctggattga

SEQ ID NO: 37747 - DNA, 1563 bp, Neisseria meningitidis
ttgtttgaagtgatgaaaaaacctttgatttcggttgcggcagcattgctcggcgttgctttgggcacgccttattatttgggtgtcaaagccgaagaaagcttgacgcagcagcaaaaaatattgcaggaagcgggcttcttgaccgtcgaatcgcaccaatatgagcgcggctggtttacctctacggaaacgacggtcatccgcttgaaaccggagttgctgaataatgcccggaaatacctgccggacaacctgaaaacagtgttggaacagccggttacgctggtaaaccatatcacgcacggccctttcgccggcggattcggcacgcaggcgtacattgaaaccgagttcaaatacgcgcctgaaacggaaaaagttctggaacgcttttttggaaaacaagtcccggtttcccttgccaataccgtttattttaacggcagcggtaaaatggaagtcagtgttcccgccttcgattatgaagagctgtcgggcatcaggctgcactgggaaggattgacgggaaaaacggtttatcaaaaaggtttcaaaagctaccgcaacagctatgatgcgcccttgttcaaaatcaagctggcagacaaaggcgatgccgcgtttgaaaaagcgcatttcgattcggaaacttcagacggcatcaatccgcttgctttgggcagcagcaatctgaccttggaaaaattctccctagaatggaaagagggtgtcgattacaacgtcaagttaaacgaactggtcaatcttgttaccgatttgcagattggcgcgtttatcaatcccaacggcagcatcgcaccttccaaaatcgaagtcggcaaactggctttttcaaccaagaccggggaatcaggcgcgtttatcaacagtgaagggcagttccgttttggcacactggtttacggcgatgaaaaatacggcccgctggatattcatatcgctgccgaacacctcgatgcttctgccttaaccgtattgaaacgcaagtttgcacaaatttctgccaaaaaaatgactgaggaacaaatccgcaatgatttgattgccgccgtcaaaggcgaggcttctggactgttcaccaacaatcccgtattggacattaaaacttttcgtttcacgctgccgtcaggaaaaatcgatgtgggcggaaaaatcatgtttaaagatttgaagaaggaagatttgaaccaattgggtttgatgctgaagaaaaccgaggcagacatcagaatgagtattcctcaaaaaatgttggaagacttggcggtcagtcaggcaggcaatattttcagcgtcaatgccgaagatgaggcggaaggcagggcaagtcttgacgacatcaacgagaccttgcgcctgatggtggacagtacggttcagagtatggcaagggaaaaatatctgactttgaacggcgaccagattgatactgccatttctctgaaaaacaatcagttgaaattgaacggtaaaacgttgcaaaacgaaccggagccggattttgatgaaggcggtatggtttcagagccgcagcagtaa

SEQ ID NO: 37748 - DNA, 939 bp, Neisseria meningitidis
atggatgcctacaccgaagccgaagccccgccgcaaagcatcgtcgagctggttcccgtattgattgccgttaccgacggcggcctgcgggtattaaccgtcgcccaaggcacactcctgcccaacggcccgctctcccctctgcgcaattccctgcaggcgggcgtgaagctgtgggttgccaagcagacttcgcagcctatgggctatgtggaacagctttacacctttgtcgatacccaccgccgcaacgaacacggcatgcccgtcttgtacgtcagctatttggggctggtgcgcgaggcagccgacagcatcctgcacccggatgcgaaatggcaggactgctacggctatttcccgtgggaagacttgcgcaccgacggcgggcagcgcgacgccgtcgtcagccgcctgcgcatttgggcaaattcggcggacacggaggaagtgcgtcaaatgcggctcaagcgcattcatttgtgctggggggtcgaaccggaaaactggtcggaagaatacgttttacaacgctatgaaatgctgtatgaaagcggtctgatagtggaagccgccgagccgcaggcaaacttcgacttcgcgctcacggggcagcccatgcgccacgatcaccgtcgcgtactggcgaccgccctgtcccgcctgcgcgccaaaatcaaataccgccccgtgatttttgaactgatgccgcccgaattcacgctgctgcaactgcaaaacagtgtcgaagccatcagcggaagattgctgcacaagcaaaacttccgccgccagattcagcagcaaaaccttatcgagccgtcggataccggcgtatcgggcagcaaaggccgtcccgcgcagctttgccgcttccgcgacgacgtcctgcccgacaggctgatttcggacatcggattgccgctgggcagccgttag

SEQ ID NO: 37749 - DNA, 513 bp, Neisseria meningitidis
atgttaccgaatacaccgcgccgcgccgtttatgccggcagtttcgatccgcccacattggggcatctgtggatgatacggcaggcgcaatctatgtttgacgaactcatcgtcgccatcggcattaaccccgacaaacgcagcacctataccgtcgctgaaaggcaggatatgttgtgcgatattactaaaatgtttcccaacgtcagaaccgatgtatttgaaaaccgatttctggtgcattacgcccgtgaggtagatgcaggattcatcgtgcgcggcatccgttctgcttcggattacgaatacgaacgttccatgcgccatatcaacagcgacctcgcccccgaaatatccaccgtattcctcatgccgccgcgcgaaatcgccgaagtgtcgtccactatggtcaaaggcttggtcgggccggaaggctggacggaaacgatccaccgctacgtgccgcaagctgtgtacgaaaaaatccttgccgaacatcaacacgaaaattga

SEQ ID NO: 37750 - DNA, 291 bp, Neisseria meningitidis
atggcgcgcattggtacgaataagggtttttttgagcttttggagggcgagaccctgttggaaggcttggaacggacagggcatatggtggaatatcagtgccgaagcggatattgcggatcgtgccgggtgaagattttggagggaagcgttacttatcgggagccgcctttggcttttttggggcgggacgagatactgccgtgctgctgttacgtcgagggggatgtcaggctggattgcggtttgtcgggggaggatgaggggctgtctgacagtttgttgaaataa

SEQ ID NO: 37751 - DNA, 972 bp, Neisseria meningitidis
atgaaaatggacggcagccagcaggaagaaaacctcgaagtcatttccaccggatcgctcggattagacctcgccctcggagtcggcggtctgccgcgcgggcgcatcgtcgaaatcttcggcccagaatcctccggcaaaaccaccctctgcctcgaagccgtcgcccaatgccagaaaaacggcggcgtgtgcgcctttgtcgatgccgaacacgccttcgatcccgtttacgcccgcaaactcggcgtaaaagtcgaagagctttacctgtcccagcccgataccggcgaacaggctttggaaatctgcgacacactcgtccgttcgggcggcatagatatggtagtcgtcgattccgtagccgcactcgtccccaaagccgaaatcgaaggcgatatgggggacagccatgtcggactgcaggcgcgcctgatgagccaggctttgcgcaaactgaccggacacatcaaaaaaaccaacacgctggttgtgttcatcaaccaaatccggatgaagatcggcgtaatgttcggcagccccgagaccacgaccggcggtaacgcgctgaaattctattcttccgtccgcctcgacatccgccgcaccggatccatcaaaaaaggtgaagaagtattgggcaacgaaacccgcgtcaaagtcatcaaaaacaaagtcgcgccgccgttccgtcaggcagagtttgacatcctctacggagaaggcatcagttgggaaggcgaattgatcgacatcggcgtgaaaaacgacatcatcaacaaatccggcgcgtggtacagctacaacggcgcgaaaatcggtcagggcaaagacaacgtccgcgtctggctgaaggaaaatcccgaaattgccgacgaaatcgacgcaaaaattcgcgccctcaacggcgtagaaatgcacatcaccgaaggaaaattggacgaaaccgacggcgaacgcccagaagaataa

SEQ ID NO: 37752 - DNA, 408 bp, Neisseria meningitidis
atgaatctcgtgaaactgctggcgaataactggcaaccaattgccatcatcgcacttatcggcacgggtttggcggtgtcgcaccatcaaggctattataagtcggcgtttgcgaagcagcaggcggtcattgacaagatggaaaaagacaaagcgcaagccctgctgttgtcggctcaaaactacgcccgcgagctggaacaggcgcgtgcggaagctaaaaaatatgaagtcaaggcgcacgccgtcggcatggctttggcgaaaaaacaggcggaagtcagccgtctgaaaacggaaagagacctttgcaaaattcctttccctcccgacagccgaaacccaaacacaggttttcagctgttttcgccccaaataccgcctaattctacccaaatatccctttaa

SEQ ID NO: 37753 - DNA, 1539 bp, Neisseria meningitidis
atgttccattccatcgaaaaatacagaacgcccgcccaagtcttattaggcctgattgcattgaccttcgtcggcttcggggtcagcacggtatcccatccgggcgccgactacatcgtccaagtgggcgacgaaaaaatcagcgagcagtcgcttaacgccgccgtccaaaacgagcaggcggacggcggcagcccttcgcgcgacgcggtgttccaatccctgctacaacgcgcctacctgaaacagggcgcgaagctgatgggcatttcggtttcttccgaacaaatcaagcagattatcgtggacgatcccaatttccacgacgcaaacggcaaattcgaccacgcgcttttaaaccgctacctgtcgcaacgccatatgtctgaagaccagtttgtcgaagaaatccgcgatcagtttgccttgcagaatttggtaaacctcgtccaaaacggcgtattggtcggcgacgcgcaggcggaacagctgatcaggctgacgcaggtcaaccgcaccatccgttcgcacactttcaaccccgacgaattcatcgcccaagtcaaagtgtctgaagccgatttgcagaagttttataacgcaaacaaaaaagactacctgcttcccaaagcggtcaaattggaatatgtcgcattgaatctgaaagactttgcagacaaacagaccgtcagcgaaacagaagtgaaaaatgcgtttgaagagcgcgtggcgcgtttgccggcaaatgaagccaaaccttctttcgagcaggaaaaagccgccgtagaaaacgaattgaaaatgaaaaaggcggttgccgacttcaataaggcaaaagaaaagctgggcgatgacgcgttcaaccatccttcctcgcttgccgaagccgccaaaaacagcggtttgaaagtcgaaacccaagaaacttggctgagcaggcaggatgcgcaaatgtccggtatgcccgaaaacctgatcaatgccgtattcagcgacgacgtattgaagaaaaaacacaattccgaagtactgaccatcaacagcgaaaccgcgtgggtcgtccgcgccaaagaagtccgcgaagagaaaaccctgccgtttgccgaagccaaagacgcggtacgtcaggcttatatccgtaccgaagccgccaaacttgccgaaaacaaggcaaaagacgtgcttacccaactgaacggcggcaaggctgttgacgtgaaatggtcggaagtgtccgttttgggcgcacagcaggcaaggcagtccatgccgcccgaggcttatgcggaactgctgaaagcaaaaccggcaaacggcaaacccgcctacgtcaggctgatcggtctgccggcacccgtgattgtcgaagtacaggctgtaaccccgccggatgatatcgccgcacagcttccgcttgcaaaacaggctttggcgcaacagcagtctgccaatactttcgacttgttgatacgttatttcaacggcaaaatcaaacagaccaaaggagcgcaatcggtcgacaacggcgacgctcagtaa

SEQ ID NO: 37754 - DNA, 1215 bp, Neisseria meningitidis
atgcgtgcggccgcgttggctgccgccgttgcattggtactgtcgtcttgcggtaaaggcggagacgcggcgcagggcgggcagcctgctggtcgggaagcaccggctcccgtcgtcggtgtcgtaaccgtccatccgcaaaccgtcgcattgaccgtcgagttgccggggcgtttggaatcgctgcgtaccgccgatgtccgcgcccaagtcggcggcatcatccaaaaacgcctgttccaagaaggcagttatgtccgtgccggacagccgctgtatcagatcgacagttccacttatgaagcaggtctggaaagcgcacgcgcgcaactggcaacggctcaggcaacgcttgccaaagcggatgcggatttggcgcggtacaagcctttggttgccgccgaagccgtcagccggcaggaatacgatgctgcggtaacggcgaaacgttctgccgaggcaggtgtcaaagcagcacaggcggcaatcaaatctgccggcattaatctgaaccgttcgcgcattaccgcgccgatttccggctttatcggtcagtccaaagtttccgaaggtacgctgttgaatgcgggcgatacgaccgtgctggcaaccatccgccaaaccaatccgatgtatgtgaacgttacccagtctgcatccgaagtgatgaaattgcgccgtcagatagccgaaggcaaactgctggcggcggatggtgtgattgcggtcggcatcaaatttgacgacggcacagtttaccctgaaaaaggccgcctgctgtttgccgatccgaccgtcaacgaatcgaccggtcagattaccctgcgcgccgccgtaccgaacgatcagaatatcctgatgcccggcctgtatgtgcgcgtgctgatggaccaagtggcggtggataacgcattcatcgtgccgcagcaggcggtaacgcgcggtgcgaaagataccgtgatgattgtgaacgcccaaggcggtatggaaccccgcgaggtaacggtcgcgcaacagcagggtacgaattggattgttacgtcgggtctgaaggacggggacaaggtggttgtggaaggcatcagtatcgccggtataacgggtgcgaaaaaggtaacgcccaaagaatgggcgccgtctgaaaaccaagccgccgcgcctcaatccggcgttcagacggcatctgaagccaaaactgcttctgaagcggaataa

SEQ ID NO: 37755 - DNA, 354 bp, Neisseria meningitidis
atgcttaactttaaccatttatccggaaacataatgatgggcaacaaattgactctgcctgccgaactgcctgacgaacaggatttgcgggcggtattggcatacaatatgcggcttttccgcgtgaacaagggttggtcgcaagaagaattggcgcggcaatgcggtttggacaggacttatgtgtcggcagtcgagcgcaaacgctggaacatcgccctgtcgaatatcgaaaaaatggcggcggctttgggcgtggcggcgtatcagttgctgctgccgccgcaggaacggttgaacctgatgaccaattccgccgatacccgacaaatgccgtctgaaagcggtatttga

SEQ ID NO: 37756 - DNA, 756 bp, Neisseria meningitidis
ttgctcaaactgattaaccgacaactgaccgaaaaaggcctaaaagtagagaaagcatccgccgctgtcgttgatgccaccattattcagaccgccggcagcaaacagcgtcagaccatagaagttgacgaagaaggacaaatcagcggacaaaccacaccgagcaaagacaaagatgcccgttggataaagaaaaacggcctctacaaactcggttacaaacaacatacccgtaccgatgcagaaggctatatcgagaaactgcacattactcccgccaatgcccatgagtgcaaacacctgtcgccgttgttggaaggtctgcccaaaggtacgaccgtctatgccgacaaaggctatgacagtaaggaaaaccggcagcatctgaaagaacatcagttgttagacggcattatgcgcaaagcctgccgcaaccgtccgctgacggaagtgcaaaccaaacgcaaccggtatttgtcgaagacccattatagtggattaaatttaaatcaggacaaggcgacgaagccgcagacagtacaaatagtacggcaaggcgaggcaacgccgtactggtttaaatttaatccactatatgtggtcgaacagagcttcggtacgctgcaccgtaaattccgctatgcgcgggcagcctatttcggactgattaaagtgagtgcgcaaagccatctgaaggcgatgtgtttgaacctgttgaaagcggccaacaggttaagtgcgcccgctgccgcctaa

SEQ ID NO: 37757 - DNA, 219 bp, Neisseria meningitidis
atgttcccagaataccgtgatttgatttccaaattgaaacaggaaaattcccgcttcgcccgtctgttcgacgaacacaacgagctggacgataaaattactggtctggtcaacaatccggttaccagcggtgcggaaaccatcgatgagctgaaaaaagccaaattgaaactgaaagacgagttgtacgccatcctgcaaaaagcagcgggaaaataa

SEQ ID NO: 37758 - DNA, 1281 bp, Neisseria meningitidis
atgaaatccctttttattcggctgctcctgttgggttcggcggccggcgttttctatcatacccaaaaccaatccctgcccgcgggcgaacttgtctatccgtccgcaccgcaaatcagggacggcggcgatgcgctgcactacctcaaccgcatccgcgcccaaatcggtttgcacaagctggcacacgcgccggttttggaaaattccgcccgcaggcacgcacgctatctcacgctcaatcccgaagacggacacggcgaacaccatcccgacaatccgcactacaccgcacaaaagctgaccgaacgcacacgccttgccgggtatctctacaacggcgtgcatgaaaacatcagcacggaagaggaagccgccgaatcgtccgacagcgacatccgcacgcagcaacgccaagtggacggattaatgagcgcaatctaccaccgcctttccctacttgaccgccatacggatgaggcaggagcggcatttgtgcgcgaaaacggtaaaaccgttctcgtattcaatcagggcaacggcaggtttgagcggcattgcgcccaaggcagaaatcagccggaagcaggacggaaatattaccgcaacgcctgccataacggtgcggtcgtgtacaccgacgaagccatgcccgcacaggagctgctctatacagcctatcccgtcggcaacggcgcactgccttatttccacggcgagcgtccagaccccgtgccggaatatgaaatcacgggcaatcctgccagcattgatttttccgaggcggcaggcaaaattacgatgaaaagtttcaagctgtatcagggtaaaaacgaaatccgccccgtcagggttttaaccgccggcaacgaccccaacggcaggctgaccgcgtaccaattcgcgcttttcccgctcaagcctttggaatacggtacgctttatacggcggtattcgactatgtccgcaacggacggcgcgcgcaggcgaaatggcagtttagaacccgaaaacccgattacccttattttgaggtaaacggcggcgagacacttgcggttagaaaaggcgaaaaatatttcatccactggcgcggacgctggtgtttggaagcgtgtacccgttatacctaccggcagcgacccggcagccgcctgtccataggaaggcacgaggcgggcggcatcgtcttcagcgttgacggaatggcgggcagccgcatcacgcttgcaccggaaggagaaacggaacgaggcgtaaccctttatttacaggattga

SEQ ID NO: 37759 - DNA, 927 bp, Neisseria meningitidis
atgaaagtcatcttcgccggcacgcccgattttgccgccgccgccttaagagccgttgccgccgccggttttgaaattccgctggtgctgacccagcccgaccgtccgaaagggcgcggtatgcaactgactgccccgcccgtcaaacaagccgcgctggaactcggtttgcgcgtcgaacagcccgaaaagctgcgcaacaacgccgaagccctgcaaatgctcaaagaggtcgaggcagacgtaatggtggttgccgcctacggtttgattctgccgcaagacgtgttggatgtgccgaaacacggctgcctcaatatccacgcctcgctgctgccccgttggcgcggcgcggcgccgattcagcgcgcgattgaggccggcgatgccgaaaccggcgtgtgcattatgcagatggatgccggtttggacaccggtgatgtggtcagcgaacaccgctacgccatccgacctaccgataccgccaacgaagtccacgacgcactgatggaaatcggtgcggcggcggttgttgccgatttgcaacagcttcaaagcaaaggccgtctgaacgcggtcaaacagcccaaagaaggtgttacttacgcccaaaaactaagcaaagaagaggcgcgtatcgattggagcgaaagcgcggcggttatcgaacgcaaaatccgcgccttcaaccccgtgcctgccgcgtgggttgagtatcagggcaagccgatgaaaatccggcgggcggaagtggtggcgcaacaaggcgcggcaggcgaagtgttgtcctgttcggcggacggtttggtcgttgcctgcggcgaaaacgcgctgaagattaccgaattgcagcctgccggcggcaaacgcatgagcatacaggcatttgcggcaggtcggacgattgaagtcggaacggttttgtaa

SEQ ID NO: 37760 - DNA, 552 bp, Neisseria meningitidis
atgctgcaatggcacacgcgcgtcgggctgtttatccttttcctgctcgtatttcgcctctgctggagcatttggggcagcgataccgcccgtttttcctgtttcgtccaaggctgggcaggcatacgcggctatctgaaaaacggtattcccgaacacatccagcccggacacaaccccttgggcgcactgatggtcgtcgcgcttttggccgccgtctcatttcaagtcggcacagggctttttgccgccgatgaaaacaccttcagcaccaacggctacctcaaccatttggtttccgagcatacgggcagcctgatgcggaaaatccacctcaactttttcaagctgctcgccgttttttccgccatccatatcgccgccgtcgccgcataccgcctattcaaaaagaaaaacctcgtcctcccgatgataaccggcttcaaatacatcgaaggcaaaacctcaatccgctttgccggcaaagccgcgcttgccgccgcattatcggttgccgcgcttgccgcagccgccatcctgctcctgtcctga

SEQ ID NO: 37761 - DNA, 321 bp, Neisseria meningitidis
ttgttaccccttacaagaaacaccatgttccgcatattactgttgcttttcccttgtgcaatccttgccgcctgcacccgaaacataccggcaaacccggccgtttcaaattgcgcgcatcttcaaaaccgcaccatcctgtattttgacgcacacggcaaacccgccgacggcgcagtaaagggcggattttacaaaattatcgaaatacagggtgcaaactgcatccttattcaagactttaacagcacgggcaatgccctcggcggatcctatgtgccggactgccgcaaatcatcccttttcccgaaaaatatttga

SEQ ID NO: 37762 - DNA, 2724 bp, Neisseria meningitidis
atgggtgttatgctatatcatcatagttatgccgaagatgcagggcgcgcgggcagcgaggcgcagatacaggttttggaagatgtgcacgtcaaggcgaagcgcgtaccgaaagacaaaaaagtgtttaccgatgcgcgtgccgtatcgacccgtcaggatatattcaaatccagcgaaaacctcgacaacatcgtacgcagcatacccggtgcgtttacacagcaagataaaagctcgggcattgtgtctttgaatattcgcggcgacagcgggttcgggcgggtcaatacgatggtggacggcatcacgcagaccttttattcgacttctaccgatgcgggcagggcaggcggttcatctcaattcggtgcatctgtcgacagtaattttattgccggactggatgtcgtcaaaggcagcttcagcggctcggcaggcatcaacagccttgccggttcggcgaatctgcggactttaggcgtggatgacgtcgttcagggcaataatacctacggcctgctgctaaaaggtctgaccggcaccaattcaaccaaaggtaatgcgatggcggcgataggtgcgcgcaaatggctggaaagcggagcatctgtcggtgtgctttacgggcacagcaggcgcagcgtggcgcaaaattaccgcgtgggcggcggcgggcagcacatcggaaattttggcgcggaatatctggaacggcgcaagcagcgatattttgtacaagagggtgctttgaaattcaattccgacagcggaaaatgggagccggatttacaaaagcaacagtggaaatacaatccgtataaaaaatacaacaaccaagaactacaaaaatacatcgaagagcatgacaaaagctggcgggaaaacctggcgccgcaatacgacatcacccccatcgatccgtccagcctgaagcagcagtcggcaggtaatctgtttaaattggaatacgacggcgtattcaataaatacacggcgcaatttcgcgatttaaacaccaaaatcggcagccgcaaaatcatcaaccgcaattatcaattcaattacggtttatctttaaactcatatgccaacctcaatctgaccgcagcctacaattcgggcaggcagaaatatccgaaagggtcgaagtttacaggctgggggcttttaaaggattttgaaacctacaacaacgcaaaaatcctcgacctcaacaacaccgccaccttccggctgccccgtgaaaccgagttgcaaaccactttgggcttcaattatttccacaacgaatacggcaaaaaccgctttcctgaagaattggggctgtttttcgacggtccggatcaggacaacgggctttattcctatttggggcgatttaagggcgataaagggctgctgccccaaaaatcaaccattgtccaaccggccggcagccaatatttcaacacgttctacttcgatgccgcgctcaaaaaagacatttaccgcttaaactacagcaccaataccgtcggctaccgtttcggcggcgaatatacgggctattacagctcggaaggcgaatttaagcgggcattcggagaaaactcgccgacatacaagaaacattgcaaccggagctgcgggatttatgaacccgtattgaaaaaatacggcaaaaagcgcgccaacaaccattcggtcagcattagtgcggacttcggcgattatttcatgccgttcgccagctattcgcgcacacaccgtatgcccaacatccaagaaatgtatttttcccaaatcggcgactccggcgttcacaccgccttaaaaccagagcgcgcaaacacttggcaatttggcttcaatacctataaaaaaggattgttaaaacaagatgatacattaggattaaaactggtcggctaccgcagccgcatcgacaactacatccacaacgtttacgggaaatggtgggatttgaacgggaatattccgagctgggtcaacagcaccgggcttgcctacaccatccaacaccgcaatttcaaagacaaagtgcacaaacacggttttgagttggagctgaattacgattatgggcgttttttcaccaacctttcttacgcctatcaaaaaagcacgcaaccgaccaacttcagcgatgcgagcgaatcgcccaacaatgcgtccaaagaagaccaactcaaacaaggttatgggttgagcagggtttccgccctgccgcgagattacggacgtttggaagtcggtacgcgctggttgggcaacaaactgactttgggcggcgcgatgcgctatttcggcaagagcatccgcgcgacggcagaagaacgctatatcgacggcaccaacgggggaaataccagcaatgtccggcaactgggcaagcgttccatcaaacaaaccgaaacccttgcccgccagcctttgatttttgatttttacgccgcttacgagccgaagaaaaaccttattttccgcgccgaagtcaaaaatctgttcgacaggcgttatatcgatccgctcgatgcgggcaatgatgcggcaacgcagcgttattacagttcgttcgacccgaaagacaaggacgaagaagtaacgtgtaatgctgataaaacgttgtgcaacggcaaatacggcggcacaagcaaaagcgtattgaccaattttgcacgcggacgcacctttttgatgacgatgagctacaagttttaa

SEQ ID NO: 37763 - DNA, 1287 bp, Neisseria meningitidis
ttggacgggatttttaagctgaaggcaaacggtacgacggtgcgtaccgagttgatggcgggtttgacaacttttttgacgatgtgctacatcgttatcgtcaaccctctgattttgggcgagaccggcatggatatgggggcggtattcgtcgctacctgtatcgcgtctgccatcggctgttttgttatgggttttgtcggcaactatccgattgcactcgcaccggggatggggctgaatgcctatttcacctttgccgtcgttaagggtatgggcgtgccttggcaggttgcgttgggtgcggtgttcatctccggtctgatttttatcctgttcagcttttttaaagtcagggaaatgctggtcaacgcactgcctatgggtttgaaaatgtcgattgctgccggtatcggtttgtttttggcactgatttccctgaaaggcgcaggcattatcgttgccaatccggcaaccttggtcggtttgggcgatattcatcaaccgtctgcgttgttggcactgttcggttttgccatggtggttgttttgggatacttccgcattcaaggtgcaatcatcattaccattttgacgattaccgtcattgccagcctgatgggtttgaacgagtttcacggcgtggtcggcgaagtaccgagcattgcgccgacctttatgcagatggattttaaaggtctgtttaccgtcagtatggtcagtgtgattttcgtcttcttcttggtcgatctatttgacagtaccggaacgctggtcggcatatcccaccgtgccggactgctggtggacggtaagctgccccgcctgaaacgcgcactgcttgcagactctaccgccattgtggcaggtgcggctttgggtacttcttccaccacgccttatgtggaaagcgcggcgggcgtatcggcaggcggacggaccggcctgacggcggttaccgtcggcgtattgatgctcgcctgcctgatgttttcacctttggcgaaaagtgttcccgcttttgccaccgcgcccgccctgctttatgtcggcacgcagatgctccgcagtgcgagggatattgattgggacgatatgacggaagccgcacccgcattcctgaccattgtcttcatgccgtttacctattcgattgcagacggcatcgccttcggcttcatcagctatgccgtggttaaacttttatgccgccgcaccaaagacgttccgcctatggtatggattgttgccgtattgtgggcactgaaattctggtatttgggctga

SEQ ID NO: 37764 - DNA, 387 bp, Neisseria meningitidis
atgagcaacaacatcccggccgaactgaaatacgttgccagccatgaatggctgcgccttgaagaagacggtacgattaccgtcggcattacccaccacgcgcaagagctgttgggcgacatcgtgttcgtcgagctgcccgaagtcggcgcgaaccttgccgctgaagagcaagccggtgtggttgagtctgtaaaagccgcgtccgacgtgtacgcaccgattgcaggcgaagtcgttgccgtcaacgatgacttacccagtgcacctgaaactgccaacagcgacccttacggcgcaggctggttcttcaaaatcaaacctgccaatcctgccgattacgacggtctgctgactgccgaacaatacgcgggcgaagtagattaa

SEQ ID NO: 37765 - DNA, 756 bp, Neisseria meningitidis
atggcatttgcctcactatttaccctgccggacgacatcaccgccgttttggacgatgttgccctgatgaccaaagccgccgcaaagaaaaccgccggcgtggtcggcgacgatttggcacccaatgccaaccgtgttacgggcgtatcggcagaacgcgagttgccgattgtttggtcgatggcgaaaggttctttttccaacaagccggttttggtgcctgcggccctgctgctttccgccttcctgccgcaactcattacgccgcttttgacggcaggcggcatttatctgtgctttgaaggcgtagaaaagctgctgcacaagtttctgcaccgacatgacgcgcatgctcgtaatggcggcaatcggcatcggcatgactgttttggtgtacggaatcgttgccgtcatcgtcaaactcgacgacttaggcatgctgctgatgcgccgcccacaaaccttttcgcgcagtttggggcaaatgctgactgcctttatgccttgctttatgcgcggtttgagcgtggtcggcacgcttgccatgtttcttatcggcggcgtactggtcgcccacaacctcggccttctgcacgatttcctgcacgcgcaacactgggacgctggctgggcggagtacttcgccaacctcgttgtcgggctgctttccggttcgattgcctgcgcccccgccttgccgctgatgaatcgtttcggcaggcattgatttctttttcaaataccgatgccgtttga

SEQ ID NO: 37766 - DNA, 1983 bp, Neisseria meningitidis
atgcgtcaaatttcgttaacagactatttttgcaaaggtctcaacatcagtcccgaaatcttcggcacgctcttccaatcagtcatggacgcacaagagcggcgcgaagcgggcgcacactacaccgaaaccgccaacatcgacaaagtcatcaacggcctttttttagaaaacctgcgcgccgaatttgaagccgtcaaagccctcaaacgcgacaaagacaaaaaactcgccgccttctaccaaaaaatccaaaacctgcaattcctcgacccggcctgcggctgcggcaacttccttatcgtcgcctacgaccgtatccgcgccctcgaagacgacatcatcgccgaagcgctcaaagacaaaacaggcggcttattcgacagcccgtccgtccaatgccgtctgaaacaatttcacggcatcgaaatagacgaatttgccgtcctcatcgcccgcaccgccatgtggctcaaaaaccaccaatgcaacatccgcacgcaaatccgcttcgacggcgaagtcgcctgccatacgctgccgctcgaagacgtcgccgaaatcatccacgccaacagcctccgcacaccttggcaggcggcggactacatcttcggcgatccgccctttatcggctcgacctaccaaaccaaagagcagaaaaacgacctcgaaagcatctgcggccatatcaaaggctacggcctgttggattacgtctgcaactggtatgtcaaagccgccggtatcatggcgcagcatccccaagttcagacggcatttgtttccaccaattccatctgccaaggccagcaggtcgaaatcctttggggcagccttttgaagcaagacatcgaaatccactttgcccaccgcacctttcaatggacgagccaagccgcaggcaaagccgccgtccactgcatcatcgtcggcttccgccaaaagccgcaaatgccgtctgaaaaaaccctctacgactatcccgacatcaaaggcgaacccgtaaaacacgccgcggccaacatcaatccgtatctgattgacgcgcccgatgtgattattgccaagcgcagccgtcccgtacattgcgaacctgacatggtcaacggaagcaaaccgaccgaaggcggcaaccttatcctttcaaccgatgaaaaagaagccctgattgccgccgaacccttggcggaacaatacatccgtccctttgtcggcgcagaggaatttatcaacggcaaaacccgttggtgcctgtggtttcacggcgtatccgacgttaaacgcaaccacgacctgaaacagatgccccaagttcaagcccgtattcaggcagtcaaaaccatgcgcgaagccagcagcgacaaacaaactcaaaaagatgcagcaaccccgtggctttttcaaaaaatccgccagccttcagacggcaattttctgattatcccacgcgtctcatccgaaagccgccgtttcgtccccatcggttatctatcatatgaaacagttgtcagcgatttggtatttacccttccaaacgccagcctctaccacttcggcatcctcagctccaccatgcacaacgcctttatgcgtaccgttgccggccgtctggaaagtcgttaccgctattccaataccgttgtgtacaacaacttccccttccccgaaagctgccggatgccgtctgaaaacgaccgccaagacccgctccgcgccgccgtcgaaaccgccgcccaagccgtcctcgacgcgcgcggacaataccgccgagaagcgcgggaagccggtttgcccgagccgaccctcgccgaactctatgcgcccgacgcaggctataccgccctagacaaagcccacgccgccctcgacaaggcagtcgataaagcctacggctacaaaacaggcaaaaacaccgacgacgaagccgaacgcaccgccttcctgttcgagctgtaccgcaaggcggcggcaattgcgtag

SEQ ID NO: 37767 - DNA, 663 bp, Neisseria meningitidis
atgatacaagccgtattgttcgacctcgatggcacgctcgccgacaccgccctagacctcggcggcgcactcaataccctgctcgcccgccacggactgccgcccaaaagcatggacgaaatccgcaaccaagccagccacggcgcggcaggactgatcaaactcggcgcaggcatcacccccgaccatcccgactatgcccgatggcgcaccgaatatctggaggaatacgaccgccgctacgcccaagacaccgagctctttgacggcgtgaacgaactcatcgccgaactcgacagacgcggcatcaaatggggcatcatcaccaacaaacccatgcgcttcaccgacaaactcgcccccaaactcggcttcatcatcccacccgccgtcgtcgtcagcggcgacacctgcggcgaacccaagcccagcatcaaacccatgctgtatgcgtgcggacaaatccacgccgacccgcaacacacactctacgtcggcgatgccgaacgcgacatccaagcaggccgcaacgccggcatgaaaaccgtcctcgccgaatggggctacatcgctcccgaagacgataccggctcatggcaggcggatttccacatccgcacgccgctcgatctgctcgaatgtctggacaaaatacagccctga

SEQ ID NO: 37768 - DNA, 1008 bp, Neisseria meningitidis
atgagcaccttcttccagcaaaccgcccaagccatgattgccaaacacatcgaccgtttcccgctattgaagttggaccaggtgattgattggcaaccgatcgaacagtacctgaaccgtcaaaaaacccgttaccttagagaccaccgcggccgtcccgcctaccccctgctgtccatgttcaaagccgtcctgctcggacaatggcacagcctctccgatcccgaactcgaacacagcctcatcacccgcatcgatttcaacctgttttgccgctttgacgaactgagcatccccgattacagtactttatgccgttaccgcaactggctggcgcaagacgacaccctgtccgaattgctggaactgattaaccgccaactgaccgaaaaaggtttaaaaatagagaaagcatccgccgccgtcgttgatgccaccattattcagaccgccggcagcacacagcgtcaggccatagaagtcgatgaagaaggacaaatcaacggccaaaccacaccgagtaaggacaaagatgcccgttggacaaagaaaaacggtttatacagactcggttacaaacaacatacccgtaccgatgaggaaggctatatcaagaaactgcacatcacccccgccaatgcccatgagtgcaaacacctgttgcctttgttggaagggttacccaaaggtacgaccgtctatgccgataaaggctacgacagtgaggaaaaccggcaacatctggaagagcatcagttgttagacggtattatgcgcaaagcctgccgcaaccgtccgctgtcggaagtgcaaaccaaacgcaaccgatatttgtcgaagacccgttatgtggtcgaacaaagcttcggtacgctgcaccgtaaattccgctatgcgcgggcggcctatttcggactgattaaagtgagtgcgcaaagccatctgaaggcgatgtgtttgaacctgttgaaagccgccaacaggctaagtgcgcccgctgccgcctaa

SEQ ID NO: 37769 - DNA, 99 bp, Neisseria meningitidis
atgaacacaaacttaaatgacaaagacaaagccatggataccgcaatcaggtttcagaaaaggatgaggattccgaaatttttctttttaattctctaa

SEQ ID NO: 37770 - DNA, 594 bp, Neisseria meningitidis
atggcggacggtataggcaatctgattggctgggaaaaaacggggcttgttgtcggtaagcagtggataaccgcaaaagacgacaaggtgtccgatgtctgcaatgccaacggcgagatgggcgtaatcgggctttacgagcctttctcacacggcgcattgacgatacctggtcatccgaactgccgatgcgaggttgtttccgtatcgggtggcgaattgggggaatttgccgaaaaaaaggagcttcgtaaagcggctatgcagtatgcgcgggataactttatcggcaaaagctatgtcaatgaaaacagcgggcatgaactgaaggtaacttggcaaggtgtgaaacacgctacgtcaaaggcaaatcaggcggaattatccatcataacaaaacttgatgacttattgcgctacgcaaaatatgagggttcttattcggataagaaaggtcatcctgatattattgcagcacataagtatcgtgccgttgccaaggttgggaatgagtctttaaatatcggtgtgattgtaagggaatttccagacggccataaacattacgaccatttcatcttgaaggatgagtaa

SEQ ID NO: 37771 - DNA, 1020 bp, Neisseria meningitidis
atgaacactatgctaatgtcgggcgcggctgccgcgctgcttgccggcatcatcctttatttcaaaagcgacaaaaagcggcaggaaaacggtgaatggagttccggcctcgaatacgcctatatcctgacagcggtcggcgtgtttgccgctttgtccctgtttatgagctttaccgccgttttcctgattttcgttgtattgtgcggtacggcttggggggtatataaataccgcctgaagactcatcccgaaatctcggaaagcagccacttcggcgattatttcggcagtttcttccctaccgttttggtattgttcctcatccggtcgtttatcgccgaaccgttccaaatcccgtccagctcaatgcgcccgggcctgatcaagggcgatttcattttggtcggcaaattttcctacggcttgcgcgtacccgttttaaacaatatatttatccccacaggcaaaatcgaacggggcgatgtcgttgtttttaattatcctctgcagccggagatgacctacatcaagcgtattgtcggcattccgggcgatgtggtcgaatatcgggataagattttgacggtaaatggcaaacccacttccgatattcctaacggcacataccgttatcccgacgataccgacccttccgaaatccacaacacggatatgttccgcagcggtctagacggcaaatccttcaatattctgaaaaaagaaggacagcctgccgtttccctgcccgtattgggcaaatatacctccgatattatgtctgaaaacggatattccatagagcaaagcggtttggaacactgccaatatgccgacgacggcagcggtttcgtgtgcaaagttcccgaaggacgctatttcgctatgggcgacaaccgcgacaacagtgccgattctcgctactggggatttgtggatgacaagctggttgtcggcaaggcaatgttcattttgatgaacttcggcgatttcggcagggccggtacggcaatccgttag

SEQ ID NO: 37772 - DNA, 1161 bp, Neisseria meningitidis
ttgaacgaaaggtcgaaaaccatgaaaaaaacactggtggcggcggcaatcctgagcctcgccttgactgcgtgcggcggcggaaacgataccgccgcccaagccccctccgccaagcccgaagccgaacaatcgggcaaactcaatatctacaactggtcggattatgtcgatcccgaaaccgtcgccgcctttgaaaaagaaaccggcatcaagacgcgttccgattattacgacagcaacgaaacactggaggcaaaagtcctgaccggcaaatccggctacgacctgaccgcgccgtccatcgccaacgtcggccggcaaatcaaagcgggcgcgtatcagaaaatcgacaaggcgcaaatcccccattacggcaacatcgataaagatttgctgaaaatgatggaagccgtcgatccgggcaacgaatacgccgtcccctatttctggggcatcaacaccttggcaatcaacacggggcaggtgcaaaaggcattgggtacggacaagctgcccgaaaacgaatgggatttggtgttcaaacccgaatacaccgccaaactcaaatcctgcggcatcagctatttcgacagcgcaatcgaacagattcccttggcgttgcactatttgggcaaagaccccaacagtgagaatcccgaagacatcaaagccgccgtcgatatgatgaaagccgtccggagcgacgtgaaacgcttcagctcttccggctatatcgacgatatggcggcaggcaacctgtgtgccgccatcggttacggcggcgatttgaacattgccaaaacccgtgccgaagaagcggcaaacggcgtggaaatcaaagtattgaccccgaaaaccggcgtgggcgtgtgggtagattcctttatgattccgcgcgacgcacaaaacgttgccaacgcccaccgctatatcgactacacgctccggcccgaggtggcggcgaaaaacggcagcttcgttacctacgcgcccgccagccgtcccgcgcgcgagctgatggatgaaaaatacacctccgacgcatcgattttcccgaacaaagaactgatggaaaaaagtttcatcgtatcgcccaaatccgcagaatccgccaaactgggcgtgaagctgtggcaagggctcaaggccggaaaataa

SEQ ID NO: 37773 - DNA, 771 bp, Neisseria meningitidis
ttggaagctgattcggatacggcacatgacaggactttctcagtcctgtctttttcatcccacatttcccataccatcatgaaacttatcaaatacctgcaatatcaaggcataggaagccgcaagcagtgccaatggctgattgccggcggttatgttttcatcaacggaacctgcatggacgacaccgatgcagacatcgattcctcatccgtcgaaacgttggatattgacggggaagcagtaaccgtcgttcccgaaccctatttctacatcatgctcaacaagcctgaagattacgaaacttcgcacaaacccaagcactaccgcagcgtattcagcctgttccccgacaatatgcggaacatcgatatgcaggcggtcggcaggctggatgcggatacgaccggcgtattgctgattaccaacgacggcaaactgaaccacaacctgacttcgccgagcagaaaaattcccaagctatacgaagtaacgctcaaacaccccacaggagaaacgctctgcgaaaccttgaaaaacggcgtgctgctccacgacgaaaacgaaaccgtttgtgccgccgatgccgttttgaaaaacccgaccaccctgctgctgaccattaccgaaggaaaataccaccaagtcaaacgcatgatcgccgccgccggcaaccgcgtgcaacaccttcatcgccggcgattcgcacatctggaaacagaaaacctcaaacccggggaatggaaatttatcgaatgtccaaaattctga

SEQ ID NO: 37774 - DNA, 1407 bp, Neisseria meningitidis
gtggaatttagcacaaaaaccgaaatcttgcaggaacagcaggcaggcgcacagttatttgtctgcaccgaagaggcgcaattaaaccatccgaccgcccttgcccttttgtcttcgcttgaagaaggtcaaaattttgccgacacaaaaatcccgacaggcaacggtttgcaggctgttgccgtatgctgtctgaaaagcaccggccgcgccgcattgaacaaggccgccgccgaagccgccaaatgggcgcaaaatcaggaaacggtcaatgtggacatccatgccttcgatgaagcgcaagccgccgccgtagccgaagcgtttgcgattgcgttcggcaacgccgcctaccgtttcgaccgctacaaaaaagaagccaagcccgccaaatttgaaaccgccgtgttccacagcgcacacgaagccgtcgttaaagaagccttgcgcgtcgccgaagcgcaagtttacggacaaagcctctgccgcgacttgggcaacgccgcgcccaacgaatgcacgcccgaatttttagcgcgcaccgccaaagccgaagccgaaaaactgggcgcgcacgccaaaatcatcgaaaaagactacatcaaagaaaacatgggttcgttttggtcggtcgccaaaggcagcgcggaagccccctatttggtcgaactgagctatttcggtgcagccgacaaagaagccgcccccgtcgtcttggtcggcaaaggcattaccttcgacaccggcggcatttccctcaaacccggtctgaacatggacgaaatgaagtttgatatgtgcggcgcggcaaccgtcatcagcaccttctgcgccgccgtcaaactgcaactgccgatcaacctgattgccatcgtcgccacttgtgaaaatatgccttccggcgcggccaacaaaccgggcgacgtcgtaaaaagcatgaaaggcctgaccatcgaagtgttgaacaccgatgctgaaggccgtctgattttgtgtgacgcgctcacttacgccgaacaattcaaacctaaagccgtcatcgacgtcgccaccctgaccggtgcatgcatcgtcgccttggggcacgatgtcagcggcgtgatgggcaacaatcaggatttgatcaacagcctgctcgccgcctcccgcaacgtggacgacaaagcgtggcaactgccgcttttcgagacctacaaagaccagctcaagtccaattttgccgacatccccaacatcggcacgcccggcgcgggcacgattaccgccgcaacattcctgtcttacttcaccgaaggctacccgtgggcgcaccttgacatcgcgggtacggcgtggaaatccggagcggaaaaaggtgcgactggccgtcccgttcccttgctgctgaactatctgcggaatctttaa

SEQ ID NO: 37775 - DNA, 759 bp, Neisseria meningitidis
atgaaaatcacccccgtcaaagccctaaccgacaactacatctggatgatacagcacggcaaccatgccgtctgcgtcgacccttccgaaccctcgcccgtcttagaattcctcgtccgcaaccgcctcatgcttgcccaaacatgggtaactcacccccaccccgaccacgagggcggtgcggcggcactctggcgcggctacatggaatcgcccgtttacggcgaatccgacatcgaagcagcaacccacaccgtaaccgccggcacccaattcaccttcggcgacggacaggttaccgtttgggcaacacccggccacacagaccgccacaccagctaccttctcgaaacttcagacggcatacacgtcttttgcggcgacacccttttttccgccggctgcggacgcgtgtttaccggcacaatcgaacagctttacgacagcttccaacgcttcaaccgcctgcctgaaaacaccctgttctacccggcacacgaatacaccgccgccaacctgcgtttcgccgcccatatcgagccggacaacgccgacattcagacggcactgaaagcggcggcgcatacgcctaccctgcccgttaccctcgcgcacgaacgccgcgtcaatccgtttttgcgcgtcgacctgccgcacgtcagagaccgcgccgaggcattgagcgggaaaacgttaaacagcagcctcgatacctttgtcgcgctgcgtgaacttaaaaaccaataccggacgaaataa

SEQ ID NO: 37776 - DNA, 1083 bp, Neisseria meningitidis
atgtttttatggctcgcacatttcagcaactggttaaccggtctgaatatttttcaatacaccacattccgcgccgtcatggcggcgttgaccgccttagcgttttccctgatgttcggcccgtggacgatacgcaggctgaccgcgctcaaatgcgggcaggcagtgcgtaccgacggtccgcaaacccacctcgtcaaaaacggcacgccgacgatgggcggttcgctgattctgaccgccattaccgtgtccaccctgttgtggggcaactgggcaaacccgtatatctggattctcttgggcgtattgctcgccacgggcgcactcggtttttacgacgactggcgcaaagtcgtctataaagaccccaacggcgtgtccgccaaattcaaaatggtgtggcagtcaagcgttgccattatcgccggtttggcattgttttaccttgccgccaattccgccaacaatattttgattgtcccgttcttcaaacaaatcgccctgccgctgggcgtggtcggctttttggtgttgtcttacctgaccatcgtcggcacatccaatgccgtcaacctcaccgacggcttggacggccttgcgaccttccccgtcgtcctcgttgccgccggcctcgccattttcgcctacgtcagcggacactaccaattttcccaatacctccagcttccctatgtcgccggcgcgaacgaagtcgctatattctgcaccgccatgtgcggcgcgtgcctcggtttcttgtggtttaacgcctatcccgcgcaagtctttatgggcgatgtcggcgcattggcattgggtgccgcgctcggtaccgttgccgtcatcgtccgccaagagtttgttttagtgattatgggcggtctgttcgtcgtcgaagctgtgtccgttatgcttcaggtcggctggtataagaaaaccaaaaaacgcattttcctgatggcacccatccaccaccactacgaacaaaaaggctggaaagaaacccaagttgtcgtccgcttttggattatcaccatcgtcttggtattgatcggcttgagtaccctcaaaatccgctga

SEQ ID NO: 37777 - DNA, 2163 bp, Neisseria meningitidis
atgaacgccccattattccgcctcagcctgctctcgcttaccctagcggcaggttttgcccacgcggcagaaaataatgccaaggtcgtactggataccgttaccgtaaaaggcgaccgccaaggcagcaaaatccgtaccaacatcgttacgcttcaacaaaaagacgaaagcaccgcaaccgatatgcgcgaactcttaaaagaagagccctccatcgatttcggcggcggcaacggcacgtcccaattcctgacgctgcgcggcatgggtcagaactctgtcgacatcaaggtggacaacgcctattccgacagccaaatcctttaccaccaaggcagatttattgtcgatcccgctttggttaaagtcgtttccgtacaaaaaggcgcgggttccgcctctgccggtatcggcgcgaccaacggcgcgattatcgccaaaaccgtcgatgcccaagacctgctcaaaggcttggataaaaactggggcgtgcgcctcaacagcggctttgccagcaacgaaggcgtaagctacggcgccagcgtattcggaaaagagggcaacttcgacggtttgttctcttacaaccgcaacgatgaaaaagattacgaagccggcaaaggtttccgcaatgtcaacggcggcaaaaccgtaccgtacagcgcgctggacaaacgcagctacctcgccaaaatcggaacaactttcggcgacgacgaccaccgcatcgtgttgagccacatgaaagaccaacaccggggcatccgcactgtgcgtgaagaatttaccgtcggcgacaaaagttcacggataaatattgaccgccaagcccctgcttaccgcgaaactacccaatccaacaccaacttggcgtacacgggtaaaaacctgggctttgtcgaaaaactggatgccaacgcctatgtgttggaaaaagaacgctattccgccgatgacagcggcaccggctacgcaggcaatataaaaggccccaaccatacccgaatcaccactcggggtatgaatttcaacttcgacagccgccttgccgaacaaaccctgttgaaatacggtatcaactaccgccatcaggaaatcaaaccgcaagcatttttgaactcgaaattctccatcccgacgacagaagagaaaaacggtcaaaaagtcgataaaccgatggaacaacaaatgaaagaccgtgcagatgaagacactgttcacgcctacaaactttccaacccgaccaaaaccgataccggcgtatatgttgaagccattcacgacatcggcgatttcacgctgaccggcgggctgcgttacgaccgcttcaaggtgaaaacccatgacggcaaaaccgtttcaagcagcaaccttaacccgagtttcggcgtgatttggcagccgcacgaacactggagcttcagcgcgagccacaactacgccagccgcagcccgcgcctgtatgacgcgctgcaaacccacggtaaacgcggcatcatctcgattgccgacggcacaaaagccgaacgcgcgcgcaataccgaaatcggcttcaactacaacgacggcacgtttgccgcaaacggcagctacttctggcagaccatcaaagacgcgcttgccaatccgcaaaaccgccacgactctgtcgccgtccgtgaagccgtcaatgccggttacatcaaaaaccacggttacgaattgggcgcgtcctaccgcaccggcggcctgactgccaaagtcggcgtcagccacagcaaaccgcgcttttacgatacgcacaaagacaagctgttgagcgcgaatcctgaatttggcgcacaagtcggccgcacttggacggcctcccttgcctaccgcttccaaaatccgaatctggaaatcggctggcgcggccgttatgttcaaaaagctacgggttcgatattggcggcaggtcaaaaagaccgcaaaggcaacttggaaaacgttgtacgcaaaggtttcggtgtgaacgatgtcttcgccaactggaaaccgctgggcaaagacacgctcaatgtcaatctttcggttaacaacgtgttcaacacgttctactatccgcacagccaacgctggaccaataccctaccaggtactggacgtgatgtacgcttgggcgtgaactacaagttctaa

SEQ ID NO: 37778 - DNA, 582 bp, Neisseria meningitidis
atggataatcaagaaatcaacaacggccgccgccgtttcctgacactcgcgacctgcggcgcgggcggagtggcagcattgggtgtggcaacgccgtttgtggccagttttttcccttcggaaaaagccaaggccgccggtgctgccgtcgaggtggatgtcagtaaaatcgaagcgggtcagctgctgaccgccgagtggcaaggcaaaccgatttgggtgctcaaccgtacagatcagcagcttaaagacctgaaaggcctgaacggcgaacttaccgatcccaattccgatgcggaacagcagccggagtatgctaaaaacgagacccgttcgattaagccgaacatccttgtcgccatcggtatctgcacccatttgggctgctcgcccaccttccgtcccgacattgcccccgccgatttgggtgcagactggaaaggcggcttcttctgcccctgccacggttcgaaattcgacttggccggccgcgtatataaaggtgttcctgccccgaccaacctggttgtcccgccatataaatacttgagcgacacaactatcttggtgggcgaagactaa

SEQ ID NO: 37779 - DNA, 1110 bp, Neisseria meningitidis
atgagcaactggaaacccgatattccctataacgatttaccacccctgccgccaaaacaggatattgaaagcaaaaccatcctgaaacgttgtataaccgcccgtgcatcccttgcccgtttaaagcaggcggcagaactgataccgaatcaagccatgctgattaacacccttcctgttatggaagcccgtgcaagttcggaaattgaaaacatcgtaaccacaacggataagctgtttcaatccctgcaaatggatacggaacggcaagaccctgccacgaaagaagccctgcaataccgcaccgccctgtttgcaggctatgaatcactgacgagccgccctttatgcacacaaaccgccatcatggtctgcaacgccatcaagcacccctacgaaatggccatccgcaaaacaggcggcacagccctaaaaggaggcaacagcggaaatgttgtctataccccgcccgaaggagaagaaaccatacgcggcaagctggcaaattgggagcggtttattcacgaaagcggcgatttagacccgcttatcatcatggcggcggcacattaccaatttgaagccatccatccgtttacggacggcaacgggcggacggggcgcatattgaacagcctgctattgattgaaaaagggcttttggatttgcctattttgtatttgagccgctacatcatcgaaaacagggcggactattaccgcctgcttttaggcgtaaccgaacggcaggattgggaaagctggataatctacatcttagacggcgtagccgacaccgccgattggacggtatcgaaaatagatgcgatacgccgcctgttcgagcagacacgtcaacacatacggacacacgcacaaggaatctacacgcacgaactggtaaatcttctgtttgagcagccatatacacgcattgccaacctagaagcggcagggatagccaaacggcagacggcctctaagtacctgaaagagctttcagacataggtgtgctgcaagaaatcgtcatcggcagggacaaactattcattcatccgcgcctaatggaactattgcgaggagagggcaacagctttacttcattctaa

SEQ ID NO: 37780 - DNA, 825 bp, Neisseria meningitidis
ttgatacaattccgcttttccaacacgcgcaatcatctttatatgaaaaccaagttaatcaaaatcttgaccccctttaccgtcctcccactgctggcttgcgggcaaacgcccgtttccaatgccaacgccgaacccgccgtcaaagccgagtccgccggcaaatccgttgccgcctctttgaaagcgcgtttggaaaaaacctattccgcccaagatttgaaagtgttgagcgtcagcgaaacaccggtcaaaggcatttacgaagtcgtcgtcagcggcaggcagattatctacaccgatgccgaaggcggctatatgttcgtcggcgaactcatcaacatcgacacgcgcaaaaacctgaccgaagaacgcgccgccgatttgaacaaaatcgacttcgcctccctgcctttggacaaagccatcaaagaagtgcgcggcaacggcaagctgaaagtcgccgtcttctccgaccccgattgtccgttctgcaaacgcttggaacacgagtttgaaaaaatgaccgacgtgacggtttacagctttatgatgcccattgccggcctgcaccccgatgccgcgcgcaaggcgcaaatcttatggtgtcagcccgaccgcgccaaagcgtggacggattggatgcgtaaaggcaaattcccggtcggcggcagcatctgcgacaatcccgtcgcggaaaccacttccttgggcgaacaattcggcttcaacggcacgccgaccctcgtcttccccaacgggcgcagccaaagcggctacagcccgatgccccaactggaggaaatcatccgcaaaaatcaataa

SEQ ID NO: 37781 - DNA, 372 bp, Neisseria meningitidis
atgagaaaaccccaacgcggctatgcccgccaagaccgtgtcaaagaacaaattatgcgcgagcttgccgaactcgtccgtaccggactgaaagacccgcgcgccggcttcattaccgtcaacgaagtcgaagttacccgcgattacagccacgccaccgtgttctacaccattttaaaccaagacgcgcgcgaaattacggaagaagtgctggaacacgcgcgcggacacctccgcagcgaattggccaaacgcatcaagctgttcaaaatccccgagctgcatttcaaatacgacgaatcgttggaacgcggtttgaacctgtccgcccttatcgatcaagtggcggcggaaaaaccggttgaagactga

SEQ ID NO: 37782 - DNA, 1977 bp, Neisseria meningitidis
atgtccaaactcaaaaccatcgctctgaccgcatcaggtctgtccgtttgtccgggtttcctatacgcccaaaacacctcatcacaccaaatcggtttggcgattatgcgcttaaactcttcaatactcgacctgcccccgacaaaacaatatttccaatccggcagcctgtggagcgagctgcgccaaggcttccggatgggcgaagtcaatcccgaactggtacgccgccacgaaagcaaattcatcgcaagccacagctatttcaacagggtcatcaaccggagtagaccctatatgtaccatatcgccaacgaagtcaaaaaacgcaatatgcccgccgaagccgccctgcttcccttcatcgaaagcgcgttcgtcaccaaagccaaatcacacgtcggcgcatcaggattatggcagtttatgcccgctaccggcaggcattacggcctggaaaaaacaccggtttacgacggcaggcacgacgtttacgccgccaccgatgccgcactcaactatctgcaatacctctatggactgttcggcgactggccgcttgcctttgccgcctacaactggggtgaaggcaacgtcggacgcgccatcaaccgcgcccgcgcccaagggctcgaaccgacctacgaaaacctgcgtatgcccaacgaaacgcgcaactatgtccccaagctgctcgccgtgcgcaacatcattgccactccccaatctttcggcatgaatatcagcgacatagacaacaaaccctattttcaggcagtcgaaccggatcgtccgctcgacaacgaagccatcgcccggcttgccggcatcacgcaaagcgagctgctcgccctaaaccccgcattcaacgtccccgcgtttatccccaaaagcaaacgcaaactgctgcttcctgtcgcgtccgtacaaaccttccaaagcaactacctcaacgccgcacccgacagcctgttttcatgggaagtctatacacctgccgccaaaaccagcctgtccgacatctcgacggcaaccggcatgagcattgccgacatcaaacgcctcaacaacctgaacggcaaccttgtcaacgcaggacgcagcatccttgtcgccaagaacggcaaaacccttcagacggcatcggaatccgtcgtttccatcgacatcgacaatacacccgacacctaccgttccaatatgccggcaggcacggtgaacgtcggcattgcccgaatccgacccgccgccgcacagacagcggacattaccgtcgcacctttgccgcagaaaaccgtccgtacggaacccgatccccttgtccgtattgccgaacctgcccttgcgacagccgcagcgcaacctcaaaccgaaaaacagaccgccatgccgtctgaaacccaaaccgcaacactcgcgcagatcgtcccccaaaacgacatgcaggcggcagacgaactcatgcagcttgttgcccgaaacaacctgcgccgacaggctgaagaaaccatctccgccgtcatcggcacgcctgacacagttgccgaacacaacatttcctcatctccgcaacataccgttgccgccgacggcaaacgccgggtacgtttggaaacgcgcgtagccaaagctgccgacggcgaagccgaaatctccccgctccatgccagcatccaccgcgttgtagaaggcgacaccctgttcaacattgccaaacgctacaacgtcagtgtagccgacctgattgtcgccaacaacatcaaaggcaacaccatccaaaaaggacaggtactccgcctggcgcaggcagcccctgcccaaacccgtattgaaaaagtatcctacaccgcgcgcaaaggcgacaccttcaaaagtatcgccgcgcgcttcaatatccatatcgacgacatccgccggctcaatcccaacctgaacaccatcaatccgggacagagggtcaaactgattggaagctga

SEQ ID NO: 37783 - DNA, 1101 bp, Neisseria meningitidis
atggaaacacagctttacatcggcatcatgtcgggaaccagcatggacggggcggatgccgtactgatacggatggacggcggcaaatggctgggcgcggaagggcacgcctttaccccctaccccgacaggctgcgccgcaaattgctggatttgcaggacacaggcacagacgaactgcaccgcagcaggatgttgtcgcaagaactcagccgcctatatgcgcaaaccgtgggcgaactattaaacaagcaaaacctcgcgccgtccgacattaccgccctcggctgccacggtcaaaccgtccgacatgcaccggaacacggttacagcgtacagcttgccgatttgccgctgctggcggaactgactcagatttttaccgtcggcgacttccgcagccgcgaccttgcggccggcggacaaggcgcgccgctcgtccccgcctttcacgaagccctgttccgcgacgacagggaaacacgcgcggtactgaacatcggcgggattgccaacatcagcgtactcccccccgacgcacccgccttcggcttcgacacaggaccgggcaatatgctgatggacgcgtggatgcaggcacactggcagcttccttacgacaaaaacggtgcaaaggcggcacaaggcaacatattgccgcaactgctcgacaggctgctcgcccacccgtatttcgcacaaccccaccctaaaagcacggggcgcgaactgtttgccctaaattggctcgaaacctaccttgacggcggcgaaaaccgatacgacgtattgcggacgctttcccgattcaccgcgcaaaccgttttcgacgccgtctcacacgcagcggcagatgcccgtcaaatgtacatttgcggcggcggcatccgcaatcctgttttaatggcggatttggcagaatgtttcggcacacgcgtttccctgcacagcaccgccgaactgaacctcgatccgcaatgggtagaagccgccgcgttcgcatggatggcggcgtgttgggtcaaccgcattcccggtagtccgcacaaagcaaccggcgcatccaaaccgtgtattctgggcgcgggatattattattga

SEQ ID NO: 37784 - DNA, 939 bp, Neisseria meningitidis
atgcttgaactgaacggactctgcaaacgcttcggcggcaaaacggttgccgacaacatctgcctgactgtcgggcgcggcaaaatactcgccgtactggggcggtcgggctgcggaaaatccaccctgctgaatatgattgcgggcatcgtccggccggacggcggcgaaattcagctgaacggggaaaacattacccgtatgccgcccgaaaaacgccgtatttcgctgatgtttcaagattacgcgctgtttccccatatgagtgcgctggaaaatgcggcattcggtttgaaaatgcaaaaaatgccgaaagccgaagccgaaagcctcgccttgttggcacttgccgaagtcggactggaaaatgaggcgcaccgcaagcctgaaaaactttccggaggcgagaagcaacggttggcactggcgcgcgctttggttgtccgcccttccttgctgttgctggacgaatcgttttccagtttggacacgcatttgcgcgaccggctgcgccgcatgactgccgaacgtatccgaaacggcggcatccctgccgttttggtaacgcattcgcccgaagaggcctgcacggcggcggacgaaatcgccgtcatgcacgaggggaaaatccttcaatgcggtacgcccgaaaccttggttcaaacgcctgccggcgtgcaggtcgcccgactgatgggtttgcccaataccgacgatgaccgccatattccgcaaaatgcggtgcgtttcgaccaagacggcatggagtgccgcgtattatcccgtacctgtttgcccgaatcgttcagcctgtccgtcctccatccggaacacggcatcctgtggctgaacctcgatatgccgcacgccggtgaaatatcgggaaacgatacggtacgcatccatatcgaagacagggaaatcgtccgcttccgctga

SEQ ID NO: 37785 - DNA, 840 bp, Neisseria meningitidis
gtgaaccgaactgccttctgctgccttttcctgaccaccgccctgattctgaccgcctgcagcagcggaggcggcggaagcggaagcggcggtgtcgccgccgacatcggcacggggcttgccgatgcgctaaccgcgccgctcgaccataaagacaaaggtttgcggtctttgacgctggaccagtccgtcaggaaaaacgagaaactgaagctggcggcacaaggtgcggaaaaaacttatggaaacggcgacagcctcaatacgggcaaattgaagaacgacaaggtcagccgtttcgactttatccgtcaaatcgaagtggacaggcagctcattaccttggagagcggagagttccaagtgtacaaacaaagccattccgccttaaccgcctttcagaccgagcaaatacaagattcggagcattccgggaagatggttgcgaaacgccggttcagaatcggcgacatagcgggcgaacatacatcttttgacaagcttcccgaaggcggcagggcgacatatcgcgggacggcgttcagttcagacgatgccggcggaaaactgacctacaccatagatttcgccgccaagcagggatacggcaaaatcgaacatttgaaatcgccggaactcaatgtcgacctggtctctgccgatatcaagccggatgaaaaacgccatgccgtcatcagcggctccgtcctttacaaccaagacgagaaaggcagttactccctcggtatctttggcggaaaagcccaggaagttgccggcagcgcggaagtgaaaaccgtaaacggcatacgccatatcggccttgccgccaagcaataa

SEQ ID NO: 37786 - DNA, 483 bp, Neisseria meningitidis
atgacgaacatccgtatcggacagggctacgatgtccaccaactgaccgaaggcagaaagctgatacttggcggagttgaaatcccatttgaaaaagggctgctcggacactccgatgccgatgcgctgctgcacgctgttaccgacgcgctgctcggtgcggcaggtttgggcgatatcggcagccatttccccgacaccgccgcagagttcaaagatgcggacagccgcgtccttttgcgtgcggcgtatcaaagcgttcaggcgcagggttggcaggcggtcaatgtcgatacgaccgtgattgcacagaaacccaaactcgcgccgcatattccgcaaatgcgtgccaacatcgccgccgatttgggcatagacatttcgtgcgtcaacatcaaaggcaaaaccaacgaaaaactcggttatctcgggcgcatggaaggcatagaggcgcaggcggcggtattgctggtaaggatttga

SEQ ID NO: 37787 - DNA, 1419 bp, Neisseria meningitidis
atgtctattaaaaacgccgtaaaattgattgaagaaagcgaagcccgctttgtcgatttgcgctttaccgataccaaaggcaagcagcaccactttaccgtgcctgcgcgcatcgtgttggaagaccccgaagagtggtttgaaaacggacaggcgtttgacggttcgtccatcggcggttggaaaggtattcaggcttcagatatgcagttgcgtcccgatgcgtctacagccttcgtcgatcctttctacgacgataccaccgttgtctttacctgcgacgttatcgacccggctgacggccaaggctatgaccgcgacccccgctctatcgcacgccgcgccgaagcctatttgaaatcttccggtatcggcgacaccgcctatttcggccctgagcctgaattcttcgtttttgacggcgtagaatttgaaaccgatatgcacaaaacccgttacgaaattacgtccgaaagcggcgcatgggcaagcggtctgcatatggacggtcaaaacaccggccaccgccccgccgttaaaggcggttacgcgcccgtcgcgccgattgattgcggccaagatttgcgctccgccatggtgaacattttggaagaactcggcatcgaagtcgaagtccaccacagcgaagtcggcaccggcagccaaatggaaatcggcacgcgcttcgccaccttggtcaaacgcgccgaccaaacccaagacatgaaatatgtgattcaaaacgttgcccacaacttcggcaaaaccgccacctttatgcccaaaccgattatgggcgacaacggcagcggtatgcacgttcaccaatccatttggaaagacggtcaaaacctgttcgcaggcgacggctatgccggcttgagcgacaccgcgctctactacatcggcggcatcatcaaacacgccaaagccttgaacgcgattaccaatccgtccaccaactcctacaaacgcctcgtgccgcactttgaagcgccgaccaaactggcatactccgccaaaaaccgttccgcttccatccgcattccgtccgtgaacagcagcaaggcgcgccgcatcgaagcgcgtttccccgatccgaccgccaacccatacttggcatttgccgctttgttgatggccggtttggacggtattcaaaacaaaatccatccgggcgatcctgccgataaaaacctctacgacctgccgccggaagaagacgcgctcgtcccgaccgtttgcgcttctttggaagaagcactcgccgccctcaaagccgaccacgaattcctgctgcgcggcggcgtgttcagcaaagactggatcgacagctacatcgcctttaaagaggaagatgtccgccgcatccgcatggcgccgcatccgctggaatttgaaatgtattacagcctgtaa

SEQ ID NO: 37788 - DNA, 297 bp, Neisseria meningitidis
atgctgttgaaggtagtacctgagcgtaccgtttcggcagatgcaaaaaccagagacccgatgtgggacaatgcggctttacagaccagcgaaggcgtaaattttattgctcgtttcctaggattttttagcgatggggaataccgctatgtggatgtcctgcaacccaaccattccgatattattcggtattcaggtaaagattttccgctaaatcaaatacttaaccatatacaccccgcccgttatgcggtaacgttcgaaaacaatgtcgattccaagctgcgcaggcactga

SEQ ID NO: 37789 - DNA, 327 bp, Neisseria meningitidis
atgtctgtcaaaaagatgcttgccatactgttgtctgcaatattgggactggtatcgacaactgccgctgccggtacgtcagaacccgcccaccgcgataccaaacatatccgcaaggcaaacaagcagatgctgcaccccgaatgcaggaaatatttggaacgccgtgccgcgtggtaccgatcgcaaggcaacgtgcaggaattgcgcgaaaacaaaaaggcgcgcaaagcattccgctccctgccttatgcggaacagaaaatccaatgccgggcggcttatgaggctttcgatgatttcgacggcggcagtttccgccgttaa

SEQ ID NO: 37790 - DNA, 945 bp, Neisseria meningitidis
ttgatggaatataatgcaattatgaaaacaatcgctccttcccatataaagccccttatgccagagttgaaccaatctcaacgcaataggattatatttattgatttctatctatgctttctaggaaagataaatagaaaagatttgatgcaggcatttcaaatttccccagctgttgctactagggattttgcgctatattgctctagtttttcgaaaaatctccgttttgataccaaaagtaaattttacctctctactgaagactttgaacctcaattcccccattcatttgaaaatgcaattaaaattcttaatggcagtttaatatttgatattgattcccaacatcaacctcttcttccgtttgatttacctcctgttttaataaatcctgatgtcttaatcttttctaaaatatcgaaagcattatccttaaaaaaacctctaaaaatctcatatcattcaatttcatctggattatctgagaaagttattgtgcctcttgctctagttaatgacggatttcgatggcatttacgggcattcgatagaacaaaaaaccgatttgcagattttgtcctaacacgaataattcaagcaaatattttattagctgaaaatattgaagaaaatgaaacgattaacaatgatattgattggaatagaattgttaaaatcgagttggttccccatcctaatcatgatgaagctaaaaaagtgattgaaatggactttggaatgacaaatggaaaattagaattggcgcttagagcttcaaatatcggatatgttttacagcaatggcgagtcgattgttcgtcagatcatcatatcgatgatcctgcttttagattatggctgttagataatttagttttatacggcatcaacaatgctgaacacttagcgcctgcctttgataaaaaacgtagcaagccgtag

SEQ ID NO: 37791 - DNA, 534 bp, Neisseria meningitidis
atgtcacgtgtcgcaaaaaacccagtgactgttcccgctggtgtagaagtaaaatttggaacagaggcattagttattaagggtaagaacggtgaattgtcttttcctttgcattctgatgtagccattgaatttaatgatggcaaattggcttttgttgcgaataacagcagtaaacaagcaaatgcaatgtctggtactgctcgcgcattagtcagcaatatggttaaaggtgtttcagaaggttttgagaaaagattgcaattgataggtgtgggttatcgtgctcaagcacaaggtaaaatcttgaatctgtctttgggtttttctcatccgatcgtatatgaaatgcctgaaggtgtctccgttcaaactcctagccaaacagagattgttttaaccggctcggataaacaagttgttggtcaagttgctgctgagattcgtgcgttccgtgctcctgagccttataaaggtaaaggtgttcgctatgtaggagaagtagtggtaatgaaagaagccaagaaaaaataa

SEQ ID NO: 37792 - DNA, 828 bp, Neisseria meningitidis
atgaaacccgatatttatgctttgctggaacgcgccctgctttcgggcaaccccgatgaaaaaggacggctggcggatgaggcgtttgccgccgttcaaaatgcggacggggcggaaacaaacgcgccgccggcggacttcccccgagcgggacggccagacaagcctgttttggtcgcgccgtcgcaactgaccccgcgcaaaatgaacacaaccgaaggttatgcggcgatgctgcacgcgattacgcatatcgagttcaacgccgtcaatctaactttggacgcggcataccgtttccgcacgctgccgtttcagtttgtccgcgattgggtgaaagtggcgaaggaagaggtgtaccatttccgcctgatgcgcgacagattgcgcgctttcggcttcgattacggcagtttcgaggcgcacaaccatttgtgggatatggcgtacaaaaccgcctacgacccgctgttgcgtatggcgttggtaccgcgcgtattggaagcgcgcgggctggatgttacgccggggatacgcgcgaaggtggcgcagcgcggcgattcggaaacctgcggcgtattggacatcatttaccgcgacgaagtgggccatgtcgccatcggcaaccattggtatcaacacctctgccgcgaacgcggtttggaaccgattgccctgttccgcagcctgattgcccgttacgatatgtttatcttccggggctatgtgaacatcgaagcgcgggaaaaagcgggcttcagccgcttcgaattggatatgttggaagatttcgaacagggtttgaaacaaaataaacatgccgtctga

SEQ ID NO: 37793 - DNA, 1677 bp, Neisseria meningitidis
atgagcgtaggtttgctgaggattctggttcaaaaccaggtggttactgttgagcaggccgagcattactacaatgagtcgcaggcgggtaaggaagtgttgccgatgctgttttcagacggtgtcatttcgcccaagtcgcttgcggcattgattgcgagggtgttcagttattcgattcttgatttgcgtcattatccgcgccacagggtgctgatgggggtgttgacggaggagcagatggtggagttccactgtgtgccggttttccgtcggggcgacaaagtattttttgcggtttccgatccgacacagatgccgcaaattcagaaaaccgtttctgccgcagggattgaggttgagttggtcattgtcgaggatgaccagttggcgggtttgctcgattgggtgggttcgcgttcgacatcgctgcttcaggagcttggggaggggcaggaggaagaggaaagccacaccctgtatatcgacaacgaggaggcagaagacggccctgttccgaggtttatccataagactttgtcggatgccttgcgcagcggggcatcggacatccatttcgagttttacgaacacaatgcccgtatccgtttccgtgtggacgggcagctccgcgaggtggttcagccgcccattgcggtaagggggcagcttgcttcccggattaaggtaatgtcgcgtttggacatttccgaaaaacggataccgcaggacggcaggatgcagctgacctttcaaaagggcggcaagcctgtcgatttccgtgtcagcacattgccgacgctgtttggcgaaaaggtcgtgatgcggattttgaattccgatgccgcgtctttgaacatcgaccagctcggttttgagccgtttcagaaaaaattgttgttggaagcgattcaccgtccctacgggatggtgctggtaaccggtccgacgggttcgggtaagacggtgtcgctctatacctgtttgaatattttgaatacggagtcggtaaatattgcaacggcggaagaccctgccgagattaacctgccgggcatcaatcaggttaacgtcaatgataagcagggcctgacttttgccgctgctttgaagtctttcctgcgtcaggacccggacatcattatggtcggtgagattcgtgatttggaaactgccgatattgcgattaaggcggcacaaacagggcatatggtgttttccacactgcacacgaataatgcgccggcgacgttgtcgcgtatgctgaatatgggtgtcgcgccgtttaatattgccagttcggtcagcctgattatggcgcagcgtcttttacgcaggctgtgttcgagctgcaaacaggaagtggaacgcccgtctgcctctgctttgaaggaagtcggcttcaccgatgaggaccttgcaaaagattggaaactttaccgcgccgtcggttgcgaccgttgccggggacagggttataaggggcgtgcgggcgtgtatgaggttatgcccatcagcgaagaaatgcagcgtgtgattatgaacaacggtacggaagtggatattttggacgttgcctataaggagggtatggtggatttgcgccgggccggtattttgaaagttatgcagggcattacttcattggaagaggtaacggcaaataccaacgattag

SEQ ID NO: 37794 - DNA, 1095 bp, Neisseria meningitidis
atgaaaaccaatctgctcaactacgaccttcaagggctgacccgacattttgccgatacgggcgaaaaacccttccgtgccaaacaggttatgcgttggatgcaccaatccggcgcgcaaaattttaacgaaatgaccgatttggcaaaatcgttgcgccataaactaaatgaacaggcaagcatcgaaattcccaagctgatgatgtctcaagaatcttcagacggcactcgaaaatggctactagatgtcgggacggggaacggggtggaaaccgtcttcatccccgaatcggatcgcggcacgctctgcatttcctcgcaagtcggctgcgctttggaatgtacattttgctcgaccggccggcagggcttcaaccgcaacctgactgctgccgaaatcatcggacagttgtggtgggcaaacaaagcgatgggggttacaccgaaaaacgaacgcgtaatttccaatgtagtgatgatgggtatgggcgagccgatggcgaacttcgacaatgtcgttaccgccttaagcatcatgctggacgaccacggctacggtttgagccgccgccgtgtaaccgtttccacttcgggtatggttccccaaatggacaggttgcgcgatgtcatgccggtggctttggcggtttccctccacgcttccaatgacgaagtccgcaaccaaatcgtaccgttgaacaaaaaatatcccttgaaagaattgatggccgcatgccaacgctatctggtcaaagcacccagggatttcatcactttcgaatacgtcatgttggacggaataaacgatagggcgcaacatgcgcgcgaactgatcgaactagtcaaagatgttccctgcaagttcaatctgattccgttcaatcccttcccaaactccggatacgaacgctccagcaatgagaacatccgtgtgttccgcgatattttgcagcaggcaggatttgtcgttaccgtacgaaaaacgcgcggcgacgacatcgatgccgcctgcggacagttggcaggtcaggttcaggataaaacgcgccgccaacaaaaatggcagcagattttaatcggacaacaggggtaa

SEQ ID NO: 37795 - DNA, 1008 bp, Neisseria meningitidis
atgagcaccttcttccagcaaaccgcccaagccatgattgccaaacacatcaaccgtttcccgctattgaagttggaccaagtgattgattggcagccgatcgaaccatacctgaaccgtcaaaaaacccgttacctccgagaccaccgcggtcgtcccgcctatcccctgttgtccatgttcaaagccgtcctgctcggacaatggcacagcctctccgatcccgaactcgaacacagcctcatcacccgcatcgatttcaacctgttttgccgtttcgacgaactgatcatccccgattacagtaccttatgccgctaccgcaactggctggcgcaagacgacaccctgtccgaattactcaaactgattaactgccaactgaccgaaaaaggcttaaaagtagagaaagcatccgccgccgtcattgacgccaccattattcagaccgccggcagcaaacagcgtcaggccatagaagttgacgaagaaggacaagtcagcggccaaaccacaccgagtaaggacagcgatgcccgttggatcaagaaaaacggcctctacaaactcggttacaaacaacatacacgtaccgatgcggaaggctatatcgagaaactgcacatcacccccgccaatgcccatgagtgcaaacacctgtcgcctttgctggaaggactgcccaaaggtacgaccgtctatgccgacaaaggctacgacagtgcggaaaaccggcaacatctggaagaacatcagttgttagacggcattatgcgcaaagcctgccgcaaccggccgctgtcggaagtgcaaaccaaacgcaaccggtatttgtcgaagacccgttatgtggtcgaacaaagcttcggtacgctgcaccgtaaattccgctatgcgcgggcagcctatttcgggctgctcaaagtgagtgcgcaaagccacctgaaggcgatgtgtttgaacctgttgaaagcggccaacaggttaagtgcgcccgctgccgcctaa

SEQ ID NO: 37796 - DNA, 2751 bp, Neisseria meningitidis
atgaccgacgcaaccatccgccacgaccacaaattcgccctcgaaaccctgccggtaagccttgaagacgaaatgcgcaaaagctatctcgactacgccatgagcgtcattgtcgggcgtgcgctgccggacgttcgcgacggtctcaagccggtacaccgccgcgtactgtacgcgatgcacgaattgaaaaacaactggaatgccgcctacaaaaaatcggcgcgcatcgtcggcgacgtcatcggtaaataccacccccacggcgatatcgccgtatacgacaccatcgtccgtatggcgcaaaatttcgctatgcgttatgtgctgatagacggacagggcaacttcggatcggtggacgggcttgccgccgcagccatgcgctacaccgaaatccgcatggcgaaaatttcccacgaaatgctggcagacattgaggaagaaaccgtcaatttcggcccgaactacgacggtagcgaacacgagccgcttgtactgccgacccgtttccccacactgctcgtcaacggctcgtccggcatcgccgtcggcatggcgaccaatatcccgccgcacaacctttccgataccgtcaatgcctgcctgcgcctgctcgatgcacccgacaccgaaatcgacgaactgatcgacattatccaagcccccgacttcccgaccggggcaaccatctacggcttgagcggcgtgcgcgaaggctataaaacaggccgcggccgcgtcgttatgcgcggtaagacccatatcgaacccataggcagaaacggcgaacgcgaagccatcgttatcgacgaaatcccctatcaggtcaacaaagccaagctggtcgagaaaatcggcgatttggttcgggaaaaaacactggaaggcatttccgagctccgcgacgaatccgacaaatccggtatgcgcgtcgttatcgagctgaaacgcaacgaaaatgccgaagtcgtcttaaaccaactctacaaactgactccgctgcaagacagtttcggcatcaatatggtggttttggtcgacggacaaccgcgcctgttgaacctgaaacagattctctccgaattcctgcgccaccgccgcgaagtcgttacccgacgtacgcttttccggctgaagaaggcacgccatgaagggcatatcgccgaaggcaaagcggtcgcactgtccaatatcgatgcaatcatcaagctcatcaaagaatcgcccaacgcagccgaggccaaagacaaactgcttgcgcacccttggcgcagcagcctcgttgaagaaatgctgacgcgttccggtctggatttggaaatgatgcgtccggaaggattggctgcaaacatcggcttgaaagagcaaggttattacctgagcgagattcaggcagatgctattttacgcatgagcctgcgaaacctgaccggcctcgatcaagaagaaattgtcgaaagctacaaaaacctgatgggtaaaatcatcgactttgtggatatcctctccaaacccgaacgcattacccaaatcatccgcgacgaactggaagaaatcaaaaccaactatggcgacgaacgccgcagcgaaatcaacccgttcggtggcgacattgccgatgaagacctgattccgcaacgcgaaatggtcgttaccctgacacatggcggctatatcaaaacccagccgaccaccgactatcaggcgcagcgtcgcggcgggcgcggcaaacaggcggctgccaccaaagacgaagactttatcgaaaccctgtttgttgccaacacgcatgattatttgatgtgctttaccaatttgggcaagtgtcattggattaaggtttacaaactgcccgaaggcggacgcaacagccgcggccgtccgattaacaacgtcatccagttggaagaaggcgaaaaagtcagcgcgattctggcagtacgcgagttccccgaagaccaatacgtcttcttcgccaccgcgcagggactggtgaaaaaagtccaactttccgcctttaaaaacgtccgcgcccaaggcattaaagccatcgcgctcaaagaaggtgactacctcgtcggcgctgcgcaaacaggcggtgcggacgacatcatgctgttctccaacttaggtaaagccatccgcttcaacgaatactgggaaaaatccggcaacgacgaagcggaagatgccgacatcgaaaccgaaatttcagacggcatcgaagatgaaaccgccgacagcgaaaacgcactgccgagcggcaaacacggtgttcgcccgtccggtcgcggcagcggcggtttgcgcggtatgcgcctgcctgccgacggcaaaatcgtcagcctgattaccttcgcccctgaaaccgaagaaagcggtttgcaagttttaaccgccaccgccaacggatacggaaaacgcaccccgattgccgattacagccgcaaaaacaaaggcgggcaaggcaatattgccattaacaccggcgagcgaaacggcgatttggtcgccgcaaccttggtcggcgaaaccgacgatttgatgctgattaccagcggcggcgtacttatccgcaccaaagtcgaacaaatccgcgaaaccggccgcgccgcagcaggcgtgaaactgattaacttggacgaaggcgaaaccttggtatcgctggaacgtgttgccgaagacgaatccgaactctccgacgcttctgtaatttccaatgtaaccgaaccggaagtcgagaactga

SEQ ID NO: 37797 - DNA, 1494 bp, Neisseria meningitidis
atgttgtcaggactccccatccccaaagacatcgcgcgcccgcccgaaacgatattggtcaacatcacgccgcaggaaacgcgcgtagcggtgttggaggaaaacaatatctgcgagctgcacatcgagcgcaacagcgaacacagcctagtcggcaatatctatttgggcgtggtgcgccgcgtgctgcctgggatgcagagcgcgtttatcgacatcggcttggaacgcgcggcgtttttacacatcgtcgatgtcctcgaacaacgccgcaaccccgaagaaacccagcgcatcgaacatatgctgtttgaagggcagtctgttttggtgcaggtcatcaaagacccgatcaacaccaaaggcgcgcggctttccacccaaatctcgctggcggggcgtttcctcgtccatcttccgcaagaagaccacatcggcgtgtcccaacgcatcgaagacgatgccgaacgcagcagcctgcgcgaacgcctcgacaagctcctgccggaaaatgcctgccggggctacatcatccgcaccaacgccgaaaacgccaccgacgaacagctccagtccgacatcgactacctgaccaaagtgtgggaacacatccaagaacaggcgaaaatccggccgccggaaaccctgctttatcaggatttgcccttgagtttgcgcgtgttgcgcgatatggtcggctgcgacacgcaaaaaatcctcgtcgattccaccgtaaaccacggccgcatgacgcgttttgccgaacaatacgtccacggcgcattgggcaggatagaattgttcaaaggcgaacgcccgctatttgaaacccacaacgtcgaacaggaaatcagccgcgccctgcaaccgcgcgtcaacctcaacttcggcagctacctgattatcgaatccaccgaagcgatgaccacgatagacgtgaacacaggcggcttcgtcggcgcacgcaatttcgatgaaacgattttccgcaccaacctcgaagcctgccacaccatcgcccgcgaattgaggctgcgcaacctcggcggcatcatcatcatcgacttcatcgatatggcgcaggaaagccaccgcgaagccgtgttgcaggagcttgccaaagccctcgccttcgaccgtacccgcgttaccctgcacggttttaccagcctgggactggtcgagctgacgcgcaaacgctcgcgcgaaaacttaaaccaagtcctctgcgaaccctgcccttcctgccaaggcagaggccgtctgaaaacgccgcaaaccgtgtgctacgaaatccagcgcgaaatcgtccgcgaagcgcgccgttacgatgccgaaagtttccgcatcctcgccgcccccaacgtcatcgatttgtttttggacgaagaatcgcaatccttggcaatgctgatagatttcatcggcaaaccgatttctctggcggtcgaaaccgcttacacgcaggaacaatacgatatagtgctgatgtaa

SEQ ID NO: 37798 - DNA, 255 bp, Neisseria meningitidis
atgaacaaacttttcattaccgccctgtccgccctcgccttgtccgcctgcgccagcacttgggagggcgcgaaacaagacaccgcccgcaaccttgacaaaacacaggccgccgccgaacgcgccgccgaacaaacaggcaacgccgtcgaaaaaggctgggacaaaaccaaagaagccgtcaaaaaaggcggcaatgccgtcggacgcggcatttcccatctcggcggaaaaatcgaaaacgccaccgaataa

SEQ ID NO: 37799 - DNA, 210 bp, Neisseria meningitidis
atgaactacttcggcatggtagagtttctgcgcctgatggcaatggtgcggccgccatttgtcttcttctccggcacccgcagcgaactgcctgcttatcttgacctcgtggcagaactgcgcctgaccggatgggagcgttttgcaggcagccaaaccttgactgtgagcagcacatcaacagcaattcaagctacgacgaccacctga

SEQ ID NO: 37800 - DNA, 237 bp, Neisseria meningitidis
atgggtttgattgctatcgcatgtggtttgatcgttgcattgggcgcactaggtgcctctatcggtatcgcaatggtcggttctaaatatttggagtcttctgcccgtcagcccgaactgatcggtccgctgcaaaccaaactgttcctgattgccggtttgattgatgccgcattcttgattggtgtcgccattgcactgctgttcgccttcgttaacccgtttgcaggtgcataa

SEQ ID NO: 37801 - DNA, 1776 bp, Neisseria meningitidis
atgagtatcgtgctgcacggcgtggcggcgggcaaaggtattgccgtcggttgcgcccacctgattgcgcgcggtacggaggaagtgccgcagtatgatgttgcggaggcggacaccgatgccgaagccgaacgtttcgatgccgccgtcaaagccacgcgcaaagagttggaacagctccgcagcgcgattcccgaaaacgccccgaccgagttgggcgcgttcatctcgctgcacctgatgctcttgaccgatgttaccttgtcgcgcgaacccgtcgatattttaagggaacaaaaaatcaacgccgagtgggcattgaagcagcagagcgacaaactcgctgcccaattcgacaatatggacgatgcctatttgcgcgaacgcaagcaggatatgctgcaagtcgtccgccgcatccacaacaacctgatcgggcagggcaacgagttggaagttgccgacaacctgtttgacgaaaccgttctgattgcaaacgacctttcgcccgccgacacggttttgtttaaagagcagcgcattgccgccttcgttaccgatgccggcggccccaccgggcatacggcgattttgggcaggagcttggacatcccgtccgtcgtcgggctgcacaacgcgcgcaaactgattaccgagggcgaaacggtcattgtggacggtatcaacggcgtgttgattatcgcgccggatgagtcggtgttgaacgaataccgccgccgtgcccgcgaataccgcagccacaaacgcgatttgaacaagctcaaaaaaaccgccgccgccaccgctgacggggtctgcatcgagcttgtgggcaatatagaatccgccgaagacgtgaaaccgctgcacaacctcggcgcagacggcatcgggctgttccgcagcgagtttctttacctgaaccgcgatacgatgccgtctgaagacgagcagtacgaagtgtacagcgcgattgtcaaaaaaatgaagggcaaaagcgtaacgatacggacagtcgatttgggcgtggataaaaacccccgctggttcgggaaaaacagcacgcccaacggcagcctcaaccccgcgctgggcatgaccggcatccgcctgtgccttgccgaaccggtcatgttccgcacccagatgcgcgccatcctccgtgcggcggtacacggccctgtgcggatgatgtggccgatgattacctccgtatccgaagtgcgccagtgcctgattcatttggacaccgcccgccgccagcttgccgaacgcggcgatgccttcggtaaagtcggcatcggctgtatgattgaaattccgtctgccgcgctgaccgtcggcagtattttgaaactggtcgatttcatctccgtcggtaccaacgacctgattcaatacatcttgtccgtcgatcgcggcgacgacagcgtcagccatctctaccagcccggacatccttccgtgttgaaaatgctgcaacacgtcatccgtaccgccaaccgcatggacaaagacgtatccgtatgcggcgagatggcgggcgatacggcgtttacccgcatcctgcttggtatggggctgcgccgtttttccatgaatccgaacaacatcctgcccgtcaaaaacatcatcctgcacagcaatatcgcacagctcgaaaacgagattgccaaaatcgtccgctgcgaggacgaggaaaaggcggaaaagctgatcaaacagatgaacagcgtgtctgtcgaggaagaagccgacttcaaggggcggaaataa

SEQ ID NO: 37802 - DNA, 768 bp, Neisseria meningitidis
atgtcttcaaataaagcttcattttttacacgtctgcgccgcttgtgccgcttgacggtctggctattcaaaaccggcaaaaacctgcgcggtattgacggcggctgccccgagtcgcgcaatcgggcggtaatcgagttgggcaggggggctctgacggctttggatatcggattggaggtgggcaggcccgcacccgaacatccgaacggtgtcttggttgccgccaaccacgtgtcctggctggatattttcgcgatgagcgcggtttatccgagcagctttatcgccaagcaggaaatcaaaagctggccggtattgggcaagatggggcagaacgcgggaacggtgttcatcaaccgcaattcgcggcgcgacatcgaaccgattaaccgcgccgtctgcgaaaccttgcaacgcggtcaaaacgtcagttttttccccgaagcgcggacttcctccggactggggctcctgccgttcaaagccgcgctgttccaatccgccattgatgcgggggcaaaggttttggcggtcgcgctgcgttattatgacgaaacgggaaaaaggacggctcgtccctcatatgccgatgtcggtttgccgacctgtctgtggcgcattgtgtctatgaaaaaattaacgataaaagtcgatttcgtttgcgtggcggacgcggcggaaagcgaagaccgttatgctttaaaagataaaatcgaagaaagcatccgtgccgttgtcgccgacgatgcggatattgccgtctga

SEQ ID NO: 37803 - DNA, 1542 bp, Neisseria meningitidis
atgtttttcgataataattatcattacaatgcaataccggttcgtttgcttgtgaacattcaagatgccgactctgacggcattcagacagcgtctgaaaacaataacggcacaaggatggggtacaatcgccctatggaaaaaaacaccctatccgcccgcgcaccatccccttggctgccgcttctgctggcaattgccatttttatgcagatgttggatgcgaccattttaaataccgcactgcctgaaattgccaccgacctggacgaatcgcctctggatatgcaactggcagtcgttgcctatacgctgacggttgccctgctgattcctttgagcggttatttggcggacaggttcggaacgaaaaaagtctttttcggttcgattgccgtttttatgctcggatcggcattgtgcgccgcatcgggttcgctgtttgaattgacgctttcccgtgtcgttcagggcatcggcggttcgatgctggttccgataccgcgtctgaccatcttgcgtatgtacgacaagtccaagctgctcaacgccatcaattatgcggttatgcccgcattaatcgggccggttttagggcctttggcgggcggttatctggtcgaatacgcttcgtggcactggattttcctgctcaacctgcccatcggtctgctggggtttatattgggacgcaacatcatgcccgatgtcaaaggcaacgataccgctctggattttaaaggctatctgaccttttccgctgccgcctgcctgctactgcttgctgcagaaagcctgtcgcacgcgctgcctccgtattttgcactgttgccgctgtgcggcggactgctgtttgcacgccgttatttccgacatatgaaaaccacgtccaaaccgatttattccgccgacctgtttctgatacgcactttccgtctgggactggcaggcaatctgttcagccgtctcggcatcagctcgattccttttctgatgcccctgatgtttcaagtcgctttcggcttcggcgcaagcctgtcgggttggctggtcgcccccgtcgccctgtcttcgctgctggtcaaaccgctgattgcaccgctcatgaaacgtttcggctaccgcacggtactgctttggaacaccaagctgcttgccgccttcatcatgctgctcgccctgcctgacggaaactcgtcgctgtggatttggattttcctctcgctggcgatcggcgcgtgcaactccctgcagttttctgccatgaatacactgaccctcgccgatttgcgcccgcaacagaccggcagcggcaacagcctgatggcggtcaaccaacagcttgccatcagcatgggcattgttgtcggcgcattaatccttaaaaactggacatttctgataccggcttcttcaggtctgcattccgccttccgtatgaccctgctcagcatcggcggcatcacccttgcctcatcgctggtattcaatcggctgcacgtttcagacggcaccaacctgacacggaatacaccgtcctga

SEQ ID NO: 37804 - DNA, 876 bp, Neisseria meningitidis
atgagaatcctattgacaggctcgaaaagccaactggcacgctgcctgcgcgaccgtcttccggaagactgggaaaccattgcgacggattccgcatccctagacattaccgatgccgatgccgtctgcaacatggtcaaaagtttccaacccgacgccattgtcaacacggctgcctatactgccgtcgacaaagcggaaggcgatgcggcagcggcatttgccgtcaatgcttccgccgtttacaaccttgccttggcagcacatcgcgcccatgcccgattcatccacatctcaaccgactatatctttgacggaaaagggaaaagaccctaccaggaaagcgactttaccaacccttccaatgtatacggacaatccaaaaccgccggcgaactgctcgcactgtctgccaatcccgacagccttatcctgcggacttcttggctgtttagcgaatacggggacaactttgtccgcaccatgctgaaccttgcgcgggaacgttccccgctgtccgccgtccacaaccaaatcggctgcccgacctatgccggcgacttgtccgccgccatcatccgcctgttgcagcagtccaatcccgttcgcggcatttaccactacgtcggcggcaaatccgtatcctggtacgaatttgcccaacatattttccaagcggcatcgcaacagcagacatccttccccgttcccgaattgactgccgtttcagacaaggaatatccgaccgccgcccccaggcccgcatacagcattttggactgccgcaaaatcgaaaacgacttcagcatcaaaccgtcagactggcaaaaagcccttgcacaggtcgtttccaagctgctctctagtgggtactag

SEQ ID NO: 37805 - DNA, 870 bp, Neisseria meningitidis
ttggctgaaggtcaaaaatcagccgtcaccgagtattacctgaatcacggcatatggccaaaaaacaatacttctgccggcgtggcatccaccccctccgacatcaaaggcaaatatgttcagaaagttgaagtcgcaaaaggcgtcattaccgccacaatgctttcaagcggcgtaaacaaagaaatccaaggcaaagaactctccctgtgggccaagcgtcaagacggttcggtaaaatggttctgcggacagccggttacgcgcaacgacaccgccaaagacgacgttgccgccgacaacgacgccaccaagaagatcgacaccaagcacctgccgtcaacctgccgcgacgcagcatctgccgtttgcacaaaaacacccgagtattacctgaatcacggcaaatggcctgacggcaacagtaatgccggcgtggcatcttcttcaacaatcaaaggcaaatatgttgagaaagttgaagtcgcaaaaggcgtcattaccgccacaatgctttcaaccggcgtaaacaacgaaatcaaagacaaaaaactctccctgtgggccaagcgtcaagacggttcggtaaaatggttctgcggacagccggttacgcgcaacgccaaagccgccaacgccgacgacgtcgccgccgacgacaccaacaaaatcgacaccaagcacctgccgtcaacctgccgcgacgcatcatctgccagccgtacaaaaacacccggtttcgctttcaaatacttccaaaaaatcagccgttaccgagtattgcccgaatcacggcaaatgactaaaaaacttcgtcattcccgcgcaggcgggaatctaggtttgtcggcgcagaaacttatcgggtaa

SEQ ID NO: 37806 - DNA, 717 bp, Neisseria meningitidis
atgaactttgaaaacgacgacattatccatgcgccgaccacgtcttccctgattctcgaagagcggcacgattcggagctgttccgtgtttacgccctgattttggacggcattaccgatcaggtgctgctgcccggcaaaaagctgaccgagtccgaactttgccgccagatggtgtgttcgcgcaacaccgtccgcggcgcgctgtcgcttttggcgcacgacaagattgtcgatttgcaacccaacaggggcgcgttcgtccacgttcccgatttgaaagaaatgcaggatgtgttcaatgcgcgcatcgaaatggagacgatgattttgaatatcctcgccggcctgccggatttggaaacgcgcctcaagccgctttatgcgatgataaggcgcgaagaagaggcttccggcaggggcgaccgcgtcggctggaaccgcctgtccaatgccttccacgtcgaactggcgcgcctggtgggcaacgatgtgctgttcgacattatgaacacgctgtgcgcgcggtcttccctgattgtcgccgtggcgggcgtgcatcgcgaggaaaaacacgccatcaatacgcatacgcattccgaacaccgcgaaatcctcgacctgctgctggcgggcaggcgcaaccgcgtggtcaaaatcctgcgccgccatttgggcaactgtatggaacgcttggaaaagactttggaagattga

SEQ ID NO: 37807 - DNA, 591 bp, Neisseria meningitidis
atgaaaaaatcctccctcatcagcgcattgggcatcggtattttgagcatcggcatggcatttgccgctcctgccgacgcggtaaaccaaatccgtcaaaacgccactcaagtattgagcatcttaaaaagcggtgatgccaacaccgcccgccaaaaagccgaagcctatgcgattccctatttcgatttccaacgtatgaccgcattggcggtcggcaacccttggcgcaccgcgtccgacgcgcaaaaacaagcgttggccaaagaatttcaaaccctgctgatccgcacctattccggcacgatgctgaaattaaaaaacgccaacgtcaacgtcaaagacaatcccatcgtcaataaaggcggcaaagaaatcatcgtccgcgccgaagtcggcgtacccgggcaaaaacccgtcaacatggacttcaccacctaccaaagcggtggtaaataccgtacctacaacgtcgccatcgaaggcgcgagcctggttaccgtgtaccgcaaccaattcggcgaaatcatcaaagcgaaaggcgtggacggactgattgccgagttgaaggctaaaaacggcagcaagtaa

SEQ ID NO: 37808 - DNA, 885 bp, Neisseria meningitidis
gtggtcggtaacggcaaaaaatatgccgcaccattgctggtgctgggttgcgtggtgttcggtctgggcagtctgattgtcagatccgtccccgtcggttcgtatgcaatcgcattttggcggttgctgatttcggtgttcgtattttggtttttagcacggtttttcgggcaaaaattcccaaaaaacaggaaaaccgtccgatatgccctgacggcgggcgtgtttctcgctttcgatttggcgttgtggcacgaaagcatacacgcggtcgggccgggtgtttccaccctgctcaacagcctgcaaatctttttcttgtcggcaatcggtgttttctttttcggcgagcgtttgagcgggctgaaaaaggcaggcttaatatcggcagttgccggtgtggcgatgattgccggtgcggaattcggctacaacggtaatgcggtttggggattcgtcagcggtttggtgtccgggctgatgcttgccctgtcgatggtgttcgtccgcaagactcatgaagtcgagccggtggcgcttttcccttcaatgatgattttgagtttaggcggcgcggtatcgttggttgttccggcattgctgatggatggcggcgcgctttatccgacgacttggaaagatgcgggtttggtgcttgtgtacggcgtggtgatgcagtgcttcgcgtgggcgatggttgcctatgcgattccgctgctttcgctgtcgctgacggggctgctgcttttgtccgaaccggttgccgccctgttcatcgattatttcggattgggcaaaccgattgaaggcgtgcagtgggcaggggtggcgctgacgctttcggcaatttatctcggttcgctgaaacagcagtcttcacattga

SEQ ID NO: 37809 - DNA, 1203 bp, Neisseria meningitidis
atgaagaactaccacgcgcccgacgagaagggctttttcggcgaacacggcgggctttatgtttccgagaccctgattcccgccttgcaagagctggcggatgcctataaggcagcgaaaaacgatcctgaattttgggcggagtttcgctgcgatttgaaacattatgtcggcaggcccagccccgtttaccacgccgcgcggttgtccgagcatttgggcggcgcgcaaatctggttgaagcgcgaagacttgaaccacaccggcgcgcacaaagtcaacaacaccatcggtcaggcactgttggcaaaacgcatgggtaaaaaacgcgtcatcgccgaaaccggcgcgggtcagcacggcgtggcgagtgccaccgttgccgcacgcttcggtatgacttgcgacgtgtatatgggcgcggacgacatccaacgccaaatgcccaacgtgttccgtatgaaattattgggcgcgaacgtggtcggtgtagaaagcggcagccgcacgctgaaagacgcgatgaacgaagccatgcgcgaatgggtcgcccgcgtggacgacacgttctacatcatcggtaccgccgccggccccgcgccgtatcccgaaatggtgcgcgatttccaatgcgtgattggcaacgaagctaaagcgcagatgcaggaagccatcggcagacagcccgacgttgccgttgcctgcgtgggcggcggatcgaacgccatcggtttgttccacccgtatatcggcgaagaaaacgtgcgcctcgtcggcgtggaggctggcggtttgggcgtgaacacccccgatcacgccgcgccgattacttcgggcgcaccgattggcgtattgcacggtttccgcagctatctgatgcaggacgaaaacggtcaggttttgggtacgcactctgtttccgcaggcttggattaccccggcatcggcccggaacacagccatctgcacgacatcaagcgcgtcgaatacactgttgccaaagacgacgaagcactcgaagcctttgacttgctctgccgcttcgagggcatcatccccgcgctcgaatccagccacgccgttgcttgggcggtgaaaaatgcgccgaaaatgggtaaagaccaagtgattttggtcaacctctcaggtcgtggcgacaaagacatcaataccgtcgcgaagctcaaagggattaaactgtaa

SEQ ID NO: 37810 - DNA, 2832 bp, Neisseria meningitidis
atgaacagaaggcatacattcccacttaccctgaccgccttggctgttgcaaccgcttttccggcttatgccgcccaagcgggggtggcggcacctgatgccgcgcagacccaatccctgaaagaggttaccgtccgtgccgccaaagtgggacggcgatcgaaagaggcgaccggtttgggcaaaatcgtcaaaacgtcggaaacgttgaacaaagaacaggtactcggtatccgcgacctgacgcgctacgatccgggcgtggcggttgtcgaacagggcaacggcgcgagcggcggctactcgatacgcggcgtggataaaaaccgtgtggcggtttcggttgacggcgttgcccaaatacaggcgtttaccgtgcagggatcgttgagcggatacggcggacgcggcggcagcggtgcaatcaacgaaatcgaatatgaaaacatcagcacggtggaaatcgacaaaggtgccggttcgtccgatcacggtagcggcgcactcggcggcgcggtcgccttccgcaccaaagaagcggcagacctgatttcagacggtaaaagctgggggatacaggcaaaaaccgcctacggcagtaaaaaccgccaatttatgaagtcgctcggcgcgggtttcagcaaagacggttgggaagggctgctaatccgtaccgaacgccaagggcgggaaacgcgcccgcacggcgatattgcggacggggtggcatacggcataaaccgtttggacgcgttccgccagacatacgatattcaaagcaaagataaaacagggcaatttttcttagtagagggcgagaatacactcaagcccgtggcaaaattggcgggcaacggaaactatttgaaaaaccagctcaaccgctgggtggaagaacgccgttcaaaaggtcaggctttaaacagtgaagaagaagcgatggtgcgggaggcgcaggcgcgccacgaaaacctgtccgcccaatcgtacacgggcggcggcaggatattgcccgatccgatggattaccgcagcggctcttggcttgccaagctgggctaccgcttcggcggcagacattatgtcggcggcgtgtttgaggataccaaacagcgttacgacatccgcgatatgacggaaaaacagtattacggtacggacgagtcgaaaaagtttagcaacaagagcggggtgtacgacggcaacgattttcgcgacggcttgtattttgtgccgaatatagaagagtggaagggcgatacaaatttggtcaagggcataggtttgaaatattcccgcaccaaatttattgacgaacatcaccgccgccgccgtatgggtttgctgtatcgttatgaaaatgagaaatactcggacaactgggcggataaggcggtgttgtcgtttgacaaacagggcgtggcaaccgacaacaacacgctgaagctgaattgcgccgtgtatcctgctgtggacaaatcctgccgcgcgtcggcagacaaaccgtattcctacgacagcagcgaccgtttccactaccgcgaacagcacaatgttttgaatgcctcgtttgaaaaatccctgaaaaacaaatggacgaaacaccatctgactttgggcttcggttacgatgcttccaaagcgatctcccgccccgaacagctttcccacaatgcggcaaggatttcggaatactcggattacaccgataagggagacaagtatcttttgggtaagcccgaagtcgtcgaagggtcggtctgcggctacatcgaaaccctgcgttcccgcaaatgcgtgccaagaaaaatcaacggcagcaatatccacatttctttgaacgatcgtttttcaatcggcaaatatttcgatttcagcttgggcggcaggtatgaccggaaaaacttcaccacgtcggaagaactcgtccgcagcggacggtatgttgatcgttcgtggaacagcggcatcgtgttcaaaccgaaccggcatttttctttgtcttaccgcgcctccagcggcttcagaacgccttcattccaagaacttttcgggatagacatttatcacgattatccgaaaggctggcagcgtcccgccctgaaatcggaaaaggcagccaaccgcgaaatcggtttgcagtggaaaggcgacttcggctttttggaaatcagcagcttccgcaaccgctataccgatatgattgccgttgccgatcacaaaacccaattgccgaatcaggcaggacaattgacagagattgatatacgcgattattacaatgcccaaaatatgtcgctccaaggcgttaatatattgggaaaaatcgactggaacggtgtgtacggcaaactgcccgaaggtttgtacaccacattggcgtacaaccgtatcaaaccgaaatcggtatccaaccggccgggactgtccctccgcagctatgctttggatgcggtacagccgtcgcgttatgttttggggttcggatacgaccagccagaggggaaatggggcgcaaacattatgctgacctattccaaagggaaaaaccctgacgagcttgcttatctggcaggcgatcaaaaacgatattcgacaaaaagagcgtcgtcttcttggtcgacggcagacgtttccgcctatctgaatctgaaaaaacggctgaccttgagggcggctatctacaatatcggcaactaccgctacgttacttgggaatccttgcgccagactgcggaaagcacggcaaaccggcacggcggcgacagcaactatggaaggtatgccgcaccgggcaggaacttcagcctcgcgctcgaaatgaagttttaa

SEQ ID NO: 37811 - DNA, 372 bp, Neisseria meningitidis
atgctttttgtgggttttttagaaagaattaagcaagagcttgatttaaaaaaggataaggatgtcgctgaatttttaggactagagccgaaagcgttctcaattcgaaaaaaacgcgactcgataccagtagatgcagtacgcgcagcagcatttgaacatccggaattaaatgctgattggggatatatcttgactggacggcgagaaaaatcagtaaaaatgccatctgaaaaattaaacaaagaagagcaggagctgctggccttgttccgcgaagcggcagctgccgaccgtgaaatgattctgatggttgcgcgcagggcagagaaaaaagcccaagctgcgcttggtaaagtgagcaatggataa

SEQ ID NO: 37812 - DNA, 483 bp, Neisseria meningitidis
atgagaaaaagtcgtctaagccggtataaacaaaataaactcattgagctatttgtcgcaggtgtaactgcaagaacggcagcagagttagtaggcattaataaaaataccgcagcctattattttcatcgtttacgattacttatttatcaaaacagtccgcatttggaaatgtttgatggcgaagtagaagcagatgaaagttattttggcggacaacgcaaaggcaaacgcggtcgcggcgctgccggtaaagtcgccgtattcggtcttttgaagcgaaatggtaaggtttatacggttacagtaccgaatactcaaaccgctactttatttcctattatccgtgaacaagtgaaacctgacagcattgtttatacggattgttatcgtagctatgatgtattagatgtgcgcgaatttagccattttagcttcgctgaaacttcgttttcgtatcaatcacagcacacattttgctga

SEQ ID NO: 37813 - DNA, 1806 bp, Neisseria meningitidis
atgcgctacaaaccccttctgcttgccctgatgctcgttttttccacgcccgccgttgccgcccacgacgcggcacacaaccgttccgccgaagtgaaaaaacagacgaagaacaaaaaagaacagcccgaagcggcggaaggcaaaaaagaaaaaggcaaaaatggcgcagtgaaagataaaaaaacaggcggcaaagaggcggcaaaagagggcaaagagtccaaaaaaaccgccaaaaaccgcaaagaagcagagaaggaggcgacatccaggcagtctgcgcgcaaaggacgcgaaggggataagaaatcgaaggcggaacacaaaaaggcacatggcaagtccgtgtccggatccaaagaaaaaaacgcaaaaacacagcctgaaaacaaacaaggcaaaaaagaggcaaaaggacagggcaatccgcgcaagggcggcaaggcggaaaaagacactgtttctgcaaataaaaaagtccgttccgacaagaacggcaaagcagtgaaacaggacaaaaaatacagggaagagaaaaatgccaaaaccgattccgacgaattgaaagccgccgttgccgctgccaccaatgatgtcgaaaacaaaaaagccctgctcaaacaaagcgaaggaatgctgcttcatgtcagcaattccctcaaacagcttcaggaagagcgtatccgccaagagcgtatccgccaagagcgtatccgtcaggcgcgcggcaaccttgcttccgtcaacctcaaacagcgcgaggcttgggacaagttccaaaaactcaataccgagctgaaccgtttgaaaacggaagtcgccgctacgaaagcgcagatttcccgtttcgtatcggggaactataaaaacagccagccgaatgcggttgccctgttcctgaaaaacgccgaaccgggtcagaaaaaccgctttttgcgttatacgcgttatgtaaacgcctccaatcgggaagttgtcaaggatttggaaaaacagcagaaggctttggcggtacaagagcagaaaatcaacaatgagcttgcccgtttgaagaaaattcaggcaaacgtgcaatctctgctgaaaaaacagggtgtaaccgatgcggcggaacagacggaaagccgcagacagaatgccaaaatcgccaaagatgcccgaaaactgctggaacagaaagggaacgagcagcagctgaacaagctcttgagcaatttggagaagaaaaaggccgaacaccgcattcaggatgcggaagcaaaaagaaaattggctgaagccagactggcggcagccgaaaaagccagaaaagaagcggcgcagcagaaggctgaagcacgacgtgcggaaatgtccaacctgaccgccgaagacaggaacatccaagcgccttcggttatgggtatcggcagtgccgacggtttcagccgcatgcaaggacgtttgaaaaaaccggttgacggtgtgccgaccggacttttcgggcagaaccggagcggcggcgatgtttggaaaggcgtgttctattccactgcaccggcaacggttgaaagcattgcgccgggaacggtaagctatgcggacgagttggacggctacggcaaagtggtcgtggtcgatcacggcgagaactacatcagcatctatgccggtttgagcgaaatttccgtcggcaagggttatatggtcgcggcaggaagcaaaatcggctcgagcgggtcgctgccggacggggaagaggggctttacctgcaaatacgttatcaaggtcaggtattgaacccttcgagctggatacgttga

SEQ ID NO: 37814 - DNA, 1926 bp, Neisseria meningitidis
ttgagaatttgtatcatgaatatattatctgtagaaaacgcttcttttgccatcggccacgttgccttgctcgacaaaacttcttttcaactcgacagcggcgaaaaagtcggcttgatcggacgcaacggcgcaggcaagtcttcgtttttaaaaatcctcgccggtgtgcaaaagctcgacgacgggcagattattgttcaaaacaacctcaaaatcgtttatgtaccgcaggaatccttttttgataaggacgcaaccgtatttgataccgttgccgaaggtttgggcgaaattcgtgatttattgcgccgttatcatcatgtcagccatgagttggaaaatggttcgagtgaggctttgttgaaagaactcaacgaattacaacttgaaatcgaagcgaaggatggctggaagctggatgcggcagtcaagcagactttgggggaactcagtttgccggaaaatgaaaaaatcggcaacctttccggcggtcagaaaaagcgtgtcgccttggcgcaggcttgggtgcagaagcccgacgtattgctgctggacgaaccgaccaaccatttggatattgacgcgattatctggttggaaaacctgctcaaggcgtttgaaggcagcttggccgtgattacccacgaccgccgttttttggataatatcgctacgcggattgtcgaacttgaccgcggcattctacgttcctatcccggctcgttctctaaatacagtgagaaaaaagcgcaagagttggcagtcgaggcggaacataaccgcttgtttgacaaatttcatgctcaggaagaagcgtggatacgcaaaggcatcgaagcgcgccgtacccgtaacgaaggacgcgtgcgccgtttggaagagctgcgccgccaacgtgcagaacgccgcaacgtgcagggacaggtcaactttaagctcgatagcggtgagaaaagcggcaaaatcatcgccgaattggaacacgcttcgtttgcctatggcggcaaagtcattatggacaaattctccgccatcttgcagcgtggcgacaaaatcggcttaatcggcccaaacggtatcggcaaaaccaccttcctcaagctgattttgggcgaattgcagccgacctacggcagaatccgtatcggcagcaagcaggaagtcgcctatttcgaccagttccgcagcgcgttgaatgaaaacgacaccgtgttttacacgctcggacagggcaatgattacgttgaagtcggcggtaagaaaaagcatgtgatgagctatttggaagatttcctgttcccccctgcccgcgcgcaaagtcctgtttcttcactctccggcggcgaacgcaaccgccttttgctggcaaaactctttacccgtcccgccaatattttggtcttggacgaaccgaccaatgacttggacatcgacacccaagagctgctcgaagacctgttgcgcgattatcaaggcacggtattccttgtctcgcacgaccgtatgttcctcgataacgtgattacccaaagccttgtttttgaaggaaatggaaggttaaaagaatatatcggcggctatcaggactacatcgacgcaaaatcacgcgaagcgaagattcagacggaatccgcacccaaaacagccgatgccgaaccggtgaaagaaaaacccaaagccaaccgcacggtcaaactgtcctacaaagaacagcgagaactcgatgccctgcccgacgaaatcgccgccttggaagccgaacaggcagaaatcaacgcgcagctttccgatcccgaaatcttcaaagattacgaaaaagccggcgcactgcaaagccgcgccgaagaaatcgaaatgctgcttttggaaaagctggaacgctgggagctgctggaaaccaaacagaacggcaatgccgtctga

SEQ ID NO: 37815 - DNA, 1011 bp, Neisseria meningitidis
atgaacgacaacacgcaaacccttcccccacgccgcctgtccgtcgccccgatgctcgactggacggacaggcactaccgttatatggcgcgccagattacccgaaatacttggctttacagcgaaatggtcaatgccggtgcgattgtttacggcgacaaagaccgctttttgatgtttaacgaaggcgagcagcccgtcgccctgcaactgggcggcagcgatccgtccgatttggcgaaagccgccaaagctgccgaagcatacggctacaacgaggtcaacctcaactgcggctgccccagtccgcgcgtgcagaaaggcgcgttcggcgcgtgtctgatgaacgaagtcgggctggttgccgactgcctcaacgcgatgcaggacgcggtcggcattcccgttaccgtcaaacaccgcatcggtgtggacaggcagaccgaataccaaaccgttgccgatttcgtcggcacgctgcgtgacaaaaccgcctgcaaaacctttatcgtccacgcccgcaacgcatggctggacggactttcccccaaagaaaaccgcgatgttccgcccttgaaatacgattacgtttaccgtcttaagcaggagtttcccgagctggaaatcatcatcaacggcggcgtcaccaccaacgaagcaatcgccggacacctgcaacacgttgacggcgtgatggtcgggcgcgaggcgtaccacaacccgatggtgatgcgcgaatgggacaggctgttttacggcgatacccgcagcccgattgaatacgccgatttggtgcagcgtctctacacatacagccaagcccaaatccaagccggacgcggcacaatcttgcgtcacatcgtccgccacagccttgggctgatgcacggtctgaaaggcgcgcggacttggcggcgtatgctttccgacgcaacgctcttgaaagacaacgacggcagcctgattctcgaagcatggaaagaggttgagtgggcaaatacgcgtgaatag

SEQ ID NO: 37816 - DNA, 423 bp, Neisseria meningitidis
atgaatttggaacagttgggcaggcgggacgcgctgctttccggacttttgaaacaggcgggacagtggcggcggttggatgccgccgtgaaaaaactgctgcctgccaacctgcacccgcattttcagacggcatgtatcgaagacggcaggcttgtccttttggcggcaaacaatatggcggcatcgcgcttgaaaatgattgcaccgtcggtattgccgcagttggcagggcttgacgcttcgatacgctctgtttcggtcaggctggtcccgaaaccggaaaaaccgccgaaaaccaataccctgcatttgagtaaggctgcgctggagagtttcggttcggcggcggtaaagttggaaaaacggcatcccgaattggcggaggcattggcaaacttggttagaaggcatggcgcataa

SEQ ID NO: 37817 - DNA, 519 bp, Neisseria meningitidis
atgcccaagctccatatgttttacctcggcggcaatgccggcaggtcgaatatcgaagtgcacgacatccaatttgccgtgtgcgacgactaccgtgaagccgtccccgcactcaaagccgcgtggttcggcgatgcggacaaaatccacatcgacggctggcagattgtcgaatgggcggacggttacgacatcgccgtatccgaaacgcccaaaacgaaaatgccgtctgaacacgccccgcgcctgtattttgccaatgtcggcggttatcgcgcagggcagctcgccgaagcgcacgcttttgggctgttcgccgccgccacgcctgccgaagccaaacaaaaagccctgcaaaccctgttgaccgacagctatgttcagcaacataaagacaacttaaaagacgtggacaacctgcttgcgctcgaccgcatcggcaatttccatatccgcctgaccccgaatccgcacggcaaacccgccgaaatcggctttcaaggctatttgcccatttga

SEQ ID NO: 37818 - DNA, 894 bp, Neisseria meningitidis
atgattgccaaacacatcgaccgtttcccgctattgaagctagatcaagtgattgattggcaaccgatcgaacaatacctgaaccgtcaaagaatccgttacctccgagaccaccgcggccgtcccgcctaccccctgctgtccatgttcaaagccgtcctgctcggacaatggcacagcctctccgatcccgaactcgaacacagcctcatcacccgcatcgatttcaacctgttttgccgctttgacgaactgagcatccccgattacagtactttatgccgttaccgcaactggctggcgcaagacgacaccctgtccgaattgctggaactgattaaccgccaactgaccgaaaaaggtttaaaaatagagaaagcatccgccgccgtcgttgatgccaccattattcagaccgccggcagcacacagcgtcaggccatagaagtcgatgaagaaggacaaatcaacggccaaaccacaccgagtaaggacaaagatgcccgttggatcaagaaaaacggcctctacaaactcggttacaaacaacatacccgtaccgatgcagaaggctatatcgagaaactgcacattacccccgccaatgcccatgagtgcaaccacctgtcgcctttgctggaagggatagccgacggtacgaccgtctatgccgacaaaggctatgacagtgcggaaaaccggcaacatctgaaagaacatcagttgcaggacggcattatgcgcaaagcctgccgcaaccgtccgctgacggaagtgcaaaccaaacgcaaccgatatttgtcgaagacccgttatgtggtcgaacaaagcttcggtacgctgcaccgtaagttccgctatgcgcgggcagcctatttcggactgattaagtga

SEQ ID NO: 37819 - DNA, 747 bp, Neisseria meningitidis
atgaacgttttgatttccaacgacgacggctacctctccgaaggcatcgccgttttggcgcgcgttacggcggaatttgccaacgtcagggtggtcgcgcccgaacgcgacaggagcggggtcagcaattcgctgacgctggaacgccctttgcagttgaaacaggcgcaaaacgggttctactatgtcaacggcacgccgaccgactgcatccacatcgggcagtctgtattttcggattttcaggccgattttgtcttttcgggcatcaaccggggcgcgaatatgggggacgacacgctttattcggggacggttgcggcggcaaccgaagcctaccttatgggcatacccgccgtggcgttttccttaaacgacgcttccggacgctattgggcgaccgcagaacaggcactgtggacattgttggcgcattttttcaaaacccccccgcagtcccctattttatggaacatcaatatccccgccgtcgcgccggaagatgtgcggggcattaaaatcgcccgtttgggcaggagacaccacggtcagaacgtcatccccgcgcgcaatccgcgcggcgaacagatttattggatagggccggtcggcgaagtttccgatcgggaagagggaacggatttcggtgaatgcggcgcaggtttcattaccgtaacgccgctgcaaatcgacctgaccgcctatccggacatggcggaaacagcggcgttctggcatgcggactga

SEQ ID NO: 37820 - DNA, 1146 bp, Neisseria meningitidis
atgaccgaaacccaatccctagaactagccaaagcgttgatttcccgcccatccgttacccccgacgaccgagattgccaaaaactgcttgtcgaacgcctgtacaaaatcggttttgcggctgaagaactccatttcggcgacaccaaaaacatctggttgcgacgcggcacgaaagttcccgtcgtctgttttgcagggcataccgacgttgtaccgacaggccctgttgaaaaatgggattcgcccccgttcgagccgaccgaacgcgacggaagattatacgggcgcggcgcggcggacatgaaaaccagcatcgcctgcttcgttaccgcctgtgaacgcttcgttgccgaacatcccgaccaccaaggcagcattgcgcttctgattacttccgacgaagagggcgacgcgttggacggcacgaccaaagtcgtcgatgtattgaaagcgcgcggcgagttgattgactactgcatcgtcggcgaaccgacagccgtggacaaattgggcgatatgattaaaaacggccggcgcggctcgctgtcgggcaacctgaccgtcaaaggcaagcaaggccatattgcctatccgcatttggcaatcaatcccgtgcatacttttgccccggccttgttagagctgacgcaggaagtctgggacgaaggcaacaaatacttcccgccgaccagctttcaaatttccaatatcaacggcggtacaggcgcgaccaacgtcattccgggcgagctgaatgtcaaattcaatttccgcttctccaccgagtccaccgaagcagggctgaaacaacgcgttcacgccattttggacaaacacggcgtgcaatacgatttacagtggtcgtgttcggggcagccctttctgacccaagcgggcaaactgaccgacgtggcacgcgcagccattgccgaaacctgcggcattgaggccgaattgtccaccaccggcggcacttcggacggacgcttcatcaaagccattgcaaaagaactcatcgaattaggcccgtccaatgccaccatccaccaaatcaacgaaaacgtgcggctaaacgacattccgaagctgtctgcggtgtatgaggggatattggcgcgcttgttggctggaaatgccgtctga

SEQ ID NO: 37821 - DNA, 438 bp, Neisseria meningitidis
atgccgcgctgggttgatgaggccgtcgccgaatacgccaaacgcttcggacgcgacgtcgcctacgcactcaaagaaatcaaacccgaaaaacgcggcgcgggcgtgaatgccgcccaaggtatggcggcggaagaaaaacgcatcctcgaagccataccgcaaggcgcgttcctcgtcgtccttgacgaacgcggcaaagcaccgacctccgtcgagctggcggaacacctcaaaacttggcagcaaaacggcgaacacgtctgcttcgtcatcggcggcgcggacggaatgaccgaccgcctcaaacaacaagcccgcataatgatgcgcctgtccagcctgaccctgccgcacgggatggtgcgcgtccttctgaccgagcagctctaccgcgccgcctccatcctgcacaaccatccctatcatcgggaataa

SEQ ID NO: 37822 - DNA, 399 bp, Neisseria meningitidis; identical to SEQ ID NO: 36560

SEQ ID NO: 37823 - DNA, 780 bp, Neisseria meningitidis
atgaaaaccatcacagaaaccctaaatcttgccccgaaaggcaaaaacttcctgaccgccgattggcccgcgcccgccaatgtgaaaaccctgattaccacgcgcaacggcggcgtgagccaaggtgcgtatcagagtttgaacctcggtacgcacgtcggcgacaatcccgaagccgtgcgccgcaaccgcgaaatcgtgcaacagcaggtcggactgcccgttgcctacctcaatcaaatccacagcaccgtcgtcgtcaatgctgccgaagcgttaggcggcacacccgatgcggacgcttccgtagacgacacgggcaaggttgcctgtgccgtgatgaccgcagactgcctgcccgttctattttgcgacagggcgggtacggcggttgccgccgcacacgcgggctggcgcggtttggcgggcggcgtactgcaaaacaccatagccgcaatgaaggttccgcccgtcgaaatgatggcgtatctcggccccgccatcagtgcggatgcgtttgaagtcggacaggatgtgtttgatgcgttctgcacgcccatgcccgaagccgccaccgcatttgaaggcataggcagcggcaaattccttgccgacctttacgcgctcgcccgcctgattctgaagcgcgaaggcgtgggcggcgtatacggcggcacgcattgtacggttttggaacgggatactttcttttcctaccgccgcgacggagcgacagggcgtatggcgagcctgatttggctggacggcaatgccgtctga

SEQ ID NO: 37824 - DNA, 657 bp, Neisseria meningitidis
gtgaacaaacggctgttttgcagccgcaacggcttgcgctattacctgttgggcggtttctgtttgagtgtttttccgcttttgctggtgtttgcctcatccgtttgggcggtttatcggacgggcgggcaggttttgccgccgtatgtccgggcggatgccgcgctggtgttgggcgccgccgcgtgggacaaacgcccttccccggttttccgcgaacgcatcaaccacgccatcgcgctttatcagagccgcagggtaggcaaaatcgtgtttacgggaggacgaaccaaaaaaggctatatgaccgaagccgaggtcgggcggcggtacgcgctcaaacagggggttccggcgcgcaacatcctgtttgaaaacacttcgcgcaacacttatgaaaacctgaacaacatccgtccggttttgcgtgccaacggtattgccagcgtggtgattgtcagcgatccctaccatttggcgcgggcggcggaaatggcggaggatttgggtgtccgcgtttatatgtctgccaccccgaccacgcggtttgatgcgggaaataagaaaaaaatctttatgctgcaagagggatatgcgttatccctctaccgtttggaaaaatggggcagccgctttttgggatggctgtctgattga

SEQ ID NO: 37825 - DNA, 618 bp, Neisseria meningitidis
atgagccacaaaaaacaagatgccttccaaggattgatcgacgcgctgaaggttttacccaacgtcgggccgaaatcggcacagcggatagcgtatcatttgctccaacacaagcgcaaagaggctgaaaaactggtggatgccttgcagacggcattgaagcaggttcaccattgcgcgatgtgcaacacgttttgcgaaggcggattgtgcgatatttgtgccgatgaaacacgcgacgggcggcggctgatggtggtgcatatgcctgccgacgtgtcgaatatggaagcggcaaactgccacgacgggctgtatttcgtcctgatggggcaaatcaatacggcattgggaatggacgtatccgccatcgcattggacaggctggcgcaacggctgggcggcggggaagtcgaagaaatcattattgcaaccgcttttaccgcagaaggcaatgcgacggcgtatgtcctgtccgagttttttaaaaacctgccttacaaagtcagcaggctgtcgcagggcatccccttgggcggcgaattggaatatgtcgatgcgggaacgctggcgcaggcggtgtacgaacgccgcctgattaaagaaggcggggcataa

SEQ ID NO: 37826 - DNA, 999 bp, Neisseria meningitidis
gtggcggcacatatcggacacattgatacggacgcgcctttgaaacccctgtacgtcatccacggcgaggaagaactgttgcgtatcgaggcattggacgcattgagggcggcggcgaagaaacaaggttaccttaatcgggaagtttatacggcagacaatgccttcgattggaacgagctgctgcaaaccgcaggcagtgcgggtctgtttgccgatttgaagctgttggaactgcatatccccaacggaaaacccagcaaaaccggcggcgaggcgttgcaggattttgccgcccgcctgccggaagatacggtaacgctggttttactgcccaaactggagaaaacccagctccagtccaaatggtttgccgcattggcggcaaagggggaagtgtgggaagccaaaccggtcggcgcggcggctttgccccaatggatacgcggacggctggacaaaatcgatttgggtatcgaggcagacgcattggcactgtttgccgagcgcgtggaaggcaatctgttggcggcgcgtcaggaaatcgacaagctcgcgctgctgtatccgaaagggcataccgtcaatatcgatgaggcgcaaaccgccgtcgccaacgtcgcccgctttgacgcgttccaactggcaggcgcgtggatgaagggcgatgtcccgcgcgtatgcagattgttggacggattgcaggaggaaggcgaagaaccggtgctgttgctgtgggcggttgccgaagacgtgcggacgctgatccggcttgccgccgccttgaagcaggggcagagtgtccaatccgtacgcaacagtctcaggctttggggcgacaagcagacgctcgcaccgcttgcagtcaagcggatttccgtcgtccgcctgcttgacgcgctcaaaacctgcgcccaaatcgaccgaatcatcaaaggtgcggaagacggcgacgcatggacggtattcaaacggcttgtcgtgtcgctggcggaataa

SEQ ID NO: 37827 - DNA, 720 bp, Neisseria meningitidis
atgctgaccacaccgccgctcgcccccaaaaccgtcgccgccctgcacaggctcggtatccgtacgctcgaagaactgcggcaaaacggttcggtcaaagcctttctgctgctcaaagcatcgggtttgaccctcacgaaaagcacactgtggcagcttcagtcgctgctggacgacacgctgccgcaagaaatgtcccaagcgcataaagcccgccttcttgccgaattgaaaaaccatccgcccgtcgccgccttcccatcgcaggaagaaatggaacacttcatgcgcgaagcactgcgccaagcagaacaatccgccgccgacggcgaaatacccgtcggggcagtcattgtttcagacggcaaaatcatcgcatcggcacacaacacctgcattgccgactgcaatgtcagccgacacgccgaaatcaacgccttggcacaggcaggcagagaaatacaaaactaccgccttgacggatgcgacatatatatcaccctcgaaccctgcgccatgtgcgcgtccgcactgatacaggcacgaatcaggcgtgtgatatatggtgcggcagaacccaaaaccggcgcggcaggcagcattgtcaacctgtttgccgacaaacgcctcaatacgcacaccgccatacggggcggaatcctgcaagaagaatgccgcgccgtattaagccgtttttttcagaacaaaagaaaaggttga

SEQ ID NO: 37828 - DNA, 942 bp, Neisseria meningitidis
atggcaatccaatggtttcccggccatatgaacaaagcgaaaaaagccatcgccgagcgcgccaaaagcgtagacatggtgattgaaatgctggatgcgcgaatgcccgcctccagcgaaaaccccctgcttgcccaactttccaaaggcaaacctaaacttaaaatcctcaacaaacaagatcttgccgaccccgagcgcaccaaaatctggctcgaacactataacagccgccccgacacctgcgccatcgccctcgattcctccgaaacaggcgcacacggcaaaattacccaagcctgtcgtgccatgattccccaccgccaaggcatagataaacccctgcgcgtcctcatctgcggcatccccaacgttggcaagtccaccctcatcaacggcatgataggcaaaaaatccgccaaaaccggcaacgaacccggcatcaccaaagccgaacaacgcctcttcctcgccgatgacttctggctctacgacacccccggaatgctgtggccgaaaatcatcgtcgaagaaggcggctacaaccttgccgccggcggcgcagtcggacgcaacgcgttggacgaagaagaagtcgccctcgaacttttagactacctccgccgccactacctccctatgttgcaagaacgctaccaagccgacaaagaccccagcagccactgggacgaaaacgtttggctcgaatggatagccaaaaaacgcggcgcagtcctcagcggcggacggatcaactaccaaaaagccgccgaaaacatcctcaccgacttccgtgaaggcaaaatcggcagaatcaccctcgaaacgccgaaccaatgggaaacttggctcaaaaaagcccgtcagaaagaagccgaactcaaagccatacgcgaagccagaaaagcagagcgtaaagggcagaagccttcggaagcataa

SEQ ID NO: 37829 - DNA, 435 bp, Neisseria meningitidis
atgaacgaattgctgtccggtgagctggcagcacgcgaccaatacttcatccactcccgtctctactccgaatggggctacaccaaactttttgaacgtctcaatcacgagatggaagaagaaaccacacacgccgaagactttatccgccgcatcctgatgctgggcggtacgccgaaaatggtacgcgccgaactgaatatcggcacggacgtggtttcctgcctcaaagccgacctgcaaaccgaatatgaagtacgtgatgcgttgaaaaaaggcatcaaactgtgcgaagaggctcaagactatgttacgcgcgacctgatggttgcccaactgaaagataccgaagaagaccacgcacactggttggaacagcagctgcgcctgatcgagctgattggcgaaggcaactactaccaaagccaactgtaa

SEQ ID NO: 37830 - DNA, 198 bp, Neisseria meningitidis
ttggaacacattgcgcggggaatgtgcgcggctattatggcatattttggcggctttgttcgcgctttgttcgatcttggcgtgtttgaacgcggcggcgtgaaaggaagggagaaatggttttcccgcgtttggcggcggtcggaggtgctgtgcctgatgtgcggcggcatattttcggtgaaattgattttatag

SEQ ID NO: 37831 - DNA, 1092 bp, Neisseria meningitidis
atgagtttgaaatgcggcatcgtcggtttgcccaacgtcggcaaatccaccctctttaacgcgctgacccagtcgggtatcgaagcggcaaactatcctttctgtaccatcgaacccaacgtcggcatcgtcgaagtgcccgacccgcgtatggctgaattggcaaaaatcgtcaatccgcaaaaaatgcagcccgccatcgtcgaatttgtcgatatcgccggtttggttgcaggcgcgagcaaaggcgagggcttgggcaaccagttcctcgccaacatccgcgagactgacgcgattgttaacgtcgtacgctgctttgacgacgacaacatcgtccacgtttccggcaaagtcgatccgattgccgacatcgaaaccatcggtacagagttggcgcttgccgacttggcaagtgtggaaaaagccatcgtccgcgaagaaaaacgcgcccgttcaggcgacaaagacgcgcaaaagctggtcgatttgtgcaaaaaactgctgccgcatctggacgaaggcaaacccgtgcgttccttcggtttggacgcggaagaacgcgcgatgctcaaaccgctgttcctgctgaccgccaaaccggcgatgtatgtgggcaacgtcgccgaagacggttttgaaaacaatccgcacctcgaacgcctgaaagaattggcggcaaaagaaaacgcccccgtcgtcgccgtttgcgccgcaatggaaagcgaaatcgccgaattggaagacgacgaaaaagccgagttcctcgccgaaatgggcttggaagaaccgggcctgaaccgcctgatccgtgccggctacgaccttttggggctgcaaacctactttaccgccggcgtgaaagaagtccgcgcttggacgatacacaaaggcgacaccgccccgcaagccgccggcgtgattcacaccgactttgagcgcggcttcatccgcgcccaagtcatttcttacgacgactttgtctcgctcggcggcgaagccaaagccaaagaagccggcaaaatgcgtgtggaaggcaaggaatacgtcgtgcaggatggggatgtgatgcactttttgtttaacgtgtaa

SEQ ID NO: 37832 - DNA, 537 bp, Neisseria meningitidis
atgagagaaaataaaattattttcacaggacctgtcggcgtagggaaaaccactgccattgcggctatttcggacgaagcactcgttcagaccgatgcttccgcatccgatatgactttggataggaaaaggaatacgacagtggcgatggactacggggccatcagcttggatgaggataccaaagtccatttatatggtacgcccggtcaggaacggttcaactttatgtgggaaatcttaagccaaggcagtatgggtttggtcttgcttttagataatgcccgaaccaatccgttgaaagatttggaattctttttacattcgtttcgagggctgctggagaaggcacccgtcgttgtcggtattaccaagatggatatacgctctcagcccggtatcgacgtgtatcacaaatatcttgcaaaacataatcttaatgttccggtttttgaaattgatgcccgtaaggaagatgacgtaaaacaattggttagcgcaatgttattttctattgatccgggactggaggtttaa

SEQ ID NO: 37833 - DNA, 1218 bp, Neisseria meningitidis
gtgggcggcacgccggtagatgcgcaaaccggaggtgcggtcggacagaatgcggtggaaaacaacctctatctgacatcggaagccttaaagaaggacaagcagacagctcgtaaaatttattccgtcataaaagagcaagtcaagcatgaatgcagttccacaggaagaattaccgaatgtcgtcaaaatataggacgcattatcgaatttacccaagacaaacgctttgacagtaggtttaaggacttaaaaaaagaatccttatattacctaaataaacatcctgatttagtagcctcttatttgaaggctgaatacgaaaagctggatagggaagacaaaagtatcctgcaccgctacatctcacccggggctgaaatcgtttcgggcagtttgggggttgttctttcaggagtagccggaggcggatcttgtgccgagactttcggcttaggctgtgccgccgctttggttggtgtaacgtcttcctacgatcatgtcattactgggacgaaaaacttcggaaaaaaagccagcgagcaacgaccgacgattgcggttcaggccttgaagcagttggggctgtcggagcaggctgcggaatatgttcagttctctatagatttgttcagtgtgggtaaatcggggggcggtatacctaaggctaagcctgtgtttgatgcgaaaccgagatgggaggttgataggaagcttaataaattgacaactcgtgagcaggtggagaaaaatgttcaggaaacgagaagaaggagtcagagtagtcagtttaaagcccatgcgcaacgagaatgggaaaataaaacagggttagattttaatcattttataggtggtgatatcaataagaaaggcacagtaacaggagggcatagtctaacccgtggtgatgtacgggtgatacaacaaacctcggcacctgataaacatggggtttatcaagcgacagtggaaattaaaaagcctgatggaagttgggaaatgaaaaaaggaaggggcggaaaacctatgacaaatcattctatgttcccaaaagattgggatgaggctagaattagggctgaagttacttcggcttgggagaaaagaaaggaattagaaggtcaaaaatggagaggtacaagtaaatctggtgttgaaatagaaggatttacggaacctaatcgaacagcttatccactttataatagtaaatga

SEQ ID NO: 37834 - DNA, 1410 bp, Neisseria meningitidis
atgaaatacatcagcacgcgcggcgaaaccgcacacaaaccgttcagcgaagttttattgatggggcttgcacccgacggcggcctgatgctgccggaacattatccgcaaatcgggcgcgaaaccttggacaaatggcgcggtttggcttatcccgaattggcgtttgaaattatgcgcctgtttgttacggatattccggaggacgatttgcgcgacattctgaaccgtacttacacggaagcggcgttcggtactaaggaaatcacccccgtccgcacgctttcagacggcatcaaaatccaagccttgtccaacggcccgacgctggcgttcaaagatatggcaatgcagtttttgggcaatgcgtttgaatatgttttaaacaaagaaggcaaaaaactcaatatcttgggcgcgaccagcggcgatacgggttcggctgcggaatatgccttgcgcggcaaaaagggcgtgaacgtatttatgttgtcgcccgacggtaaaatgagcgcgttccaacgcgcgcaaatgtacagcctgcaagacgagaatatccacaatatcgccgtgaagggaatgtttgacgactgtcaggacattgtgaaggcggtgcaaaacgatgccgcgttcaaggaaaaataccatatcggtacggtcaattcgatcaactggggacgcatcgtcgcgcaagtggtttattactttgcaggctatttcaaagcgacgcaaagcaatgacgagcaagtcagcttctgcgtgccgagcggcaacttcggcaacgtttgcgcgggacacatcgccaaacagatgggtttgcctatccgccgcctgattgtcgcgaccaatgaaaacgatgtgttggacgagtttttcaaaaccggtgcataccgcccgcgcaacagcgcgcatacttatgttacctccagcccgtcgatggacatttccaaagcgtccaacttcgagcgtttcgtgttcgacctgatggatcgcgatcctcaggaaatcaatacgctgtgggcggaagtagcggcgggcaaaggctttgacctgcggtttgctttagaaaaagtcggtggcaaatacggttttacctccggcaaatccacccaccccgaccgcctcgccaccatcagacaggtttatgagcaagaccaagaactcatcgacccgcacactgccgacggcgtaaaagtcgcccgcgaagtgcgcgaagaaggggaaacggttgtgtgtttggaaaccgcgttggcagcgaaattcgatgcgaccatacgcgaagccgtcggcgatgccgccattccgcgccccgccgcgctggaaggtttggaaacattgccgcagcgcgtgcaaaccgtgccgaacagtgcggatgcggtaaaaggcatcatcgaacaaacccttgcctga

SEQ ID NO: 37835 - DNA, 327 bp, Neisseria meningitidis
atgagtgaggccaaatttatgaggattatcgtcttcttcgacctaccggttatcacggcggcaaagcgcaaagccgccaatcaattccgccagtttttattaaaagacggataccaaatgctgcaactttccgtatacagccgtatcgtcaaaggccgcgattcgttgcaaaaacaccacaatagactatgtgcaaaccttccgcaagaaggctcaatccgctgtttggagataacagaaaagcaatatgccgccatgaaactgctgttgggcgagctgaaaacccaagaaaaaaaggtcaattcagaccaattattgttattttaa

SEQ ID NO: 37836 - DNA, 1254 bp, Neisseria meningitidis
gtggacaaactgaaaatctccgcaaacggcccgctcaacggggaaataacggtctcgggcgcgaaaaacgcggcattgccgctgatgtgcgcgggtttgctgacatcgggtacgttgcgcctgaaaaacgtccctatgctggcagatgtgaaaaccacgcaaaagctgcttcaggggatgggcgcgcgcgtcctgactgacaatatcagcgaatttgaaatcaacggcggtacggtaaacaatacctgcgccccttacgaattggtacggacgatgcgggcctcgattttggtactggggcctactttggcacgtttcggcgaggcgcaagtcagcctgccgggcggctgcgccatcggttcgcgccccgtcgatcagcatttgaaaggcttggaagcgatgggtgctgagattgttatcgaacacggttacgtcaaagccaaaggcaaactcaaaggtacgcgcgtggcgatggatgtcgttaccgtcggcggcacggaaaacctgctgatggcggcgacgctggcggaaggtacgacggttttggaaaactgcgccattgagcctgaagtggtcgatttggcggaatgcctggtcaaaatgggcgcgaaaatcagcggcatcggtacgtccacgatggttgtggaaggcgcgggcgagctacacggctgcgaacacagcgtcgtccccgaccggattgaagcggggacgtttctgtgcgcggtggcgataaccggcggcagggtggttttgcggaatgccgccccgaaaacgatggaagtggtgttggacaaactggttgaggcaggtgcggtgattgaggcgggcgacgattggatcgccatcgatatgcggcagcgtccgaaggcggtggacatccgcacggtcgtccaccccggcttccccacggatatgcaggcgcagtttatggcattgaatgccgtggcggagggaagctgccgcgtggtggaaacgatttttgaaaaccgctttatgcacgtccccgagttgaaccggatgggggcgaacatcacaaccgagggcaatacggcatttgtgcagggtgtggaacagctttccggcgcggtcgtcaaggcgacggatttgcgtgcgtccgccagcctcgttatcgccggtttggcggcgcgaggcgaaaccgtggtcgaacagatttaccacttggatcgcggttatgaaaatattgaaaaaaaactcggcagcgtcggcgcgaaaatcgagcgcgtatccggctga

SEQ ID NO: 37837 - DNA, 963 bp, Neisseria meningitidis
atgcaagcacggctgctgatacctattcttttttcagtttttattttatccgcctgcgggacactgacaggtattccatcgcatggcggaggtaaacgctttgcggtcgaacaagaacttgtggccgcttctgccagagctgccgttaaagacatggatttacaggcattacacggacgaaaagttgcattgtacattgcaactatgggcgaccaaggttcaggcagtttgacagggggtcgctactccattgatgcactgattcgtggcgaatacataaacagccctgccgtccgtaccgattacacctatccacgttacgaaaccaccgctgaaacaacatcaggcggtttgacaggtttaaccacttctttatctacacttaatgcccctgcactctctcgcacccaatcagacggtagcggaagtaaaagcagtctgggcttaaatattggcgggatgggggattatcgaaatgaaaccttgacgactaacccgcgcgacactgcctttctttcccacttggtacagaccgtatttttcctgcgcggcatagacgttgtttctcctgccaatgccgatacagatgtgtttattaacatcgacgtattcggaacgatacgcaacagaaccgaaatgcacctatacaatgccgaaacactgaaagcccaaacaaaactggaatatttcgcagtagacagaaccaataaaaaattgctcatcaaacccaaaaccaatgcgtttgaagctgcctataaagaaaattacgcattgtggatggggccgtataaagtaagcaaaggaattaaaccgacggaaggattaatggtcgatttctccgatatccgaccatacggcaatcatacgggtaactccgccccatccgtagaggctgataacaatcatgaggggtatggatacagcaatgaagcagtgcgacaacatagacaagggcaaccttga

SEQ ID NO: 37838 - DNA, 1245 bp, Neisseria meningitidis
atggaacagcagcaaagatacatcagcgtactggatatcggtacgtctaaagtcctcgcactgatcggggaagttcaagatgacgacaaaatcaacatcgtcggtttggggcaggctccttcacggggcttgcgcgcgggcatggtaaccaatatcgatgccaccgtccaagccatcaggcaggcggtcaatgatgccgagctgatggcggataccaaaattacccacgttaccacaggtatcgcaggcaaccacatccgcagtcttaattcgcaaggtgtggttaaaattaaagacggggaagtcacgcaggcagacatcgatcgcgccattgaaacggcaaaggcaatcaatatcccgcccgatcaaaaaattctcgatgctgtggttcaagactacattatcgacacccaacttggcgtgagggagcccatcggtatgagcggtgtgcgtttggatacgcgggtgcacatcattaccggtgcaagtacggcagtgcagaatgtccaaaaatgtatcgagcggtgcggcttgaaaagcgatcaaatcatgcttcagccgttggcaagcgggcaggcggtgctgactgaagatgaaaaagacctcggcgtatgcgtcatcgacattggtggcggaacgaccgatattgccgtttatatgaacggtgccatccgccatacgtccgtcattccggccggtggtaatctgattaccaaagatttgtccaaatcgttgagaacacctctcgatgccgccgagtacattaaaatccattatggcgtggcatcatgcgatacggaaggcttgggtgagatgattgaagttccgggcgtgggtgaccggacatcgcgtcaggtttccagtaaggttctggcagcaatcatcagtgcacggattcaggagatttttggcgtagtgctgggcgagctgcaaaaatcgggtttccccaaagaagtgctgaatgcgggtatcgttctgaccggcggtgtgtccatgatgaccgggattgtggaatttgccgaaaaaatcttcgatttgcctgtacgcaccggtgcaccccaagaaatgggcggtttgtccgaccgcgtccgcacaccgcgtttttctaccgctatcgggctgcttcatgcagcatgcaagctggaaggaaacttgccgcagccggaaaacggtgcagtgcaagagagggaagggggcggtggtttgttggcaagattgaaacggtggattgaaaacagcttctga

SEQ ID NO: 37839 - DNA, 393 bp, Neisseria meningitidis
atgagtatgcatgatcctatttccgatatgttgactcgtatccgcaatgcgcaacgtgctaataaagcagcggttgcaatgccttcttcaaaattaaagtgtgctattgcaaaggtattgaaagaagaaggatatattgaggacttcgcagtttcatctgacgtaaagtctatattggaaattcaattaaaatactatgcaggtcgtcctgtaattgaacaaatcaagcgtgtatctcgccctggtttgcgtatttataaagcgtctagtgagattccaagtgttatgaatggcttgggtattgctattgttagtacttctaaaggtgtaatgactgatcgtaaagcacgttctcaaggtgttggtggtgagttgttatgcattgtagcctag

SEQ ID NO: 37840 - DNA, 1017 bp, Neisseria meningitidis
gtgaatctggacgaagtcaaagccctgtcgatttggatgaccatcaaatgctgcgtagcgggcattccttacggcggcggcaaaggcggcgttaccttggatccgcgcgattattccgaggcggaactggaacgcatcgcccgcgcttattccgaagccatttctccgctgatcggcgagaaaatcgatattcccgcacctgatgtgaacaccaacggcaaaatcatgtcttggatggttgatgcctatgaaaacgtggtgaaacattctgcaccgggcgtatttaccggtaaaccggttgagttcggcggctctttggcgcgtaccgaggctaccggttacggcgtgaacctcgccgccgtccaagccttggaaaaactgggcaaagacgtgaagggtgccacttacgccatccaaggcttcggtaatgtcggttaccacacaggttattacgcgcatcaatccggcgcgaaagttgttgcggtttctactgttgacgttgccatttacaacgaaaacggcttggatatggaagctttgtttaaagagttccaagaaaaaggcttcatcaccaacgaagccggttacggcaaggaaattaccaacgccgaacttttggctttggatgtggacgtactcgccccttgcgcgctggaaaatcaactgacttctgaaaacgccggtaaagtccgcgcgaaaatcgtggtcgaaggcgcgaacggcccgactacgcccgaagccgacgttatcctgcgtcaaaacggcgtattggtcgtgcccgatattttagcgaactgcggcggcgtggtggtatcttattttgaatgggtacaaaatctgcaaggctattattgggagtttgacgaagttcaggaaaaagaaaccgtcgtcctgcgccgtgcgttccgcgatatatggaacttggcgcaagagtatgatgtcgatttgcgaaccgcgtcttacatgatgagtatccgccgtgttgaaaaagcgatgaaactgcgcggttggtattga

SEQ ID NO: 37841 - DNA, 1737 bp, Neisseria meningitidis
atgacaatctctggatgtcaagtcatccatgccaatcaaggtaaggttaatactcattctgctgtcatcacaggtgcagacgctcacacgcctgaacatgcaacgggactgaccgaacaaaagcaggtgattgcaagtgattttatggtagcgtcagccaatccattagcaacacaagctggctatgatatcttaaagcaaggcggtagcgctgcagatgcgatggtggcggtgcagacgacactaagcttggtagagccacagtcgtcaggcttgggcggtggagcatttgtgttgtattgggataataccgccaaaacattgaccacatttgatgggcgtgagacggcaccgatgcgtgcgacgccggaattatttttggataaagatggtcaaccattgaaatttatggaagcggtggtcggtggtcgctcggtgggtacgcctgctatccctaaactgatggagacaatacatcagcgatacggtgtattgccttggggaaaattatttgatacgccgatccgcttggcaaaacaaggctttgaggtgtcgccaaggcttgccatctcggttgagcaaaatcagcagcatttggcacgctatccaaaaacagccgcttattttttgccgaatggtgtgccgctacaagcaggcagcttgctgaaaaatttagaatttgctgacagtgttcaggcgttagcagctcaaggtgcaaaagctctgcatactggtaaatatgcccaaaatatcgtttcagttgtccaaaatgctaaggataaccccggtcaattatccttacaagatttatctgattatcaagtggtggaacgcccgcctgtttgtgtgacttatcgtatttatgaagtatgcggtatgggtgcaccaagctcaggtgggattgctgtgggtcagattttggggattttaaatgaattttcacccaatcaggtggggtatgatgctgaaggtttacgtctcttgggcgacgcttctaggcttgcgtttgcggatcgtgatgtatatttgggcgaccctgattttgtaccagtacccattcgccagttgatttctaaagactacctaaaacatcgcagccagctgcttgagcagtcggataaggcattgcctagcgtatctgcaggcgattttattcatgagtgggtgtcctcacaagcgattgagttaccttctaccagtcatatatcaattgtggataaggcgggcaatgtgctatcaatgacgacttccattgaaaatgcgtttggctcaactttgatggcaaatggctacctgctgaataatgagctgacagactttagttttgagccaataaagcagggcaaacaggtcgccaatcgtgtcgagcccggcaagagaccacgctcctcaatggcaccaaccatcgtatttaaagcaggcaagccttatatggcaatcggctccccaggtggtagccgtatcattggctatgtcgctaagacgattgtggcacatagtgactggaatatggatatccaagatgccatcagtgcacccaatttattaaatcgctttggtaactatgaactagaaacgggcacaaccgccctccagtggcaacaagcattaaatgatttgggctataagactgatgtgcgtgagctaaattcaggtgttcaagccattattatcgagccaagcaggctggttggtggtgccgatccacgccgagaaggtcgagtgatgggtgattag

SEQ ID NO: 37842 - DNA, 1128 bp, Neisseria meningitidis
atgaatacacggaatatgcgctatattcttttgacaggactgttgccgacggtatccgcttttggagagaccgcgctgcaatgcgccgctttgacggacaatgttacgcgtttggcgtgttacgacaggatttttgcggcacagcttccgtcttcggcagggcaggaagggcaggagtcgaaagccgtactcaatctgacggaaaccgtccgcagcagcctggataagggcgaggcggtcattgttgttgaaaaaggcggggatgcgcttcctgccgacagtgcgggcgaaaccgccgacatctatacgcctttgagcctgatgtacgacttggacaaaaacgatttgcgcgggctgttgggcgtacgcgaacacaatccgatgtaccttatgccgctctggtacaacaattcgcccaactatgccccgggttcgccgacgcgcggtacgactgtacaggaaaaattcggacagcagaaacgtgcggaaaccaaattgcaggtttcgttcaaaagcaaaattgccgaagatttgtttaaaacccgcgcggatctgtggttcggctacacccaaagatccgattggcagatttacaaccaaggcaggaaatccgcgccgttccgcaatacggattacaaacctgaaattttcctgacccagcctgtgaaggcggatttgccgttcggcggcaggctgcgtatgctcggtgcgggttttgtccaccagtccaacggacagagccgtcccgaatcgcgttcgtggaacaggatttacgccatggcaggcatggaatggggcaaattgacggtgattccgcgcgtgtgggtgcgtgcgttcgatcagagcggcgataaaaacgacaatcccgatattgccgactatatggggtatggcgacgtgaagctgcagtaccgcctgaacgacaggcagaatgtgtattccgtattgcgctacaaccccaaaacgggctacggcgcgattgaagccgcctacacgtttccgattaagggcaaactcaaaggcgtggtacgcggattccacggttacggcgagagcctgatcgactacaaccacaagcagaacggtatcggtatcgggttgatgttcaacgacttggacggcatctga

SEQ ID NO: 37843 - DNA, 5364 bp, Neisseria meningitidis
ttggtcagagacgatgtcgattatcaaatattccgtgactttgcagaaaacaaaggcaaattttttgtcggcgcaaccgatttatcagtgaaaaacaaacaaggtcaaaacatcggcaacgcattatccaacgtaccgatgattgattttagcgttgcaaatgtcaacagacgtacattaaccgtcatcgatccccagtatgccgtcagcgtcaaacatgtaaaaggagacgaaatctcttattacgggcatcacaatgggcacttagatgttagcaatgatgaaaacgaatatcgttcagttgcacaaaatgactacgaaccaaataaaaattggcatcacggtaatcaaggtcgtcttgaagactacaacatggcacgccttaataaattcgtaacagaagtcgcacctattgcaccaaccagtgcaggcggcggcgttgaaacctataaagataaaaaccgtttttctgagtttgtgcgagttggagcaggtacgcaatttgaatataacagccgctacaatatgacagagctttcacgagcttatcgttatgccattgcaggtacgccttatcaagacgtgaatgtcacatcgaatctaaatcaagaaggcttgattggcttcggtgataattcaaaacatcattccccagaaaaactcaaagaagttttatctcaaaacgcattgactaactatgctgtgttaggcgatagcggttcaccattatttgcttatgataaacaagaaaaacgctgggtctttttaggtgcttacgattattgggcaggctatcaaaaaaactcttggcaagaatggaatatctataaaaaagaatttgcagataaaatcaaacaacgcgataacgccggcaccatcaaaggttatggcgaacatcattggaaaaccacgggcacaaacagccatatcggttcgacagcggtaaggcttgccaacaatgaaagggatgcaaacaacggacagaatgttacctttgaagacaacggcactttggtattggatcaaaacatcaaccaaggcgcgggcggtctgtttttcaaaggcgattacacagtcaaaggtgcaaataatgacatcacttggctaggtgcggggattgatgttgccgacggcaaaaaagtcgtttggcaagtcaaaaatccgaatggcgacagattggcaaaaatcggcaaaggcacattagaaataaacggcacaggcgttaaccaagggcaattaaaagtcggcgacggtacggttattctgaatcaacaagccgatgccgacaaaaaagtccaggctttctcccaagtcggcattgtcagcggacgcggtacattggtattaaatagttcaaatcagattaatcccgataacttatatttcggtttccgtggcggtcgtttggatgccaatggcaatgacttgacttttgaacacatccgcaacgtggatgaaggcgcgcgcattgtcaaccacaacacaggccacgcctccacaatcacgctaacgggtaaatctttgattaccgatcccaaaaccatctctattcattatattcaaaataatgatgatgacgatgatggttattactattaccgccctaggaaaccgattccacaaggcaaagatctttatttcaaaaactaccgttattacgccttaaaatcaggtggcagtgttaacgcaccgatgcccgaaaacggacaaacggaaaataacgactgggtctttatgggatataagcaagaagaagcccagaaaaacgcgatgaaccacaaaaacaatcagcgtattagcggttttagcggtttctttggcgaagaaaacggaaaaggacataacggcgcattaaaccttaatttcaacggcaaaagcgcgcaaaaccgtttcttgttaacaggcggcacgaatttaaacggaaaaataagcgtaactcaaggcaatgtcttgttatcaggtcgtccaacaccacacgcaagagattttgtgaacaaatcttcagcccgaaaagacgcacatttctccaaaaacaatgaagtcgtatttgaagacgactggataaaccgcacattcaaagccacagaaattgcggttaatcaatccgcatcattctcttccggcagaaatgtatccaacattaccgccaacatcaccgcaacagacaacgccaaagtaaatttgggttacaaaaacggcgatgaagtttgcgtgcgctcggactataccggttacgttacctgcaacacaggcaacttatccgataaggctttaaacagctttggagcgacacagattaacggcaatgtgaatctgaaccagaatgcggcattggtcttgggcaaggctgcattatgggggcaaattcaagggcaaggaaacagccgtgtcagcctaaaccaacatagcaaatggcatttgaccggcgacagccaagtacacaatctgtcattggcggatagccatattcatttgaacaatgcctccgatgcgcaaagtgcaaataaataccacacgctcaaaatcaatcatttatccggtaacgggcattttcattatctgacgcacctggcgaaaaatcttggggataaagtgcttgtgaaggaatccgcatccggtcattatcagctccatgttcaagataaaacaggcgaacccaatcaggaagggctgaatctctttgatgcatcatccgtacaagaccgctcccgcctttctgtttccttggcgaataaccatgtagatttaggggcattgcgttatacaatcaaaacagaaaacggtattacccgattgtacaatccttatgccgagaaccgccgccgagtcaaaccggccccgtctcctgccacaaacacggcttctcaagcacaaaaggcaacacaaacggacggtgcacaaattgccaagcctcaaaatatcgtcgtcgcaccgcctagcccgcaggcaaatcaagccgaagaagcaaaacgccagcaagcaaaagcggagcaagtgaagcgtcagcaagcagaagcagagcgtaaatcggcagagttagcaaaacaaaaagcagaagccgaacgcgaagcaagagagctggcgacccgccaaaaagcagaacaagaacgcagcagcgccgaacttgcacgtcgacatgaaaaagaacgcgaagcggcagagttgtcggcaaaacaaaaagtcgaagccgaacgtgaggctcaagcattggcggtacgccgaaaagcagaagccgaagaggcaaaacgccaagctgcagagcttgcacgccggcatgaaaaagaacgcgaagcggcagagttgtcggcaaaacaaagggtcggggaagaggaacgccgtcaaacagcccaatcccagccgcaacgccgcaaacgccgtgccgcaccgcaggattatatggcagcttcccaagaccgtcctaaacgccgcggacaccgttcggtacagcaaaacaatgtggaaattgcccaagcccaagcagaacttgcgcgccgacagcaggaagaacgcaaagcggcagagttgttggcaaaacaaagggcagaagccgaacgtgaagctcaagcattggctgcgcgccgaaaagcagaagccgaagaggcaaaacgccaagctgccgaacttgcacatcgccaggaagcagaacgcaaagcggcagaattgtcggcaaaccaaaaagccgcagctgaagcccaagcattggcggcacgccaacaaaaagcccttgcgcgtcaacaggaagaagcacgaaaagctgcagagttagccgtcaaacaaaaagcggaaaccgaacgcaaaaccgccgaacttgccaagcaaagggcagcagccgaagcagcaaaacgccagcaagaagctcgccagaccgccgaacttgcacgtcgtcaagaagcggaacgccaagcagcagagttgtcggcaaaacaaaaagccgaaacagatcgagaagcggcagaatcggcgaaacgaaaagctgaggaagaagagcaccgtcaagcagcccaatcccagccgcaacgccgaaaacgccgtgccgcacctcaggattatatggcagcttcccaaaatcgtccgaaacgtcgcggacgcagatctactctgccggcaccgccctcgccatcatttgattcgtcagcttacgcagcacccagggccttgcataatccggactggtatgaaaatgactatgaagaaatccccttggatgcgttggaagatgaaaatgtatctgaatcagttgacacatcagacaaacagcctcaagacaatacggaacttcatgaaaaatatgaaaatgattatgaagaaatccccttggatgcgttggaagatgaagatgtatccgaatcggttgacacatcagacaaacagcctcaagacaatacggaacttcatgaaaaagttgagacagtgagtttgcaaccaagagccgcgcagccgcgagcccaagccgccactcagctgcaagcccaagccgccgcgcaagccgatgcagtcagcaccaataccaactcggctttatctgatgcaatggcaagcacgcaatctatcttgttggatacaggtgcttcattaacacggcacattgcacaaaaatcacgcgctgatgccgaaaaaaacagtgtttggatgtcgaacaccggttatggtcgtgattatgcttccgcacaatatcgccggtttagttcgaaacgcacgcaaacacaaatcggcattgaccgcagcttgtccgaaaatatgcagataggcggcgtattgacttactctgacagtcagcatacttttgatcaggcgagcggcaaaaatacttttgtgcaagccaacctttatggtaagtattatttaaatgatgcttggtatgtggtcggcgatattggtgcaggcagcttgagaagccggttacaaacgcagcaaaaagcaaactttaaccgagcaagcatccaaaccggccttactttgggcaatacgctgaaaatcaatcaattcgagattgtccccagtgcggggatccgttacagccgcctgtcatctgcagattacaagttgggtaacgacagtgttaaagtaagttctatgtcagtgaaaacactaacggccggactggattttgcttatcggtttaaagtcggcaaccttaccgtaaaacccttgttatctgcagcttactttgccaattatggcaaaggcggcgtgaatgtgggcggtaattccttcgtctataaagcagataatcaacagcaatattcagcaggtgccgcgttactgtaccgtaatgttacattaaacgtaaatggcagtattacaaaaggaaaacaattggaaaaacaaaaatccggacaaattaaaatacagattcgtttctaa

SEQ ID NO: 37844 - DNA, 1392 bp, Neisseria meningitidis
atgcttttggttatgcgtgcgaagcagggtaagaaaacaccgaagcgcaaatcccaaggtgtcggcaatacgcaggggcagacacccggaagcaatgattcggactgggtcgatcagattggacaatcggtttcagacggcacgcaacccgactggtcttggaacgaaagtgccgagaccgcatccgccgccgtatccgcgcaagaagtcgatccgcttacggagtatcaggtttataagcaattcggttatcagggcaaggctgccgaatctttggctgcctatctggacggcattccggatggtgaagcgaaacctgaaaaccttatccgcgagctgctcgatatcaatctcgaagtgggggatgtcgatgttttggcagacaatctgcaaaaatacggcaaactgattccttccgaacttttggcaaaatatatcgaacaggcattacagcgcgattcaaaccatttgcgtatccgcgtcttggcggaagaaggtttgggatggggtactcaggagattgaaaaacgtgcggaaggcggttctgcgacggcagcttccgcatcgcccccgccggatgccggcggtaaggcttatgaagccgaagaaatcaagcgcatcccgattgtgcggggcaaaaaagacgtgtccggaatcagtcaagaggaaatcggtgcgattgccggtttggtccgtgccgatcaaggtgcgaaaatccttaaagacaaagtcagctatgaaacggcatcgaaacaatacgaccgtgccatccaaacttccgaaaaacctgcaaacctgattatcgatgcgttgaaactcgattaccaatacgcggacatagaccgttttgccggacatttgtggaaactttaccaaacgttgggcaactacggcaggcaggttaaagagcggatgctggggtgggggtacagcctgggttaccatgaagttttcgatgatttggaaaaagggccgaacgaccggcaaatcaaagacatcggtatggggcacgggtatctgccgaaaaatatacagaaattcaaatcgcaacatcgggatttggtgcttcaagattcttcgttgatcaacaccggttcgtctccggcagacgatgcggttaaggaagtagagtcgttgctgatgtatggtcagattgaagcggcaatggatgtgttggagcaggcggtattgaaatatcccgacgagtcccagctttatattacgttgatcgatatttatgaacgtactgaagattgggataggttggggcagtttttaagggtattgagggaacgtgcggacaggcttcctgaagaggtcgttatgctgatgagccggctgctgcagcgtatgaatcaaaatattaaaaaaataaaacggtacggaaaataa

SEQ ID NO: 37845 - DNA, 285 bp, Neisseria meningitidis; identical to SEQ ID NO: 37302

SEQ ID NO: 37846 - DNA, 435 bp, Neisseria meningitidis
atggaaaaattcaacaatattgcacaactgaaagacagcggtctgaaggttaccggcccgcgtttgaagattttggatttgttcgagacgcatgcggaagagcatttgagtgcggaagatgtgtaccgcattttgttggaagagggtgtggaaatcggtgtggcgacgatttaccgcgtgctgacccagtttgagcaggcgggcattctgcaacgccaccattttgaaacgggcaaggcggtttatgagttggacaagggcgaccaccacgaccatatcgtctgcgtgaagtgcggcgaggtaacggaattccacaatcccgaaatcgaagccctgcaagacaaaatcgctgaggaaaacggctaccgcatcgtcgatcacgcgctttatatgtacggcgtgtgcagcgactgtcaggccaagggcaaacgttaa

SEQ ID NO: 37847 - DNA, 744 bp, Neisseria meningitidis
atgcctgatgccgtcaaaaaagtttacctgatacacggttggggggcgaaccgccacgtgtttgacgatttgatgccgcgcctgcctgcaacgtgggcggtgtccgccgtcgatttgcccggacacggcgacgcgcccttcgtgcaacccttcgatattgaggcagccgccgacgctgttgccgcgcaaatcgatacgcccgccgacattctcggctggtcgctcggcggattggtcgcgctgtatctggcggcgcgccatcccgacaaagtccgttcgctctgcctgacggcgagtttcgcacggctgacggctgccgaagattatcccgaagggcttgccgcgcctgcactgggcaaaatggtcggcgcgttccgaacggattatgccaaacatatcaaacagtttctacaattgcagcttctgcacacgcctgatgcggacggaatcataggcaggattctgcccgatttggcgcgctgcggcacgccctccgccctgcaggaggcgttggacgcggcggaaagggcggatgcgcggcatttgttggacaagatagatgttccggtactgctggtgttcggcggcaaagacgcgattacaccgccgcgtatgggtgagtatctgcatcggcatttgaaaggcagcaggctggttgtgatggaaaaggcggcacacgcgccgtttttgagccatgcggaagcgtttgccgcgctgtaccgcgactttgtcgaaggggtttga

SEQ ID NO: 37848 - DNA, 1293 bp, Neisseria meningitidis
atggctgtcttcccactttcggcaaaacatcggaaatacgcgctgcgcgcgcttgccgtttcgattattttggtgtcggcggcatacattgcttcgacagagaggacggagcgcgtcagaccgcagcgcgtggaacaaaaactgccgccgctgtcttggggcggcagcggtgttcagacggcatattgggtgcaggaggcggtgcagccaggcgactcgctggcggacgtgctggcgcgttcgggtatggcgcgggacgaaattgcccgaataacggaaaaatatggcggcgaagccgatttgcggcatttgcgtgccgaccagtcggttcatgttttggtcggcggcgacggcggcgcgcgcgaagtgcagttttttaccgacgaagacggcgagcgcaatctggtcgctttggaaaagaaaggcggcatatggcggcggtcggcttctgaggcggatatgaaggttttgccgacgctgcgttcggtcgtggtcaaaacgtcggcgcgcggttcgctggcgcgggcggaagtgcccgtcgaaatccgcgaatccttaagcgggattttcgccggccgcttcagccttgacggtttgaaggaaggcgatgccgtgcgcctgatgtacgacagcctgtatttccacgggcagcaggtggcggcgggcgatattttggcggctgaagtcgttaagggcggcacaaggcatcaggcgttctattaccgttcggacaaggaaggaggagggggcggcaattattacgatgaagacggcagggtgttgcaggaaaaaggcggcttcaacatcgagccgctggtctatacgcgcatttcttcgccgttcggctaccgtatgcaccccatcctgcacacttggcggctgcacacgggcatcgattatgccgcaccgcagggaacgccggtcagggcttccgccgacggcgtgattacctttaaaggccggaagggcggatacggcaacgcggtgatgatacgccacgccaacggtgtggaaacgctgtacgcgcacttgagcgcgttttcgcaggcacaaggcaatgtgcgcggcggcgaggtcatcggttttgtcggttcgaccgggcgttcgaccgggccgcacctgcattacgaggcgcgcatcaacgggcagcccgtcaatcctgtttcggtcgcattgccgacaccggaattgacgcaggcggacaaggcggcgtttgccgcgcagaaacagaaggcggacgcgctgcttgcgcgcttgcgcggcataccggttaccgtgtcgcaatcggattga

SEQ ID NO: 37849 - DNA, 1185 bp, Neisseria meningitidis
atgagtttacacagcgacatcctcgtcgtcggcgcaggcccggcgggtttaagttttgcagccgaacttgccggcagcggtttgaaagttaccctgattgaacgcagcccactgactgttctgcaaaatcctccatatgacggacgcgaaatcgccctgacccatttttcccgcgaaatcatgcagcgtttgggtatgtgggacaaaattcccgaaaacgaaatctaccctttgcgcgatgccaaagtgctgaacggacgttccgactaccagctccactttccccaaccgaccgaggcgcgcggcgaacctgccgactgtttgggctatcttatttccaaccacaatatccgacgcgctgcctacgaagtcgtatcccaactcgacaacattaccattctgaccgatacggttgtcaaagaagtcaaaacatctgacaacgaagcacaagtcattttggaaaacggcaaaatcctgactgcacgcctgcttttggcggcagacagccgcttctcgcaaacccgtcgacaactcggtatctcctccgatatgcacgattacagccgaaccatgttcgtctgccgtatgaaacataccctttccaaccaacataccgcttacgaatgcttccattacggacgcaccatcgcactgctgccgctggaagagcacctgaccaataccgtcattaccgtcgataccgataaaatcaacagcgttcaaaacctttcgcccgaagaattggcggcaagcgtaaaagaacagctcaagggcaggcttggcgacatggaactggtcagcagtatccaccattacccccttgtcggtatgattgccaaacgtttctacggtaaacgcagcgcgctgatcggcgatgcggctgtcggtatgcaccccgttaccgcacacggtttcaacttgggtctgtccagcgcagatattttggcaaaactgatactcgaagccgagcagcgcggtcaggacatcggcgcggcttccttgttggaaaaatacagcagcaaacatatgctgcatgcccagccgctttatcacggaaccaatatgatgctgaaactgtttaccaacgaaaccgcgccggcaaaactgctgcgcggtttggtattgcgtgccggcaacaacttcccgccgctgaaaaagctgattaccaaacaactgaccggttga

SEQ ID NO: 37850 - DNA, 3606 bp, Neisseria meningitidis
atgtttcattttgcatttccggcacaaactgccctgcgccaagcgataaccgatgcctaccgccgtaatgaaatcgaagccgtacaggatatgttgcaacgtgcacagatgagcgacgaagagcgcaacgccgcctccgagcttgcccgccgtttggttacccaagtccgcgccggccgcaccaaagccggcggcgtggatgcgctgatgcacgagttttcactctccagcgaagaaggcatcgcgctgatgtgtctggcagaagccctgctgcgtatccccgacaacgccacgcgcgaccgcctgattgccgacaagatttcagacggcaactggaaaagccatttgaacaacagcccttccctcttcgtcaacgccgccgcctggggcctgctgattaccggcaaactgaccgccacaaacgacagacaaatgagttccgcactcagccgcctgatcagcaaaggcggcgcaccgctcatccgccaaggcgtaaattacgccatgcgcctgttgggcaaacagttcgtaaccggacagaccattgaagaagccctgcaaaacggcaaagaacgcgaaaaaatgggctaccgcttctccttcgatatgttgggcgaagccgcctacacccaagccgatgccgaccgctactaccgcgactatgtcgaagccatccacgccatcggcaaagatgcggcaggacaaggcgtttacgaaggcaacggcatttccgtcaaactttccgccatccatccgcgctactcgcgcgcccaacacggccgtgtgatgggcgaactgttgccgcgcctgaaagagctgttccttttgggtaaaaaatacgatatcggtatcaacatcgatgccgaagaagccaaccgtctggagctgtctttggatttgatggaggctttggtttcagaccctgacttggctggctacaaaggtatcggtttcgttgtccaagcctaccaaaaacgttgtccgttcgttatcgactacctgattgacctagcccgccgcaacaaccaaaaactgatgatccgcctcgtcaaaggcgcgtattgggacagcgaaatcaaatgggcgcaagtggacggcttgaacggctatccgacctacacccgcaaagtccacaccgacatctcctacctcgcctgcgcgcgcaaactgctttccgcgcaagacgcggtattcccgcaatttgccacgcacaacgcctacaccttaggcgcaatctaccaaatgggcaaaggcaaagactttgaacaccaatgcctgcacggcatgggcgaaaccctgtacgaccaagtcgtcggcccgcaaaacttaggccgccgcgtgcgcgtgtacgccccggtcggcacacacgaaaccctgctcgcctacttggtgcgccgcctgttggaaaacggcgcgaactcgtctttcgtcaaccaaatcgtcgatgaaaacatcagcatcgacacgctcatccgcagcccgttcgacaccatcgccgaacaaggcatccacctgcacaacgccctgccgctgccgcgcgatttgtacggcaaatgccgtctgaactcgcaaggcgtggacttgagcaacgaaaacgtattgcagcagcttcaagaacagatgaacaaagccgccgcgcaagacttccacgccgcatccatcgtcaacggcaaagcccgcgatgtcggcgaagcgcaaccgattaaaaaccctgccgaccacgacgacatcgtcggcacagtcagctttgccgatgccgcgcttgcccaagaagcggttggcgcagccgttgccgcgttccccgaatggagtgcgacaccagccgccgaacgcgccgcctgcctgcgccgtttcgccgacctgctcgaacagcacacccccgcgctgatgatgcttgccgtgcgcgaagcgggcaaaacgctgaacaacgccattgccgaagtgcgcgaagccgtcgatttctgccgctactatgcaaacgaagccgaacacaccctgcctcaagacgcaaaagccgtcggcgcgattgtcgccatcagcccgtggaacttcccgctcgccatctttaccggcgaagtcgtttccgcattagcggcaggcaacaccgttatcgccaaacctgccgaacaaaccggcctgattgccggttacgccgtttccctgatgcacgaagccggcatcctgacttccgccctgcaactcgtcctcggcgcaggcgacgtgggtgcggcattgaccaacgatgcccgcatcggcggcgtaattttcaccggctcaaccgaagtggcgcgcctgatcaacaaagcccttgccaaacgcggcgacaatcccgtcctgattgccgaaaccggcggacaaaacgccatgattgtcgattccaccgcacttgccgaacaagtctgcgccgacgtattgaactccgccttcgacagcgcgggacaacgctgctccgccctgcgtatcttgtgcgtccaagaagacgttgccgaccgtatgctcgacatgatcaaaggcgcgatggacgaactcgtcgtcggcaaaccgattcagctcactaccgatgtcggccccgtcatcgatgccgaagcacagcaaaacctgttgaaccacatcaacaaaatgaaaggcgttgccaagtcttaccacgaagtcaaaaccgctgccgatgtcgattccgaaaaatccacgttcgtccgccccatcctgtttgaattgaacaacctcaacgaactgcaacgcgaagtcttcggtcccgtcctgcacgtcgtccgctaccgcgccgacgaactcgacaacgtcatcgaccaaatcaacagcaaaggctacgccctgacccacggcgtacacagccgcatcgaaggcacggtacgccacatccgcagccgcatcgaagccggcaacgtttacgtcaaccgcaacatcgtcggcgcagtcgtcggcgtacagcccttcggcggacacggtctgtccggcacaggccccaaagcaggcggttcgttctacctgcaaaaactgacccgcgccggcgaatgggttgccccgaccctgagccaaatcggacaggcggacgaagccgcactcaaacgcctcgaagcactggttcacaaactgccgttcaacgccgaagagaaaaaagccgcagcggccgctttgggacacgcccgcatccgcaccctgcgccgtgccgaaaccgtccttaccggaccgaccggcgagcgcaacagcatctcatggcacgcgccaaaacgagtttggatacacggcggcagcacggttcaagcctttgccgcactgaccgaacttgccgcctccggcgtacaggcagtggtcgaacccgacagcccgctggcttcctacaccgccgacttggaaggtctgctgctggtcaacggcaaacccgaaaccgtcggcatcagccacgttgccgccctgtcgcctttggacagcgcgcgcaaacaggaacttgccgcccacgacggcgcactcatccgcgtcctcccttcggaaaacggactcgacatcctgcaagtttttgaagaaatctcttgcagcgtcaacaccacagccgccggcggcaacgccagcctgatggcggttgccgactga

SEQ ID NO: 37851 - DNA, 624 bp, Neisseria meningitidis
atgatgaaaccgcacaacctgttccaatttctcgccgtttgctccctgaccgtcgccgtcgcttccgcacaggcgggcgcggtagacgcgctcaagcaattcaacaacgatgccgacggtatcagcggcagcttcacccaaaccgtccaaagcaaaaagaaaacccaaaccgcgcacggcacgttcaaaatcctgcgcccgggcctcttcaaatgggaatacacttcgccctacaaacagactattgtcggcgacggtcaaaccgtttggctctacgatgttgatttggcacaagtgaccaagtcgtcccaagaccaggccataggcggcagccccgccgccatcctgtcgaacaaaaccgccctcgaaagcagctacacgctgaaagaggacggttcgtccaacggcatcgattatgtgctggcaacgcccaaacgcaacaacgccggctaccaatacatccgcatcggcttcaaaggcggcaacctcgccgccatgcagcttaaagacagcttcggcaaccaaacctccatcagtttcggcggtttgaataccaatccccaactctcgcgcggcgcgttcaagtttaccccgcccaaaggcgtggacgtgttgagcaactga

SEQ ID NO: 37852 - DNA, 786 bp, Neisseria meningitidis
atgagcagaatccggcaggcttttgccgctttggatggcggaaaggcattgattccctatattacggtgggcgaccccgatattcggacaactttggcattgatgcatggcatggttgcaaacggtgcggatattttagagttgggcgtgccgttttccgatccgatggcggacgggccggttattcagcgtgcggcggagcgggcgttggcaaacgggatttcgctgcgcgatgtcttggatgtcgtcagaaaattccgtgaaaccgacacgcaaacgccggttgttttgatgggatatttgaaccctgtacataagatgggttatcgggagtttgctcaggaagccgcaaaggcgggtgtggacggcgtgttgacggtggattcccctgtcgaaaccatcgatccgctctatcgcgagctgaaggataacggggtcgactgtattttcctgattgcgccgacgacgacggaagaccgtattaaaaccattgccgagctggcaggcggatttgtctattatgtttcgctcaagggcgtaacgggcgcggcaagtttggatacggatgaggtttcgcgtaaaatagagtatttgcatcagtatatcgatattcccatcggtgtcggtttcggcatcagcaatgcggaaagcgcgcgcaaaatcggccgggttgccgacgcggtcattgtcggcagccggattgtgaaagagattgaaaacaatgcgggcaacgaggctgccgccgtcggtgctttggtcaaagagttgaaggatgccgtgcgctga

SEQ ID NO: 37853 - DNA, 303 bp, Neisseria meningitidis
atgaccgcgcaacaccaatccgacacgctcttgcaccgtctgaacaccctgccgccgaaacgttacggcgttttcctattgaacgacgattacaccacgatggaatttgtcgttgaaatcctgaccgaaatcttcatgctcggacaagaacaggcggtagcggtaatgctcttggttcatcacgaaggcaaaggcctgtgcggcacttacacgcgcgatattgcccaaaccaaacagcaacaagtcatgcagcgggcaaaagccgaagggcatccgctgcaatgtattgtcgaggagatttaa

SEQ ID NO: 37854 - DNA, 669 bp, Neisseria meningitidis
atgactgtatggtttgttgccgctgttgccgtcttaatcatcgaattattgacgggaacggtttatcttttggttgtcagcgcggctttggcgggttcgggcattgcttacgggctgaccggcagcacgcctgccgccgtcttgaccgccgctctgctttccgcgctgggtatttggttcgtacacgccaaaaccgccgtgggaaaagttgaaacggattcatatcaggatttggatgccgggcaatatgccgaaatcctccggcacgtaggcggcaaccgttacgaagtttttatcgcggtacgcactggcaggcgcaaaatacggggcaagaagagcttgaaccgggaacgcgcgccctcattgtccgcaaggaaggcaaccttcttattatcacacacccttaacactcggaggaattatggaatttttcattatcttgttggtagccgtcgccgttttcggtttcaaatcctttgttgtcatcccacaacaggaagtccacgttgtcgaaaggctcgggcgtttccatcgcgccctgacggccggtttgaatattttgattccctttatcgaccgcgtcgcctaccgccattcgctgaaagaaatccctttagacgtacccagccaagtctgcatcacgcgcgacaatacgcagctgactgttga

SEQ ID NO: 37855 - DNA, 234 bp, Neisseria meningitidis
atggaagccaccgtctatctcgaagacaacgaatacatcgccctgtgcgacctcttgaaattggccggacttgccgaaagcggcggacaggcgaaggcgttgattgccgaagggttggtgtcgcgcaacggcgaaaccgaaacccgtaaaaccgccaaaatacgcggcggcgaagtcatcgagtttgacggtgcgcgcttggaaatcgccgatggatacgaccctgaagcataa

SEQ ID NO: 37856 - DNA, 375 bp, Neisseria meningitidis
atgaaacttctgaccaccgcaatcctgtcttccgcaatcgcgctcagcagtatggctgccgccgctggcacggacaaccccactgttgcaaaaaaaaccgtcagctacgtctgccagcaaggtaaaaaagtcaaagtaacctacggcttcaacaaacagggtctgaccacatacgcttccgccgtcatcaacggcaaacgcgtgcaaatgcctgtcaatttggacaaatccgacaatgtggaaacattctacggcaaagaaggcggttatgttttgggtaccggcgtgatggatggcaaatcctaccgcaaacagcccattatgattaccgcacctgacaaccaaatcgtcttcaaagactgttccccacgttaa

SEQ ID NO: 37857 - DNA, 300 bp, Neisseria meningitidis
atgaagaaaatgttcgtgctgttctgtatgctgttctcctgcgccttctcccttgcggcggtaaacatcaatgcggcttcgcagcaggagttggaggcgctgccgggcataggccctgcgaaggcgaaggccattgcggaataccgtgcgcaaaacggtgcgttcaagtctgtggacgatttgaccaaggtaaagggcataggccctgcggtgctggcgaagctgaaggatcaggcttccgtcggcgcgcctgcaccaaaaggcccagccaaaccagtgctgcccgcggataaaaaataa

SEQ ID NO: 37858 - DNA, 300 bp, Neisseria meningitidis
atgaagaaaatgttcgtgctgttctgtatgctgttctcctgcgccttctcccttgcggcggtaaacatcaatgcggcttcgcagcaggagttggaggcgctgccgggcataggccctgcgaaggcgaaggccattgcggaataccgtgcgcaaaacggtgcgttcaagtctgtggacgatttgaccaaggtaaagggcatcggccctgcggtgctggcgaagctgaaggatcaggcttcggtcggcgcgcccgcaccaaaaggcccagctaaaccagtgctgcccgcggataaaaaatag

SEQ ID NO: 37859 - DNA, 651 bp, Neisseria meningitidis
atgatccgtttcgaacaagtttccaaaacctatcccggcggttttgaagccctgaaaaacgtcagcttccaaatcaacaaaggcgaaatgatatttatcgcgggacactccggttcgggcaaatccaccgtcctcaagctgatttcgggcatcaccaagccgagcaggggcaaaatcctgtttaacgggcaggatctcggcacattgtccgacaaccaaatcggctttatgcgccaacatatcggcatcgtgttccaagaccacaaaatcctctacgaccgcaacgtcctgcaaaacgtcatcctgccgcttcggattatcggctatccgccgcgcaaagccgaagagcgtgcccgcatcgccatcgaaaaagtcggcctgaaaggacgagaattggacgatcccgtaaccctctccggcggtgaacaacaacgcctgtgcatcgcccgcgccgtcgttcaccagcccagcctgctgattgccgacgaaccctccgccaacctcgaccgcgcctacgcgctcgatattatggaattgttcaaaaccttccacgaagcgggaacaaccgtcatcgtcgccgcacatgacgaaaccctgatggcggactacggacaccgcatcctgcgcctctcgaaaggacgactcgcatga

SEQ ID NO: 37860 - DNA, 249 bp, Neisseria meningitidis
atgctgacctcggaacaagtaaaagccatgattgaaggcgtggcaaaatgcgaacacatcgaagtagaaggcgacggacatcattttttcgccgtcatcgtttcatcagaatttgaaggcaaggcacgcctcgcgcgccaccgcctgattaaagacgggcttaaagcccaactggaaagcaacgaactgcacgcactttccatttcggtagccgccacaccggcagaatggaatgccaaagcacaataa

SEQ ID NO: 37861 - DNA, 2058 bp, Neisseria meningitidis
atgacacgcaaaatcttagttacctccgccctgccctatgccaacggcagcatccacctcggccacatggtcgaacacatccaaaccgacgtttgggtacgcttccaaaaactgcgcggcaacgaatgccactactgctgcgccgacgacacccacggcacgcccgtgatgcttgccgcgcaaaaacaaggtatcgcccccgaagacatgattgccaaagtgcgcgaagagcacctcgccgactttactggctttttcatcggttacgacaattattacagcacccattcccctgaaaacaaacagttttcccaagacatttaccgcgcgctgaaagccaacggcaagattgagagccgcgtcatcgagcagcttttcgaccccgaaaaacaaatgttcctgcccgaccgcttcgtcaaaggcgaatgcccgaaatgccacgcccaagaccaatacggcgacaactgcgaagtctgcggcacgacctattccccgaccgaactgattaatccgtattccgccgtttccggtgccaaacccgaattgcgcgaatccgaacacttcttcttcaaactgggagaatgcgccgacttcctcaaagcatggacttccggcaacaacccgcacgacggcaagccccatctgcaagccgaagccctcaacaaaatgaaagaatggctgggcgaaggtgaagaaaccaccctgtccgactgggatatttcccgcgacgcgccgtatttcggttttgaaatccccgacgcgccgggcaaatacttctacgtctggctggacgcgcccgtcggctacatggcgtcgtttaaaaacctgtgcgaccgcatcggcgtcgatttcgacgaatacttcaaagccggcagccaaaccgagatgtaccacttcatcggcaaagacatcctctatttccacgccctgttctggcctgccatgctgcatttctccggccaccgcgccccgaccggcgtgtacgcacacggctttttgaccgtggacggacaaaaaatgtccaaatcgcgcggcacgtttatcaccgccaaatcctatttggaacaaggtttaaaccccgagtggatgcgctactacatcgccgccaaactcaacagcaaaatcgaagacatcgatttgaacctgcaagactttatcagccgcgtaaacagcgaccttgtcggcaaatacgtcaacatcgccgcccgcgcctcaggttttatcgccaaacgctttgaaggccgtctgaaagacgttgccgacagcgcattgctggcaaaacttgccgccgaaagcgacaccatcgccgagcaatacgaaaaccgcgaatacgcccgcgccctgcgcgatatcatggcattggcagatgccgtgaacgaatacgttgatgccaacaaaccttgggaactggcgaaacaggaaggtcaagacgaacgcctgcacgaagtgtgcagcgagctcatcaacgccttcaccatgttgaccgcctacctcgcccccgtcttgccgcaaaccgccgcaaacgccgccaaattcctgaatttggaagccatcacttgggcaaatacacgcgaaaccttgggcaaacacgccatcaacaaatacaaacatttaatgcaacgagtggagcaaaaacaagtggacgatttaatcgaagccaacaaacaaagcatcgccgccgcagccgcacctgccgccgaagagagcaaatacgaaaaagtcgccgaacaggcgagcttcgacgactttatgaaaatcgacatgcgcgtcgccaaagtattaaactgcgaagccgtcgaaggcagcaccaaactcctgaaattcgacctcgatttcggttttgagcaacgcatcatcttctccggcatcgccgcgtcttacctgaaccctgccgagttaaacggaaggatggtcatcgccgtcgccaacttcgccccgcgcaaaatggcgaaattcggcgtatccgaaggcatgattttgagtgccgccacggcagacgggaaactgaaactgcttgatgtcgacgcaggcgcgcaaccgggcgacaaagtcggttaa

SEQ ID NO: 37862 - DNA, 528 bp, Neisseria meningitidis
atggaaatgaaacaaatgcttttggccgtcggcgtggcggcggtgttggcaggctgcggcaaggatgccggcggttacgagggttattggcgcgaaaaatcggacaaaaaagagggtatgattgccgtcaaaaaagaaaaaggcaattacttccttaataaaatcaacgtgtttacaggtaaggaagaatctatgcttttgtctgaaaaagacggcgagctttcgataaacacggggataggggaaatcccgatcaaactttccgacgacgggaaagagctgtatgtcgaacgcaggcagtatgtcaaaaccgatgcggcgatgaaggacaaaatcatcgcccaccagaaaaagtgcggacaaacggaacaggcataccgcgacgcgcgaaatgcgttgccgtcaaaccaaacgtatcagcagcgtcaggcggcgatcgagcaattgaaacggcggtttgaagccgagttcgatgaattggaaaaagaaatcaaatgcaacggcagaccccgggcattgttgttttag

SEQ ID NO: 37863 - DNA, 2151 bp, Neisseria meningitidis
atgaaagcacttccgatcaaatcactcctcatcacctcgcttcccgttttcgccagtgtttttaccgccgcctccatcgtctggcagctaggcgaacccaagctcgccatgcccttcgtactcggcatcatcgccggcggccttgtcgatttggacaaccgcctgaccggacggctgaaaaacatcatcgccaccgtcgccctgtttaccctctcctcgctcacggcacaaagtaccctcggcacagggctgcccttcatcctcgccatgaccctgatgaccttcggctttaccattttaggcgcggtcgggctgaaataccgcaccttcgccttcggcgcactcgccgtcgccacctacaccacacttacctacacccccgaaacctactggctgaccaaccccttcatgattttatgcggcaccgtactgtacagcaccgccatcatcctgttccaaatcatcctgccccaccgccccgtccaagaaagcgtcgccaacgcctacgacgcactcggtggctacctcgaagccaaagccgacttcttcgaccccgatgaggcagcctggataggcaaccgccacatcgacctcgccatgagcaacaccggcgtcatcaccgccttcaaccaatgccgttccgccctgttttaccgccttcgcggcaaacaccgccacccgcgcaccgccaaaatgctgcgctactacttcgccgcccaagacatacacgaacgtatcagctccgcccacgtcgactaccaagagatgtccgaaaaattcaaaaacaccgacatcatcttccgcatccaccgcctgctcgaaatgcagggacaagcctgccgcaacaccgcccaagccctgcgcgcaagcaaagactacgtttacagcaaacgcctcggccgcgccatcgaaggctgccgccagtcgctgcgcctcctttcagacagcaacgacaatcccgacatccgccacctgcgccgccttctcgacaacctcggcagcgtcgaccagcagttccgccaactccgacacagcgactcccccgccgaaaacgaccgcatgggcgacacccgcatcgccgccctcgaaaccggcagcctcaaaaacacctggcaggcaatccgtccgcagctaaacctcgaatcaggcgtattccgccatgccgtccgcctgtcccttgtcgttgccgccgcctgcaccatcgtcgaagccctcaacctcaacctcggctactggatactactgaccgcccttttcgtctgccaacccaactacaccgccaccaaaagccgcgtccgccagcgcatcgccggtaccgtactcggcgtaatcgtcggctcgctcgtcccctacttcaccccgtctgtcgaaaccaaactctggattgtcatcgccagtaccaccctctttttcatgacccgcacctacaaatacagtttctccaccttcttcattaccattcaagccctgaccagcctctccctcgcaggtttggacgtatacgccgccatgcccgtacgcatcatcgacaccattatcggcgcatcccttgcctgggcggcagtcagctacctgtggccagactggaaatacctcacgctcgaacgcaccgccgcccttgccgtatgcagcaacggcgcctatctcgaaaaaatcaccgaacgcctcaaaagcggcgaaaccggcgacgacgtcgaataccgcgccacccgccgccgcgcccacgaacacaccgccgccctcagcagcaccctttccgacatgagcagcgaacccgcaaaattcgccgacagcctgcaacccggctttaccctgctcaaaaccggctacgccctgaccggctacatctccgccctcggcgcataccgcagcgaaatgcacgaagaatgcagccccgactttaccgcacagttccacctcgccgccgaacacaccgcccacatcttccaacacctgcccgaaaccgaacccgacgactttcagacagcactggatacactgcgcggcgaactcgacaccctccgcacccacagcagcggaacacaaagccacatcctcctccaacagctccaactcatcgcccggcagctcgaaccctactaccgcgcctaccgccaaattccgcacaggcagccccaaaatgcagcctga

SEQ ID NO: 37864 - DNA, 408 bp, Neisseria meningitidis
atggaaattcgggcaataaaatatacggcaatggctgcgttgcttgcatttacggttgcaggctgccggttggcaggttggtatgagtgttcgtccctgtccggctggtgtaagccgagaaaacctgccgccatcgatttttgggatattggcggcgagagtccgccgtctttagaggactacgagataccgctttcagacggcaatcgttccgtcagggcaaacgaatatgaatccgcacaacaatcttacttttacaggaaaatagggaagtttgaagcctgcgggttggattggcgtacgcgtgatggcaaacctttgattgagacgttcaaacaggaaggttttgattgtttgaaaaagcaggggttgcggcgcaacggtctgtccgagcgcgtccgatggtaa

SEQ ID NO: 37865 - DNA, 792 bp, Neisseria meningitidis
atgaatgtttattttctcggcggcggcaatatggcggctgccatcgcaggcggattggtcaaacaaggcggttaccgcatctatatagccaatcggggtgcggaaaaacgcgaacgtttggaaaaagagttgggggtcgaaacttcggcaaccctgccggagcttcattccgacgatgttttaatccttgccgtcaaaccgcaggatatggaagccgcgtgcaaaaatatccgcaccaacggcgcattggtgctttctgttgcagctggattgtcggttgatacgctcagccgttacctcgggggaaaccgccgcattgtccgggttatgccgaatacacccggaaaaatcgggctgggcgtatccggtatgtttgccgaagcggaagtatcggaaacagaccgcaggattgccgatcgaatcatgaaatcagtcggtttgaccgtttggttggaagatgaagcgcaaatgcacagcattaccggtatcagcggcagcgggccggcatatgtgttttatctgctggacgcattgcaaaatgccgccatccgacaagggtttgatatggcagaagcacgcgcgctcagtctggcaacgtttaaaggagcggttgcccttgccgagcagacgggtgaagatttcgagaagcttcaaaaaaatgtaacgtcaaaaggcgggacaacccacgaagccgtggaagccttcaggcggcatcgtgtcgccgaagccataagtgagggcgtttgtgcctgtgtgcgccgttcgcaggaaatggaacggcaatatcaataa

SEQ ID NO: 37866 - DNA, 867 bp, Neisseria meningitidis
atgaaaggcatcatactggcaggcggcagcggcacgcgcctctaccccatcacgcgcggcgtatccaaacagctcctgcccgtgtacgacaaaccgatgatttattaccccttgtcggttttgatgctggcgggaatccgcgatattttggtgattaccgcgcctgaagacaacgcctctttcaaacgcctgcttggcgacggcagcgatttcggcatttccatcagttatgccgtgcaacccagtccggacggcttggcacaggcatttatcatcggcgaagaatttatcggcaacgacaatgtttgcttggttttgggcgacaatattttttacggtcagtcgtttacgcaaacattgaaacaggcggcagcgcaaacgcacggcgcaaccgtgtttgcttatcaggtcaaaaaccccgaacgtttcggcgtggttgaatttaacgaaaacttccgcgccgtttccatcgaagaaaaaccgcaacggcccaaatccgattgggcggtaaccggcttgtacttctacgacaaccgtgccgtcgagttcgccaaacaaatcaaaccgtccgcacgcggcgaattggaaattaccgacctcaaccggatgtatttggaagacggctcgctctccgttcaaatattgggacgcggtttcgcgtggctggacaccggtacgcacgaaagcctgcacgaggcggcttcgttcgtccaaaccgtgcaaaacatccaaaacctgcacatcgcctgcctggaagaaatcgcttggcgcaacggttggctttccgatgaaaaactggaagaattggcgcgcccgatggcgaaaaaccaatacggccaatatttgctgcgcctgttgaaaaaataa

SEQ ID NO: 37867 - DNA, 522 bp, Neisseria meningitidis
atgtcctgtttttcaatcaaacgtatgtccgcgtttcgggcgcggataacggcgttttttaccgcctttgtctttttgacggcggcactgcccgcttatgcggagcgtctgcctgattttctggcgaaaatacagccttcggaaatttttccgggtgcggaccgttacggcaagccggaaggcaagcctatggttgcccgcgtttacaaaggcgatgagcagttgggcttggtctatatcacgaccgatgcggtcaatacgcgcggttattcgagcaaaccgatcgatacgctgatggctttggcaaatgacggcacgatagccggagcgaaactggtcgatcatcacgaaccgattatgctgatcggtatcccgcatttgcccgcgcccgggcgggcgatacgcttaaactggcttccggcgtatatcaaaccaaactttatatcgacaaaccgattacgattgaagggcctgccgaccgttccgcaaccatcgaaggggacaggagcggccgcaccatag

SEQ ID NO: 37868 - DNA, 1134 bp, Neisseria meningitidis
atgaaaagaattctttgcattacaggtaccagagccgacttcggcaagctaaaacctttattagcctatattgaaaatcacccagaccttgaattgcatttgattgtaactggtatgcatatgatgaaaacatatggcagaacctgcaaggaagtaactcgagaaaactatcaacatacatatctgttttcaaatcaaatccaaggtgaaccaatgggtgccgttttaggcaataccattacgtttatctctcgtctatctgatgaaattgaacctgatatggtcatgattcacggcgaccgtttagaagcactagcaggcgcaactgtaggtgcattaagcagccgtttagtttgccatatcgaaggtggtgaactatctggtacagtagatgactccattcgtcattctattagtaaactttctcatatccacttggtagcaaatgaacaagctgtcactcgcctagtgcaaatgggagaaaaaagaaagcatattcacatcatcggctcccccgatttagatgttatggcctcttccaccctcccatccttagaagaagtcaaagaatattacggtttaccatacgaaaattatggtatttctatgtttcaccccgtgactacagaagcacatttaatgccacaatatgcggcccaatatttcaaagcattagaattaagtggccaaaatatcattagcatctaccctaataatgacactggcactgaaagtattctgcaagaattattaaaatatcaatctgataaatttattgcatttccttccattcgatttgaatattttttagtcttattgaaacatgctaaatttatggtcggcaactcaagtgcaggtattagagaagctcctctctacggtgtcccttcaattgatgttggtacacgccaaagtaaccgccatatgggaaaatctattattcatacagattatgaaactaaaaatatctttgatgcgattcaacaagcatgcagtttaggcaaatttgaagcagatgatacctttaatggcggagatactcgcaccagcacagaaagatttgctgaagtaatcaacaatcctgaaacgtggaatgtttctgctcaaaaacgttttatcgatttgaatctttaa

SEQ ID NO: 37869 - DNA, 798 bp, Neisseria meningitidis
atgaaagccttgcataaaacatcattttgggaatctttagccattcaaaggcgcgtaatcggtgcgctgttgatgcgggaaattatcacccgttacggtcgcaataatattggctttttatggctgtttgttgagccgttgctgatgacattcgttatcgtcttgatgtggaaatttttaaaggcagaccgatattcaactttgaatattgtcgcatttgcgattactggctatccgatgttgatgatgtggcgtaatgcctcaaaacgggcagttgggtcgatttcttcaaatgccagcttgctttatcaccgcaatgtaagagttttggataccatcttggcgcgcatgattttggaaattgctggtgcaaccattgcgcagattgtgattatggcggtattgattgcgattggctggattgaaatgccggcagatatgttttatatgctgatggcttggcttttgatggctttttttgcgattggtttgggtttggtgatttgttcgattgcctttaatttcgagccgtttggcaagatttggggcacattgacttttgtgatgatgccgttatccggtgcgttcttttttgtgcataatttgccgcccaaggtacaagaatatgcattaatgattccgatggtgcatggcacagaaatgttccgtgccggatattttggcagcgatgtaattacctatgaaaatccttggtatatcgtattgtgcaatctggtgttgttgttgtttggcttggcgatggtcagtaaattcagtaaaggagtcgagccgcaatga

SEQ ID NO: 37870 - DNA, 2274 bp, Neisseria meningitidis
atgaacattactcaaattctttcccaagaactctccgcgactgccgcgcaaatcaccgccgccgtcgagcttttggacgacggcgcgaccgtgccgtttatcgcccgctaccgcaaggaagcgacgggcgggttggacgatacgcagttgcgccggcttgccgagcggctgcaatatctgcgcgagttggaagagcgcaaagccgttgttttaaaaagcattgaagagcaaggcaagctttcagacgacctcagggcgcaaatcgaagccgccgataacaaaaccgcgctggaagacctgtatctgccctacaaacccaaacgccgcaccaaagcgcaaatcgcgcgcgaacacggtttgcagccgctggcggacgtgttgcttgccgagcagtcgcaggacgtggaagccgccgcacaaggctacctgaacgaaaacgtccccgatgccaaagccgcgttggacggcgcgcgtgcgattctgatggagcagtttgccgaagacgcggaacttatcggcacgctgcgcgacaagctgtggaacgaagccgaaatccacgcgcaagtcgttgaaggcaaagaaaccgaaggcgaaaaattcagcgattatttcgaccaccgcgaacccgtccgcactatgcccagccaccgcgcgctggcggttttgcgcggccgcaacgaaggcgtgttgaacatcgcgctcaaataccagcccgacgacacgccgattacccggcaaagcgaatacgagcaaatcatcgcctgccgcttcaaggtttcagacggccacaaatggctgcgcgataccgtgcgtctgacttggcgcgcgaaaatctttttgtcgttggaacttgaagccctaggccgtctgaaagaagccgccgacaccgacgcgattaccgtgttcgcccgcaatctcaaagacttgctgctcgtcgcgcccgccggacggctgaccacgctgggtctcgaccccggctaccgcaacggcgtgaaatgcgccgtggtggacgacaccggcaagctgctggataccgtcatcgtctatttgcatcaagaaaacaatatgttggcaacgctgtcgcgcctgattaagcaacacggcgtgaagctcatcgccatcggcaacggcaccgccagccgcgaaaccgacaaaatcgcgggcgaactggtgcgcggaatgccggaaatggggctgcacaaaatcgtcgtgtccgaagccggcgcgtcgatttattccgcgtccgaactggcggcgcgcgagttccccgacttggacgtttccctgcgcggcgcggtgtccatcgcccgcaggctgcaagacccgcttgccgagttggtcaaaatcgaccctaaatccatcggcgtgggccagtatcagcacgatgtgaaccaaaaccagctcgccaaatcgctggacgcagtggtcgaagactgcgtgaacgccgtcggcgtggacgtgaataccgcctccgccccgctcttggcgcggatttccggcttgaatcaaacccttgcccaaaacatcgttgcctaccgcgatgaaaacggcgcgttcgacagccgcaaaaaattgctgaaagtaccgcgtttgggcgaaaaaaccttcgagcaggcggcaggctttttgcggattaacggcggtaaagagccgttggacgcgagcgccgtccaccccgaagcctatcccgtcgtcgccaaaatgctggcgcaacaaggcattagcgccgccgaactcatcggcaaccgcgagcgcgtgaagcaaatcaaagcgtccgacttcaccgacgaacgcttcggcctgccgaccattttggacatcctgtccgaactggaaaaacccggccgtgatccgcgcggcgagtttcagacggcatcgtttgccgaaggtatccacgaaatcagcgacttgcaagtcggtatgatactcgaaggcgtggtttccaacgtcgccaacttcggcgcgttcgtggacatcggcgtccatcaggacggcttggtgcacatctccgccctgtccaacaagttcgtccaagacccgcgcgaagtggtgaaagctggcgacgtggtgaaagtgaaagtgctggaagtcgatgctgcacgcaaacgcatcgcgctgaccatgcgcttggatgacgaaccgggcggcgcaaaacataaaatgccgtctgaaaaccgcagccgcgaacggacagccggccgcaaaccccaacgcaacgaccgcgccccagccaattcggcgatggcggatgcgtttgcgaagctgaagcggtaa

SEQ ID NO: 37871 - DNA, 618 bp, Neisseria meningitidis
atgccctatacggaagatatgcgcccgggcgataccgctaatccttatggcgcatccaaagcgatggtggaacggatgttaaccgacatccaaaaggccgatccgcgttggagcgtgattttgttgcgctatttcaacccgattggggcgcacgaaagcggcttgatcggcgaacagcccaacggtattcccaacaaccttttgccctatatctgccaagtggcttcgggcaggctgccgcaactgtcggtattcggcggcgattatccgacccccgacggtacgggaatgcgcgactacattcatgtgatggatttggcagaaggccatgtcgcggctatgcaggcaaaaagtaatgtagcaggcacgcatttgttgaacttaggttccggtcgcgcttcttcggtgttggaaatcatccgcgcatttgaagcggcttcgggtttgacgattccgtatgaagtcaaaccgcgccgtgccggtgatttggcgtgcttctatgccgacccttcctatacaaaggcgcaaatcggctggcaaacccagcgtgatttggcgcagatgatggaagactcatggcgttgggtcagcaacaacccaaatggctacgacgattaa

SEQ ID NO: 37872 - DNA, 1395 bp, Neisseria meningitidis
atgaccccttccgcactgaaaaaaaccgtcctactgctcggcactgcctttgccgccgcatccgtccacgcatccggctaccacttcggcacacagtcggtcaacgcgcaaagcacggcaaatgccgccgccgcagaagccgccgacgcatcgaccatcttctacaaccctgccggcctgaccaaactcgacagcagccagatttccgtcaacgccaacatcgtgctgcccagcattcattatgaggcggattccgccaccgactttaccgggcttcccgtccaaggttcgaaaagcggcaaaatcaccaaaaccacggtcgcgccccacatctacggcgcatacaaagtcaacgacaatctgaccgtgggcttgggcgtgtacgtccccttcggctccgccaccgaatacgaaaaagattccgtgttgcgccacaacatcaacaaactcggtctgaccagcatcgccgtcgaacctgtcgccgcgtggaaactcaacgaccgccattccttcggcgcaggcatcatcgcccaacatacttccgccgagctgcgcaaatatgccgactgggggattatggaaaaagcgaaagcactaaaagaaacaccccccaatccaactaaagccgcccaaatcaaagccgacggacacgccgatgtcaaaggcagcgattggggcttcggctaccaactggcgtggatgtgggacatcaacgaccgtgcgcgcgtgggcgtgaactaccgttccaaagtctcacacacgctcaaaggcgatgccgaatgggcggcagacgacgcggcggcgaaagcaatgtggagtacgatgcttgcagcaaacggctacacggcgaatgaaaaagcccgcgtcaaaatcgtaacgcctgagtctttgtccgtacacggcatgtacaaagtgtccgacaaagccgacctgttcggcgacgtaacttggacgcgccacagccgcttcgataaggcggaactggtttttgaaaaagaaaaaaccatcggtatgggcaaaaaatccgaccgcaccaccatcacccccaactggcgcaacacctacaaagtcggcttgggcggttcttatcaaatcagcgaaccgctgcaactgcgcgccggcatcgcttttgacaaatcgcccgtccgcaacgccgactaccgcatgaacagcctgcccgacggcaaccgcatctggttctccgccggtatgaaatatcatatcggcaaaaaccacgtcgtcgatgccgcctacacccacatccacatcaacgacaccacctaccgcacggcgaaggcaagcggcaacgatgtggacagcaaaggcgcgtcttccgcacgtttcaaaaaccacgccgacatcatcggcctgcaatacacctacaaattcaaataa

SEQ ID NO: 37873 - DNA, 1407 bp, Neisseria meningitidis
atgaccgccgctcctgatatcctctaccggcaagccgccgcccttttggaacaatccaataccgcccaagccctgcccctgttgcaacaggcggcagagcaaggttatgcggaagctgctttcgtattgggcaaccatctgctgcaaaacggccaaccggagcaggcactttcatggttggaagccgccgcggcccaacgccatcccaaagcactcttctccctgctgcaacaacgcgaacacaacggcaccccgaccggacagcttctcaacgactatgcctggctgggtgagcaggggcactcagaagcccaattaatcctcatgcgttaccacgcgcaacgcaacgatccacaatcgctctactgggcggaacttgctgccgcccgatatgccgcacctgcgtattaccatctggcacgccatcatcaacgccaaggcgacgttgaaacagccatcgaacaatacgaaaaagcggcagcactcggcgtaactgccgcctgctggcaacttggtcaaatctacttctacggtacaggtgtcagccccaaccacgcacaagccgaacactatctcgaaccagccgcacaagccggccacatcgccgcacaaaccctgctggccgaccttcttgccgcccaacgcaaacccgaagccttagaatggtatcgtcgtgccgccaataaggagcaagcggaagcacaagccaagctggcccaatacgccctgaccggcgaactttccgaacgcgatccgttccaagcggcgcgctatgccaaagccgctgccgagaaaaaccatcctgaagccctgaaaatcatgggcgacctctaccgctacggcctcggcatcaaagctgacaaccatatcgcgcacgattactaccaccgtgctgccgcgctgggttctgccgccgcagcacaaaaactcatcagcgacgccgcgctgtaccatccgcaacaatacgaacaaatcaaaactgccgccctgcaacagcaacaaaccgaaaccatctaccgtttggcggaaacacaagcccatgccatcggtcgtcccgccgactataatgccgcacgcaaaaattacatggaagctgctgagttccaccataaaaacgcggcggctgccttaggccgcatctaccattacggcctcggtacggcgcaagatcctcgggcggctgcacactggtacgccatcgctgccgaacaaaaccacccttccgcccaataccacctcgcctgtttttactatcacggacaaggtgtcggctgtcatgttccgaccgcctgctactggctgcaggctgccatcagcaacggccacacttcggccgaatcattaatatccctattagaacaatggcgacgcgaagcacaccatgccatcggacaaaaggccgtctga

SEQ ID NO: 37874 - DNA, 552 bp, Neisseria meningitidis
atgaaagttttgaacggttggtcggacaggaagatgtggcgggttttgagtgctttgccgataggcgtggtgttttttgatttgatctacggttttgtgttgaatgtgttgcagggtttggatttgcagcgtgccgtgccggattcggaaggcgtgttggcggttacgcccgatattgcattcaacagtttgcagattgtcgccaacggcggtatggcggcggtggtctgtttcgggttggcggttgtgtttttgctcaaccgttcggtgcggcggcggcaggtgttggaaatcggggtgttccggatgttggggctggtggcggtattggcgttcagtgcgccgtcggtgtgggagtgggcgaacgcgctgccgctgctgctgaagggcgcggacgtggtcaatacggggaatgcgcgttatgtgctgacggctttgtgtatgccctttccggcggtgtcgtgcgtcatcgggctggtggggcggttcaggcttcagacggcatcgggcagggcggcaaagtcagggggtgcgggcaaggcggacggatag

SEQ ID NO: 37875 - DNA, 459 bp, Neisseria meningitidis
atggaaaccccgaaactcagtgtcgaagccattgaaaaaggtacggttatcgaccatattcccgccggcagggggctgaccatcctgcgccagttcaaacttttgcactacggcaacgcagtaaccgtgggcttcaacctgcccagcaaaacccaaggcagcaaagacatcatcaaaatcaaaggcgtgtgcttggacgacaaagccgccgaccgccttgccctgtttgcacccgaagcagtggtcaacaccatcgacaatttcaaggttgtgcagaaacggcatttgaacctgcccgacgaaatcgccgaagtgttccgctgtccgaacacgaattgcgccggccacggcgagccggtcaaaagccggttttatgttaaaaaacacaacgggcagacgcggctgaaatgccattactgcgaaaaaacctacagccgggattcggtggcggaagcctga

SEQ ID NO: 37876 - DNA, 666 bp, Neisseria meningitidis
atgatgatgcacgcttctgtccaaagccgtttcgcaccgatactttatgttttgattttctttgccggttttttgaccgcgcaaatctggttcaatcagaaagcctatactgaagagctgcctccgcttctgtccgcattgtccgccgtcgcgctggtgtggctggcgtgggcgttcgtgtcggcgcgttcaaaggctaaggcggaaaagttctaccgcgaaaaaatgatacagaacgaaagcatacaccccgtcctgcacgcttctttgcaacacttggaacacaagccgcaaatgctcgccctgctggtcaaaaaccacggtaaagggatggcggaacaggtcaggtttaaggcggaagtgctgcccgacgacgaagacgcgcgcacgattgccgccgagttggcaaaaatggatatgttcgcattggggacggacgcggtcgcctcgggcgaaacctatggacgcgtgttcgccgatattttcgagttgtcggcggctttggaagggcgcgcgttcaaaggaatgttgaaactgacggcggaatataaaaacatcttcggcgatgcctgcagttcggaaacggcgttggagttgggcgcgctcaatcaggcgttgcaggagatttcaaaaacatcggaaaagtccaaacggatattttattga

SEQ ID NO: 37877 - DNA, 1278 bp, Neisseria meningitidis
atgcgtagcagcgatattttaattgtagacgacgaaatcggcatccgcgacctgctgtcggaaatcctgcaggacgaaggttattcggtcgcattggcggaaaacgccgaagaggcgcgcaagctgcgccatcaggcgcgccccgcgatggtgctgctggatatttggatgcctgattgcgacggcatcacccttttgaaggagtgggcgaaaaacgggcagctcaatatgccggtggtgatgatgagcgggcatgccagcatcgataccgccgtggaagccaccaaaatcggtgcgctcgactttttggaaaaaccgatttccctgcaaaagctgctgtccacggttgaaaacgcgttgaagtacggtgcggcgcaaaccgaaacggggcctgtattcgacaagctgggcaacagtgcggcgattcaggaaatgaaccgtgaggtaggggctgcggtgaaacgtgcctctcccgtacttttgacgggcgaggcaggttcgccgtttgaaacggtggcacgctatttccataaaaacggtacgccgtgggtcagcccggcaagggtcgaatatctgatcgatatgccgatggaactgttgcagaaggcggagggcggcgttttgtatgtcggcgacatagcccaatacagccgcaacatccaagccggcattgcctttattgtcggcaaggcagaacgctgccgcgtcagggtggtcgcatcgggcagcagggcggcaggttcagacggcattgcctgcgaggaaaagctggcggaactgctgtcggaatcggtcgtccgtattccgccgctgcgtatgcagcatgaagatattcccttcctgatacaggggattgcctgcaatgtggcggaaagccaaaagattgcgcccgccgcattcagtgaagatgcgcttgccgtgctgacccgttacgactggccgggaaatttcgaccaactgcaaagcgtcgttgcaacgctgttgttggaggcggacggacaggaaatcggcgcggcggcggtttcttcccttttggggcagaatgtgcctgccgagggagcagaagatatggtgggcgggtttaatttcaacctgcccctgcgcgaattgagggaggaggtggagcggcgttatttcgagtaccacatcgcccaagaaggtcagaatatgagcaaagtggcgcagaaagtcggtttggaacgcacgcacctttaccgcaaactcaaacagctcggcatcggcgtttcgcgccgggcgggggaaaaaaccgaagaatag

SEQ ID NO: 37878 - DNA, 2307 bp, Neisseria meningitidis
atggcgaaaaacctattaatcgtcgaatccccgtccaaagccaaaaccctgaaaaaatatttgggcggcgattttgaaatccttgcatcctacggacacgtccgcgacctcgtccccaaaagcggcgcggtcgatcccgacaacggctttgcgatgaaataccaactcatcagccgcaacggcaaacacgtcgatgccatcgtcgccggtgccaaagaagctgaaaacatctacctcgccaccgacccggatagggaaggcgaagccatttcctggcatcttttggaaatcctcaaatccaaacgcggcttgaaaaacatcaagccgcagcgtgtcgtgttccacgaaatcaccaaaaacgccgtgctcgatgccgttgcccatccgcgcgaaatcgaaatggacttggtcgatgcgcaacaagcccgccgtgctttggactatttggtcggctttaacctttcgccattgttatggaaaaaaatccgccgaggtttgagcgcggggcgtgtgcaaagccctgctttgcgcctgatttgcgaacgcgaaaacgaaatccgcgcgtttgaagcgcaggaatattggacggtgcatctcgacagccacaaaggccgcagcaagttcaccgccaaactcgcccaatacaacggcgcgaaactcgaacaattcgacctgccgaacgaagccgcgcaagccgacgtattgaaagaactcgaaggcaaagaagccgtcgttaccgccattgaaaagaaaaagcgcagccgcaatcctgccgcgccgttcaccacttctaccatgcagcaggatgccgtgcgcaaactcggcttcaccaccgaccgcaccatgcgtaccgcccaacagctttatgaaggtatagacgtagggcagggcgcgatcggtctgattacctatatgcgtaccgacagcgtgaatttggcggatgaagcgttaaccgaaatccgccattacattgaaaacaaaatcggcaaagaatatctgccgagtgccgccaaacaatacaaaaccaaatccaaaaacgcccaagaagcccacgaagccatccgtccgacttccgtgtaccgcacgcccgaaagcgtcaaacccttcctgagcgcagaccagttcaaactctatcaaatgatttggcagcgcaccgtcgcctgtcagatgacgcctgccaaattcgaccaaaccaccgtcgatattaccgtcggcaaaggcgtattccgcgtaaccggacaagtgcaaaccttcgcaggctttttgagcgtgtatgaagaaagcagcgatgacgaagaaggcgaagacagcaaaaaactgcccgaaatgagcgaaggcgataaattgcccgtggacaaactctacggcgaacaacactttaccactccgccgccacgctacaacgaagccacgctggttaaagccctcgaagaatacggcatcggccgcccctcgacctacgccagcatcatctccacgctcaaagaccgcgaatacgttacccttgagcaaaaacgcttcatgcccaccgacacaggcgacatcgtcaacaaattcctgaccgaacacttcgcccaatacgtcgattaccactttaccgccaaactcgaagaccagcttgacgaaatcgccggcggcaaacgccaatggattcccttgatggacaaattctggaaaccgttcatcaaacaagtggaagaaaaagaaggcatcgaacgcgccaaatttaccacgcaggaacttgatgaaacctgcccgaaatgcggcgaacacaaactgcaaatcaagttcggcaaaatgggccgtttcgttgcgtgtgccggctatcccgagtgcagctacacgcgcaatgtcaatgaaaccgccgaagaagccgcagagcgcatcgccaaagccgaagccgaacaggcagaactcgacggacgcgaatgtcctaaatgtggtggtcgcctagtgtacaaatacagccgaaccggcagcaaattcatcggctgcgccaactatccgaaatgcaaacacgtcgagccgctggaaaaaccgaaagataccggcgtccagtgtccgcaatgcaaaaaaggcaacctcgtcgagcgcaaatcccgctacggcaaactgttttacagctgcagcacctatcccgactgcaactacgccacctggaacccgcccgtcgccgaagaatgcccgaactgccattggccggtcttgaccatcaaaaccaccaaacgctggggcgtcgaaaaagtctgcccgcaaaaagaatgcggctggaaagaacagattgaaccgcccgcgccgaaggagtaa

SEQ ID NO: 37879 - DNA, 318 bp, Neisseria meningitidis
atggcggaaaagctggcgatgtcggcaggcgggtatgccaaaatcgaacgaggcgaaacgcagttgaatatcccgcgtttggagcagttggcgcagattttcaaaattgatatgtgggacttgctcaaatcgggcggcggcgggatggtgttgcagattaatgaaggtgatagtggtggcgatattgcgttgtatgcgtcgggtgatgtttcgatgaaaatagaatttttaaaaatggagttgaaacactgcaaagaaatgttggaacaaaaagacaaagaaatcgagctgctccgcaagctgaccgaaaccgtttaa

SEQ ID NO: 37880 - DNA, 570 bp, Neisseria meningitidis
atggcggcaggcaaacataccaaacacagcaaccgggtacgcattatcggcgggcaatgccggggcaggaaattgagtttcacatccgccgacggactgcgtccgacacccgacagcgtgcgtgaaaagctgtttaactggctgggacaggatttgacgggtaaaacggttttggatctcttcggaggcagcggcgcactcggtatagaagccgcttcgcgcaacgccaaacgcgtgctgatttcggataacacccgccaaaccgtgcagaccttgcagaaaaacagtcgcgaactgggtttggggcaggtgcaaatcgtcttttcagacggcatcgcatatttgaagaccgtatccgaacagtttgatgttgtctttctcgacccgccgtttgcatggcaggactggcaaatcctgtttgatgccttgaagccgtgcctgaacccccgggcattcgtctatctcgaggcgggtacgctgccgaatattcccgattggctgacggaatatagagaagggaaatcggggcagagtacatttgaattaagggttttccaagtggctgaataa

SEQ ID NO: 37881 - DNA, 537 bp, Neisseria meningitidis
atgtcgaaaaaatggtatgttgtacaggcgtattcggggtttgagaagaatgtccaacgaatattggaagagcgcattgcccgtgaggagatgggagattatttcggacaaattctggtgcctgtagagaaagttgttgatatccgcaatggtcgtaagactattagtgaaagaaagtcatatcctggttatgtgctagttgagatggaaatgacagatgactcttggcatcttgtaaaaagcaccccccgtgtttccggttttattggagggagggctaatagacccatgccgattagtcagagagaggctgaaattattttacagcaggttcagaccggcatagagaagccgaaaccaaaagttgaatttgaggtcggtcaacaggttcgtgtaaatgaagggccgtttgcggatttcaacggtgtggttgaggaggtcaattatgaacggaataagttacgcgtgtctgttcagatatttggtagagaaacacccgttgagctggagttcagccaggttgaaaagattaactga

SEQ ID NO: 37882 - DNA, 501 bp, Neisseria meningitidis
ttgagtctcaatattgaaaccaagaaagtggcggtcgaggaaattagcgcggcaattgctaatgctcaaaccctcgtagtcgctgaatatcgcggtatcagtgtttccagtatgactgagcttcgtgcgaatgcacgtaaagaaggcgtttatttgcgcgttctgaaaaatactttggctcgtcgtgcagtgcaaggtacttcatttgcagaattggccgatcaaatggttggtccgttggtttacgctgcttctgaagatgctgttgctgctgctaaagtgttgcaccaattcgcgaaaaaagatgacaaaattgtcgttaaagccggttcttacaatggcgaagtaatgaatgctgctcaggttgctgagttggcttctattccgagccgcgaagagctgttgtccaaactgttgttcgttatgcaagctcctgtatcgggctttgcgcgcggtttggctgctttggcagagaaaaaagccggcgaagaagccgcttaa

SEQ ID NO: 37883 - DNA, 4179 bp, Neisseria meningitidis
atgaactattcgtttaccgagaaaaaacgtatccgtaagagttttgcaaagcgggaaaatgttttggaagttcctttcttgctagcaacccaaattgattcttatgcgaagtttttgcagctggaaaatgcttttgacaaacgtaccgatgacggtctgcaggcggcatttaattctattttcccgattgtgagccataacggttatgcgcgattggagtttgtgcattacacattgggcgagcctttgttcgatattcccgaatgtcagttgcgcggaatcacttatgcagcccccttgcgcgcgcgtatccgtttggtgattttggataaggaagcatctaaaccgacggtaaaagaagttcgtgaaaacgaagtgtatatgggcgaaattccgttgatgaccccgagcggttcttttgtgattaacggcacagagcgtgtgattgtctcccagttgcaccgttcgcccggcgtattcttcgagcatgacaaaggtaagacgcactcttccggcaagttgttattctccgcccgtatcattccctaccgtggttcatggttggattttgaatttgatccgaaagatttgctgtatttccgtatcgaccgccgccgtaaaatgccggtaacgattttgttgaaggctttgggctacaacaatgagcaaatcttggatattttctacgacaaagaaacgttctatttgtcttcaaacggtgttcaaaccgatttggtcgcaggccgtctgaaaggcgaaactgccaaggtcgatatcttggataaagaaggcaatgtattggttgccaaaggtaagcgcattactgcgaaaaatatccgtgatattaccaatgcaggcctgacccgtttggatgtagaaccagaaagcctgctgggcaaagcattggctgccgatctgattgattcggaaaccggcgaggtattggcttctgccaatgatgaaattacagaagagttgttggccaaatttgatatcaacggcgtaaaagaaattacgaccctttacatcaatgagttggatcagggtgcttatatctccaataccttgcgtacggatgagactgccggccggcaggcggcgcgtgttgcgatttaccgtatgatgcgtccgggcgaaccgcccactgaagaggcggtcgagcaattgtttaaccgcttgttcttcagtgaagacagctacgatttgtcccgcgtaggccgtatgaaatttaatacgcgcacatacgaacaaaaactgtccgaagcccaacaaaactcttggtacggccgcctgctgaacgaaacgtttgccggtgctgccgacaaaggcggttatgtcctgagcgtcgaagatattgtcgcctcgattgcgactttggtcgagttgcgtaacggccatggcgaagtggacgatatcgatcacttgggcaaccgccgagtacgttcggtaggcgagctgactgaaaaccaattccgtagcggtttggcccgtgtggaacgtgccgtaaaagaacgtttgaatcaggcggaatcagaaaacttgatgccgcacgatttgattaatgcaaaacctgtttctgctgctattaaagaattcttcggctccagccaattgagtcagtttatggatcagaccaatcccttgtctgaagtaacccataaacgccgcgtatccgcattgggtccgggcggtttgacccgcgaacgtgcaggatttgaggtgcgggacgtgcatccgacccactacggtcgcgtatgtccgattgaaacgcctgaaggtccgaacatcggtttgatcaactcattgtccgtttatgcgcgcaccaatgattacggtttcttggaaacgccttaccgccgcgttatcgacggcaaagtaaccgaggaaatcgattacttgtctgccatcgaagaaggccgctatgtgattgcacaggcgaatgccgatttggattcagatggcaatctgattggcgatttggttacctgtcgtgaaaaaggcgaaaccattatggcaacgcccgaccgcgtccaatatatggacgtggcaactggtcaagtggtatccgttgcagcatccctgattccattcttggaacatgatgacgcgaaccgcgcattgatgggtgccaacatgcaacgtcaggcagtgccttgcttgcgtcctgaaaaaccgatggtcggtaccggtatcgagcgttccgttgccgttgactctgctactgcaatcgttgcccgccgaggcggcgtggtcgagtatgtcgatgccaaccgcgttgtgatccgtgtccatgacgacgaagcgactgccggtgaagtgggtgtcgatatttacaacttggttaaattcacccgttccaaccagtctaccaatatcaatcagcgtcctgccgtcaaagccggcgatgttttgcaacgcggcgatttggtggccgacggcgcgtccaccgatttgggcgaattggctttgggtcaaaacatgaccatcgccttcatgccgtggaacggttacaactacgaagactcgattctgatttccgaaaaagtggctgcggacgaccgctatacttcgattcacattgaggaattgaatgtcgttgcccgcgatactaagctgggtgcggaagacattacccgcgatattccgaacttgtccgagcgtatgcaaaaccgtttggacgaatccggtatcgtttacatcggtgcggaagtagaagccggcgatgtgttggtaggcaaggtaacgcctaaaggcgaaacccaactgacgccggaagaaaaactgctgcgcgccatcttcggtgaaaaagcatctgacgtaaaagatacttcattgcgtatgcctaccggcatgagcggtaccgttatcgacgttcaagtcttcactcgtgaaggtattcaacgcgacaaacgcgcccaatccattatcgattccgagttgaaacgctaccgtttggatttgaacgaccaattgcgtattttcgacaacgacgcattcgaccgtatcgaacgtatgattgtgggtcaaaaagccaatggtggtccgatgaagctggctaaaggcagcgaaattactaccgaatatttggcgggtctgccgagcaggcacgattggttcgatatccgtctgaccgatgaagatttggccaagcagttggaactgattaaagtgagcctgcaacaaaaacgcgaagaagcggacgagttatacgaaatcaagaagaaaaaactgacccaaggcgacgaattgcaacccggcgtacaaaaaatggtgaaagtttttatcgccatcaaacgccgtctgcaagccggcgacaaaatggcgggccgccacggtaacaaaggcgtggtatcgcgcattctgccagtggaagacatgccttacatggcggacggccgtccggtagacatcgtactgaacccattgggcgtaccttcccgtatgaacatcggtcagattttggaagttcacttgggttgggcagcaaaaggtatcggcgagcgtatcgaccgtatgctgaaagagcaacgcaaagcaggcgagttgcgcgagttcttgaacaaactctacaacggcagcggcaagaaagaagatttggatgccctgactgatgaagaaatcatcgaactggcctccaacctgcgtaaaggtgcatctttcgcctctcctgtattcgacggtgcgaaagagtctgaaatccgcgaaatgttgaacttggcttatccgagcgacgatcctgaggttgaaaaactgggcttcaacgacagtaaaacccaaatcacgctgtatgacggccgttcaggcgaagcatttgaccgcaaggttacagtaggtgtgatgcactatctgaaactgcaccacttggttgacgaaaaaatgcacgcgcgttctaccggtccgtacagtctggttacccagcagcctttgggcggtaaagcccagttcggcggccaacgtttcggtgagatggaggtttgggcactggaagcatacggcgcagcctacacgctgcaagagatgctgactgtgaagtctgacgacgtgaacggccgtaccaaaatgtacgaaaacatcgtcaaaggcgaacacaaaatcgatgccggtatgcccgagtccttcaacgtattggtcaaagagattcgctcactgggcttggatatcgatttggaacgttactaa

SEQ ID NO: 37884 - DNA, 321 bp, Neisseria meningitidis
atgggtatgaatcaacaacgtttgactcaagtgattttggcacctatcgtttctgaaaaaagcaacgtattggctgaaaaacgcaaccaaatgacgtttaaagtcttggcaagtgcaaccaaacctgaaatcaaagcggctgtcgagctgctgtttggtgttcaagttgcttctgtaactaccgttacaactaaaggcaaaactaagcgttttggtcgtactttgggccgccgccgcgatgttaaaaaagcttatgtaagcttggctgccggtcaagagttggatttggaagccgctgctgcagctgcagataaggaataa

SEQ ID NO: 37885 - DNA, 714 bp, Neisseria meningitidis
atgatggtttatataatgaatgctttcgatataaagtcgacaaagatggacgtattgtctatatctttgcatacgtcagacttgtttgatttggaagatgtgctggtcaaattgggcaagaagtttcaagagtctggtgttgttccatttgtgctggatgttcaagagtttgattatcccgagtctttggatcttgctgcattggtttcgttgttttcaaggcatggtatgcaaattttgggtctgaagcattctaatgaacgttgggctgctgcggctatgaagtatcatttgctgttttgtctgtctcattcggaaaatgttaaagaactgggtcaggttgaggtgcagaacacggaggatggtcagaaagcaaggaaaacagtattgattacatcccctgtccgtaccggtcagcaggtttatgccgaagatggcgatttgattgttacgggggcggtcagccagggggcggaattgattgcggatggcaatatacatatttatgcgccgatgagggggcgtgctttggccggtgccaagggtgatacttctgcccgcatatttatccactccatgcaggcagaactggtttctgtggcgggtatttaccgtaattttgaacaggatttgccgaaccatctgcacaagcagccggtacagatattgttgcaggataaccgattggttatcagtgcaattggctcagagtaa

SEQ ID NO: 37886 - DNA, 921 bp, Neisseria meningitidis
atgaccttaaccgaattgcggtacatcgtcgcagtcgcccaagaacgtcatttcggcagggcggcgcggcgttgttttgtcagtcagcccactttgtctattgccattaagaaattggaagaagagcttgccgtctctttgtttgaccggagcagcaacgatattattacgaccgaggcgggggaacgtatcgttgcacaggcgcgtaaggtgttggaagaggcagagcttatcaggcatttggcaaatgaagaacaaaacgagctggagggtgcgttcaaactcgggctgatttttacggttgcgccgtacctgctgccgaaactgattgtctcgttgcgccgtactgcaccgaaaatgcctttgatgttggaagagaattacacgcatactttgaccgagtcgctcaaacgcggggacgttgatgcgattatcgttgccgaaccgtttcaagagccgggcattgttaccgaacccttgtatgacgaaccgtttttcgtgattgtcccgaaagggcattcatttgaggaactggatgccgtttcgccccggatgctgggtgaggagcaggttttgctgctgacggaaggcaactgtatgcgggatcaggtactctcaagctgttccgaattggcggcgaaacaacgtatacaggggttgaccaatacattgcagggcagctcgattaatacaatccgccatatggttgccagcggtttggcaatcagcgtgttgccggcaaccgcactgaccgaaaacgatcatatgctgttcagcattattccgtttgaaggtacgccgccaagccggcgggtcgtattggcgtaccgccgcaattttgtccgtccgaaggcgttgtcggcgatgaaggcggcgattatgcagtcgcagcttcacggggtaagttttatccgcgactag

SEQ ID NO: 37887 - DNA, 810 bp, Neisseria meningitidis
atgcccgatttttcgatgtccaatttggccgttgccttttccattacgttggctgccggtttgtttaccgtattaggcagcggcttggtgatgttttccaaaacgcccaatccgcgcgtgttgtcgtttggtttggcatttgccggcggtgcgatggtgtatgtttccctgacggagattttcagtaagtccagcgaggcgttcgctgaaatttatgataaagaccacgcgtttgcggcggcgaccatggcatttttggcagggatgggcggcattgcgctgattgaccgtctggtgccgaacccgcatgaaactttagacgcgcaagacccgtcgtttcaagaaagcaaacgccgccatatcgcgcgagtcggcatgatggcggcgtttgcgattactgcgcacaatttccccgaaggcttggcgacgttttttgccacattggaaaatccagcagtcgggatgcctttggccttggcgattgccatccataatattccggagggcatttccatcgccgcgccggtttattttgccacccgcagccgtaagaaaacggtgtgggcgtgtctgctatccggcttggccgagccgttgggggcggctttgggctatttggttttgcagccgtttttgtcgcctgccgtgtttggttcggtattcggcgtgatagccggtgtgatggtgtttttggcgttggacgagctgctgccggctgccaaacgctattcagacggccatgaaaccgtttacggcctgacaatgggcatggcggtgattgccgtcagcctggtattgttccatttttaa

SEQ ID NO: 37888 - DNA, 1341 bp, Neisseria meningitidis
ttgcacacccttctagcttttatcttcgccatcctgattttggtcagcctgcacgagttcggacactacatcgttgccagattgtgcggcgtcaaagtcgtacgcttttccgtcggcttcggcaaaccgtttttcacccgaaagcgcggcgacaccgaatggtgcctcgccccgattccgttgggcggttacgtcaaaatggtcgatacgcgcgaaggcgaagtatcagaagccgatttaccctacgcttttgacaaacaacaccccgccaagcgcatcgccatcgtcgccgccggcccactgaccaacctcgcactggcggttttgctgtacggactgagcttttccttcggcgtaaccgaactgcgcccctacgtcggcacagtcgaacccgacaccattgccgcccgcgccggcttccaaagcggcgacaaaatacaatccgtcaacggcacacccgttgcagattggggcagcgcgcaaactgaaatcgtcctcaacctcgaagccggcaaagtcgccgtcggcgttcagacggcatcgggcgcgcaaaccgtccgcaccatcgatgccgcaagcacgccggaagccggtaaaatcgcaaaaaaccaaggctacatcggactgatgccctttaaaatcacaaccgttgctggcggcgtggaaaaaggcagccccgccgaaaaagcaggcctgaaaccgggcgacaggctgactgccgccgacggcaaacccattacctcatggcaagaatgggcaaacctgacccgtcaaagcccgggcaggaaaattgccttaacctacgaacgcgccggacaaacccataccgccgacatccgccccgatactgtcgaacagtccgaccacaccctgatcgggcgcgtcggcctccgtccgcagccggacagggcgtgggacgcgcaaatccgccgcagctaccgtccgtctgttgtccgcgcattcggcatgggctgggaaaaaaccgtttcccactcgtggacaaccctcaaatttttcggcaaactaatcagcggcaacgcctccgtcagccatatttccggaccgctgaccattgccgacattgccggacagtccgccgaactcggcttgcaaagttatttggaatttttggcactggtcagcatcagcctcggcgtgctgaacctgctgcccgtccccgttttggacggcggccacctcgtgttttatactgccgaatggatacgcggcaaacctttgggcgaacgcgtccaaaacatcggtttgcgcttcgggcttgccctcatgatgctgatgatggcaatcgcttttttcaacgacattacccgcctgcttggctga

SEQ ID NO: 37889 - DNA, 1185 bp, Neisseria meningitidis
atgacaccacaagtcctgaccatattaggcagtaccggcagcataggcgaaagcacgctggacgttgtctccctccaccccgaaaaattccgcgtattcgcgctggcagggcataagcaggtcgagaaactggcggtgcaatgccggacgttccgccccgaatatgccgtcgttgccgatgccgaacacgccgcccggcttgaagctttgttgaaaggcgacggcacggcgacgcaggttttacacggcgcgcaggcattggttgacgttgcctctgccgacgaagtcagcggtgtcatgtgcgccatcgtcggggcggtggggctgccttccgcgctcgcagcggcgcaaaaaggcaaaaccatttatctggcgaacaaagagacgctggtggtttccggcgcgttgtttatggaaaccgcccgtgcaaacggcgcggcagtgctgcccgtcgacagcgaacacaacgccgttttccaagttttgccgcgcgattacgccggccgtctgaacgaacacggcatcgcttcgattatcctgaccgcttccggcggcccgtttctgaccgccgatttaaacacgttcgacagcattacgcccgaccaagcggtcaaacaccccaattggcgtatgggacgcaaaatctccgtcgattccgccaccatgatgaacaaaggtttggagctgattgaagcgcattggctgttcaactgtccgcccgacaaactcgaagtcgtcatccatccgcaatccgtgatacacagcatggtgcgctaccgcgacggctccgtgttggcgcaactgggcaatcccgatatgcgaacgcccatcgcttattgtttgggtttgcccgagcgcatcgattcgggtgtcggcgacctggatttcgacgcattgtccgcgctgaccttccaaaagcccgactttgaccgcttcccctgcctgaagctcgcctatgaagccatgaacgcaggcggagccgcgccctgcgtattgaacgccgccaacgaagccgccgtcgccgcctttttggacgggcagattaagtttaccgacattgccaaaaccgtcgcccattgtctcgcacaagacttttcagacggcataggcgacataggggggctcttggcgcaagatgcccggacacgcgcacaagcgcgggcatttatcggcacactgcgctga

SEQ ID NO: 37890 - DNA, 747 bp, Neisseria meningitidis
atgaaaagcagcacgcaggccgttttggaacacaccgccattcccaagcatatcgccgtgattatggacggcaacggccgttgggcgaaaaaacgtttcctcccgcgcataatgggacacaaacgcggtttggacgcattggaaaatatggtgaagcattgcgccaaactgggtgtgcaatatctgaccgtgtttgccttttcaaccgaaaactggcgccgccccgaagacgaagtttcgttcctgatggggctgtttttacaggctttgcaaaaacaggtacgccgcctgcacgaaaacaatatgcgcctgaaaatactgggcagccgcgaacgcttcagccgtcaaatcctgaagggcatcgaagaggcggaggcgttgacggcaaacaataccggtctgaccctgagcattgccgccgattacggcggcagatgggacattttgcaggcggcaaacaaactgattgccaaaggcgtatccgagattacggaagacacgctggcgaaacacttgatgctgggcgatgcgcccgagccggatttgttcatccgcaccggcggcgaaacgcgcatcagcaatttcctactctggcaaatggcttatgccgaactgtatttcaccgatattttgtggcccgattttgacggcaaggctttggacgatgccgtcgcttcgttccaaaaacgcgaacggcggttcggacgcacctccgagcaactgcctatcgaacagcaaaggaactga

SEQ ID NO: 37891 - DNA, 1128 bp, Neisseria meningitidis
atgaacacctcgcaacgcaaccgcctcgtcagccgctggctcaactcctacgaacgctaccgctaccgccgcctcatccacgccgtccggctcggcggggccgtcctgttcgccaccgcctccgcccggctgctccacctccaacacggcgagtggatagggatgaccgtcttcgtcgtcctcggcatgctccagtttcaaggggcgatttactccaaggcggtggaacgtatgctcggcacggtcatcgggctgggcgcgggtttgggcgttttatggctgaaccagcattatttccacggcaacctcctcttctacctcaccgtcggcacggcaagcgcactggccggctgggcggcggtcggcaaaaacggctacgtccctatgctggcggggctgacgatgtgcatgctcatcggcgacaacggcagcgaatggttcgacagcggcctgatgcgcgcgatgaacgtcctcatcggcgcggccatcgccatcgccgccgccaaactgctgccgctgaaatccacactgatgtggcgtttcatgcttgccgacaacctgaccgactgcagcaaaatgattgccgaaatcagcaacggcaggcgcatgacccgcgaacgcctcgaagagaacatggcgaaaatgcgccaaatcaacgcacgcatggtcaaaagccgcagccacctcgccgccacatcgggcgaaagccgcatcagccccgccatgatggaagccatgcagcacgcccaccgtaaaattgtcaacaccaccgagctgctcctgaccactgccgccaagctgcaatctcccaaactcaacggcagcgaaatccggctgctcgaccgccacttcacactgctccaaaccgacctgcaacaaaccgtcgcccttatcaacggcagacacgcccgccgcatccgcatcgacaccgctatcaaccccgaactggaagccctcgccgaacacctccactaccaatggcagggcttcctctggctcagcaccaatatgcgtcaggaaatttccgccctcgtcatcctgctgcaacgcacccgccgcaaatggctggatgcccacgaacgccaacacctgcgccaaagcctgcttgaaacacgggaacacggctga

SEQ ID NO: 37892 - DNA, 558 bp, Neisseria meningitidis
atgatcaacgatattcaaaaaacagccgaaggcaaaatgcagcgttcggtcgaagtactgaaagaaaatctggcgaaagtgcgtaccggccgcgcgcataccggcctgctcgaccaagtggaagtcgaatactggggcagcatggtccccgtcagccaagttgccaacgtaacgcttctggacgcgcgcaccatcggcgtgaaaccgtttgagggcaatatggcggtcaaagtcgagaaagccatccgcgattcaaacttggggctgaacccggcagctgtcggcgacctgatccgcgtgccgatgcccatgctgaccgaagaacgccgcaaagacctgattaaagtcgtacgcggcgaagcggaagaaggccgcgtctctatccgcaacgtgcgccgcgatgccaacgaccacatcaaaaaactcctcaaagacaaagaaatttccgaagacgaggcacgtcgcggcgaagaagcggttcaaaaactgaccgacaaatacattaccgaagccgacaaactcctgactgccaaagaagaagatttgatggcaatttaa

SEQ ID NO: 37893 - DNA, 1887 bp, Neisseria meningitidis
atgatttaccccaaaacctacgacgttatcgtcgtcggcggcggacacgccggcacagaagccgcgctcgccgccgcccgtatgggcgcgcagacgcttttgctcacacacaatattgaaacgctcggacaaatgtcgtgcaacccttccatcggcggcatcggcaaagggcatttggtgcgcgaactcgacgcgctcggcggcgcgatggcgttggcaaccgacaaatccggcatccagttccgccgtctgaacgccagcaaaggcgcggcagtacgggccacgcgcgcgcaggcggatcgtatcctatataaagccgccatccgcgaaatgttggaaaaccaagaaaacctcgaccttttccaacaagccgtcgaagacgtaacgctcgatggcgaccgcatttcaggcgtaatcaccgcgatgggcgtggagtttaaagcacgcgccgtggtgttgaccgcaggcacgtttttgtccggcaaaatccacatcggtttggaaaactacgagggcggacgcgccggcgaccccgccgccaaatcgctgggcggacgtttgcgcgaattgaagctgccgcaaggccgtctgaaaaccggcacgccgccgcgcatcgacggacgcacgattgacttttcccaactgaccgaacagcccggcgacacacccgttcccgtcatgtccgtgcgcggcaacgccgaaatgcacccgcgccaagtgtcctgctggattacgcataccaacacgcaaacccacgacatcatccgctcaggcttcgaccgcagccccatgttcaccggcaaaatcgaaggtgtcggcccacgctactgtccgtctatcgaagacaaaatcaaccgcttcgccgacaaagacagccaccagattttcctcgaacccgaaggtctgaccacgcatgaatactatccaaacggtatctccaccagcctgccgttcgacatccaaatcgccctcgtgcgcagcatgaaaggcctcgaaaacgcccatatcctgcgccccggctacgccatcgaatacgactacttcgacccgcgcaacctcaaagccagccttgaaaccaaaaccatccaaggcctctttttcgccggacaaatcaacggcacaacgggctacgaagaagccgccgcgcaaggcttgctcgcaggcgcaaacgccgtgcaatacgtccgcgaacaagacccgctcctgctgcgccgcgaacaagcctatctcggcgtattggtggacgacctcatcaccaaaggcgtgaacgagccttaccgcatgttcaccagccgcgccgaataccgcctgcaactcagggaagacaacgccgacatgcgtctgaccgaagacggctacaaaatcggcttggtgggtgaagaacaatggcgtatgttcaacgaaaaacgtgaagccatcgaacgtgaaatccaacgtttgaaaacaacgtggtacacaccgcaaaagctcgccgaagacgaacaaatccgcgtgttcggacaaaaactcagccgcgaagccaacctgcacgacctcctgcgccgcccgaacctcgattacgccgcgctgatgacgctcgaaggcgcgatgccgtctgaaaacctctccgccgaagtcatcgagcaagtcgaaatccaagtcaaataccaaggctatatcgaccgccaaaacgaagaaatcgacagccgccgcgacatcgaaaccttaaaactgcccgacgacatcgattacagcaaagtcaaaggcttatcggcagaagtacagcaaaagctcaaccagcacaaacccgaaaccgtcggacaagcaagccgcatttccggcgtaacccctgcggcagtggcattgctgatggtgcatttgaagcgcgggtttaaagacgcgaaataa

SEQ ID NO: 37894 - DNA, 1155 bp, Neisseria meningitidis
atggttgataaaaaaagccctttgattgccgtcagtgtcggcgaagcgtcgggcgacctgttgggggcgcacctgatacgcgccatccgcaagcgttgtccgcaggcgcgttttgtcggtatcggcggcgaactgatgaaggcggaaggtttcgagagcctttatgatcaggagcggctggcggtgcgcggctttgtcgaagtggtcaggcggctgccggaaattttacggatacgcagggggctggtacgggatttgctgtcgttgaaacctgatgtctttgtcggtatcgatgcgcccgattttaatttgggtgtggcggaaaagctgaaacggtcggggattccgaccgtgcattatgtcagcccgtcggtgtgggcgtggcggcgggaacgtgtgggcaaaatcgtgcatcaggtcaaccgcgtgttgtgcctgttcccgatggagccgcagctttatctcgatgcgggcggacgtgcggagtttgtcggtcatccgatggcgcagcttatgcccttggaagacgaccgtgaaacggcgcggcaaactttgggcgtggatgccggcatccccgtattcgccctgctgcccggcagccgcgtcagcgaaatcgactatatggcgccggtgttttttcagacggcattattgttgttggaacgctatcctgccgcatgcttcctgctgcctgccgcaacggaggcgacgaagcggcgtttggcggaagttttgcagcggccggagtttgccggattgccgctgacggtaatcgacagacagtctgaaacagtgtgcagggcggcggatgcggtgctggtaacgagcggtacggcgactttggaggtggcgttgtgcaagcgtccgatggtcatcagctacaagatttcgccgctgacttatgcttatgtgaaacgcaaaatcaaagtgccgcatgtcggcctgccgaatatcctgttgggtaaggaggctgtgccggaattattgcaatctgaagcaaaaccggaaaaactggcggcggcgttggcggactggtacgaacaccccgataaggttgccgcgctgcaacaggatttcagggcgttgcacctgctgttgaaaaaagatacggcggatttggccgcgcgcgcggttttggaagaggcgggatgttga

SEQ ID NO: 37895 - DNA, 378 bp, Neisseria meningitidis
gtgaacaaaaccctcatcctcgccctttccgccctcctcggccttgccgcgtgcagcgtcgaacgcgtttcactgttcccctcgtacaaactcaaaatcatacagggcaacgaactcgaacctcgcgccgtcgcctccctccgccccggtatgaccaaagaccaagtcctgctcctgctcggcagccccatactgcgcgacgcattccataccgaccgctgggactataccttcaacacctcccgcaacggcatcatcaaagaccgaagcaatctgaccgtctattttgaaaacggcgtgctcgtccgcaccgaaggcaacgccctgcaaaatgccgccgaagccctccgcgtaaaacaaaacgcagacaaacaataa

SEQ ID NO: 37896 - DNA, 1977 bp, Neisseria meningitidis
atgaacgaattttcgcttgcccctattgtggttgttttgctggtgtcggtcattacggtgatcctgtgccgcaagttcaacattccctccatgctgggctacctgctggtgggctttttggcggggcccggtatgctcagcctgattccgaaaagccatgcgacggattatttgggcgaaatcgggattgtgttcctgatgttcagtataggcttggagttttcgctgcccaagctgagggcaatgaggcggctggtgttcgggctgggtggtttgcaggtcggcgttacgatgctgtcggtaatgggcatactgatgctgacgggcgtcccgttcaattgggcgtttgccgtgtcgggcgcgttggcgatgtcgtccacggcgattgtgagccggattttgtcggaaaagacggaattggggcagccgcacggtcagatggcgatgggcgtgctgctgatgcaggacatcgccgtcgtgccgctgatgattctgattcccgcgctggcgggcggaggggacggaaatatttgggcggccttgggtttggcgtttgcaaaaatgctgctgacgctggggctgctgtttttcgtcggcagcaaaattatgtcgcgatggttcaggatggtggcaaaacgcaaatcgtccgaactctttatgatcaatgtgctgctggtaaccttgggtgtggcttatctgactgagctggaaggtttgtctatggcgttgggcgcattcgttgccggcatgctgctttcggaaacggaataccgtttccaagtcgaagacgacatccgcccgttccgcgatattttgctcggctttttctttatcacggtcggcatgaagctggacattcaggcattgatcggcggctggcggcaggtattgatgctgttggcaatgctgctggtgttgaaggcactggttgtgtttgccattgccttcaaaatgaaacattcggtcggcgacagcctcaaaacggctttgtatctcgcgcagggcggcgagttcggcttcgtgatgctggccattgccgggcagcttgatatggtttcgccagaatgggaacaggcggcgacggcggcggttctgctgtcgatgattatcgcgcccttcctcttgggcggcagcgatgcgctggtcgggcgtttggtcaagtcaagctgggacatgaagtcgctcgatctgcacagtatgctggtagaaaccatgagcaagtccgaccatgtgctgattgtcggcttcggcaggggcgggcagacggtcggacgcgtccttgcccaagaggatattccgtatttcgcgctcgacttggacattgcgcgggtgcaggttgccagaagtgcgggcgaaccggtgtcgttcggcgatgcgaaacgcagggaagtattggaagccgccggtctgggacgggcgaaaatggtggtggttacgctcaacaatatgcacgaaacgcaacacgttttagacaatgtgctgtccatgtatcccaatatgcccgtatatgtgcgcgccaccaacgacgattatgtgaaaacgtttaccgatataggtgcggaagaagccgtgtcggacaccaaagaaaccggactcgtgctggcaggctatgcgatgttaggcaacggcgcgtcgtatcggcacgtctatcagacgatggcaaatatccgccacagccgttatgccgcgttggagggactgtttgtcggtagtgatgatgaggcaggattcggcgaaaccggcgaaaccgtccgccacgcctttcctttggctgcagaagcatacgccgtcggcaaaacagtcggcacgcttccgatggcggcttacggcatcaaactcttgttcgtccgccgccgcaccggccggattgaaaacccggatgcctcgtttacattggaaggcggtgacgtgttggtggtcgcaggcaaaaaagaagaaattatctcttttgaaaactggagtttgcagggaatataa

SEQ ID NO: 37897 - DNA, 1386 bp, Neisseria meningitidis
atggtcagcatttttgatattttcaaaatcggtatcgggccttccagttcgcatacggtcggcccgatgaaggcagccgccgcctttgcgacaggtttggatgcacaggctgttcgcatcgtcatcgacatttacggctcgctcgcactgaccggatacggacacggtacatttgacgcgctgatgctcggtttggaaggcagcctgccgcacgacatcccgcttgccggcattcccgaacgcctcgaacgcatccgcacgcagcacatcctccggctcaacgggcaagaaatccgcttcatccccgaccgcgacctgaacatactcggcaatcaagtgctgcccaaacaccccaacggcctgcgttttaccgcctatgcttcagacggcacggtattgaatgaacaggtttattattcggtcggcggcggctttgtcgttaccgaagaagattttgaccggcaggcggaaacggaaaaagccgttccctatccctataccagttgcgccgaactgcttgcccgatgccgtctgaaccggctcgacatctccgaagtcgtgttggcaaacgaagccgcgcttgccggatgcggcgaagccgaaatccgccgccgcgccgctgccgttgccgaggttatggaaggctgcatcaaacgcggcttgggtgcggacggcgaactgcccggcggattgaacgtccgccgccgcgccccgcagcttgccgccaagctcaaagtcctgcgcgaaaccgaaatcgtcaacacccagctctggccgatggtgtacgccatggcggtcaacgaagaaaacgccgccggcggacgcgtcgttaccgcaccgaccaacggcgcggcaggcatcattcccgccgtattgcactatttccgcaagttcaatccgcacgccacacaggaacgcgtcgaaaacttcctgctcaccgcaggcgcaatcggcatcctctacaagaccaacgcctccatttccggtgcggatgtcggctgtcagggcgaagtcggcgtagcgtgttcgatggcggcgggcgcatacgccgaagtcatcggcggcacgcccaaacaagtggaaaacgccgccgaaatggcgatggaacaccatttggggctgacttgcgaccccgtcggcggactggtgcaaatcccctgcatcgagcgcaacggcatcgccgccgaaaaagccctcaaactcggcacgctcgcgcttttggaagacggcacggacaaaaaagtctcgctcgacgaagtcatccgaaccatgctgcaaaccggccgggatatgaaggcgacctacaaagaaacctctcttgccggactcgccgccacgctccggaaaaaagccgtccccgtatccgtgcgcgtggtcgagtgctga

SEQ ID NO: 37898 - DNA, 2391 bp, Neisseria meningitidis
atgactgaacaaaaacacgaagaatacggcgccgacagcattcaggtgctcgaaggcttggaagcggtacgcaaacgccccggcatgtacatcggcgacacgcaggacggcagcggtctgcaccacatggtgttcgaagtattggacaacgccattgacgaagcactcgccggacattgcgacaaaatcacggtaacgatacacgccgaccattccgtcagcgtcgccgacaacgggcgcggtatgcccaccggcatccacccgaaagaaggacgctccgccgccgaagtcatcatgaccgtattgcacgcgggcggtaaattcgacaacaacagctacaaaatctccggcggcctgcacggcgtgggcgtgtccgtcgtcaacgcgctgtccgactgggttacgctgaccatctaccgcgacggcaaagaacacttcgtccgcttcgtgcgcggcgaaaccgaagagccgttgaaagtggtcggcgattccgataaaaaaggcacgaccgtgcgcttcctcgccagtacggaaaccttcggcaacgtcgaatacagcttcgacatccttgccaaacgcatccgcgaactttcgttcctgaacaacggcgtggacatcgaattgaccgacgagcgcgacggcaaacacgaaagcttcgccctttccggcggcgtggctggattcgtgcaatacatgaaccgcaaaaaaacgcccttgcacgaaaaaatcttctacgcgttcggcgagaaagacggcatgagcgtcgaatgcgcgatgcagtggaatgacagctaccaagaaagcgtgcagtgttttaccaacaacattccgcaacgcgacggcggcacccacttgaccgcgttgcgccaagtgatgacccgcaccatcaacaactatatcgaagccaacgaagtggctaaaaaagccaaagtggaaaccgccggcgacgatatgcgtgaaggtctgacctgcgttttgtccgtcaaactgcccgatccgaaattctcatcgcaaaccaaagacaaactggtttccggcgaaatcggccccgtcgtcaacgaagtcatcagccaagccctgaccgacttcctcgaagaaaaccctgccgaagccaaaatcatcaccggcaaaatcgtcgatgccgcccgcgcgcgcgaagccgcccgcaaagcacgcgaaatcacccgccgcaaaggcgtgatggacggcttggggctacccggcaaactcgccgactgccaagaaaaagaccccgcattgtcagaactttatctggtcgagggcgattctgcaggcggttccgccatgcaggggcgcgaccgcaaattccaagcgattttgccgcttaagggcaagattttgaacgtcgaaaaagcgcgctttgaaaaaatgctcgccagtcaggaagtagccgctttgattaccgcgttgggcgcgggcatcggcaaagaagaattcaatgccgaaaaactgcgttaccaccgcatcatcatcatgaccgatgccgacgtggacggcgcgcacatccgcaccctgctcctgaccttcttctaccgccaaatgcccgagctggtcgaacgcggctacatctacattgcccagccgcctttatacaaagccaaatacggcaaacaagaacgatatctcaaagacgaattggaaaaagaccaatggctgctcggtcttgccttggaaaaagccaaaatcatttcagacggccgcaccatcgaaggcgcagaacttgccgacaccgccaaacaattcctgttggcaaaaaccgtcatcgaacaggaaagccgcttcgtagacgaactcgtcctgcgcgccatgctacacgcgtcgcccattgatttgacgtcgtctgaaaacgccgataaagccgttgccgaactttccggtctgcttgacgaaaaagaagtcgccctcgaacgcatcgaaggtcatgaaggacaccggttcatcaaaatcacgcgcaagctgcacggcaacgtcatggtcagctacatcgaacccaagttcctcaacagcaaagcctaccaaaccctcacccaaaccgccgccgcgctcaaaggcatggtcggcgagggtgccaagctttacaaaggcgaaaacgggtacgacgcggacagctttgaaaccgctttggacatcttgatgagcgttgcccaaaaaggtatgtccatccaacgatacaaaggcttgggcgagatgaaccccgagcagctgtgggaaaccacgatggatcccgccgtgcgccgcctgttgaaagtgcgcatcgaagatgccattgccgccgacgaagtgttcgttacgctgatgggcgacgaggtcgagccgcgccgtgcctttatcgaaaacaacgcgctgattgcccaaaatatcgacgcataa

SEQ ID NO: 37899 - DNA, 567 bp, Neisseria meningitidis
atgagtctttacgctttgctcttgattgcgctggggatgtcgatggatgcgtttgccgtcgcattggcaaagggtgcggcggtcaggatgcctccgcgcaaaattgcagcaacagccttggtgttcggctcggttgaagcactcacgccgctggcaggctgggtaggcggtttttatgccaaaccgtttatcagcgaatgggaccattgggcggctttcgtcctgctgggcgggctgggtctgaaaatgatgcgcgaagggctgtccggcaaggcggaagatgtgcgcgaaagcaaacgggaaagcctatggatgacggttttgactgcttttggaaccagtattgattccatgatagtcggggtgggcttggcgtttatggaggtaaacatcgcctttgccgccgcaatcatcggtatggcgacgacggtgatggtggcggtcgggctgacggcgggaagggctttgggcgtattgttcggcaggcgtgcggaatttgccggaggtttggtgttgattgccatcggtacatggacgctcttgtcgcatttgggtttgattcaatga

SEQ ID NO: 37900 - DNA, 474 bp, Neisseria meningitidis
atgactgatttttccgtttgggagaccgccccctttggtgcaaccgtcgatcatatcctgcaacgctaccacaatgtccaccgcgcacaatttgaagaattggtgccgctggcgcagaaagtggcccaagtccatgccgatacctttccggcagaaattgccgggctgcttgccgatatgcagaacgaactgctgatgcatatgatgaaggaggagcggatgctgtttccgatgattaatcagggtgtcggacgcggtgcggcgatgcccatcggcgtgatgatgcacgaacacgaagaacacgaccgcgccatcgcacggctcaaagagctgaccgacaatttccaaccgccagaaggggcttgcggaagctggacgcggctttacgcgctggcgaaagaaatggtggaggatttgaacgaccacattcatttggaaaacgatattttgtttgcccgcgtactcgattcttaa

SEQ ID NO: 37901 - DNA, 129 bp, Neisseria meningitidis
atgaacgaacaagaacttgacctcgacaatctcgacaacctgcttgaagattttgacggcgttaccatggaaggcggcgtcgattcagagaatgatgacggctgcgaaggcggcgcgtgcaaaatctaa

SEQ ID NO: 37902 - DNA, 2208 bp, Neisseria meningitidis
atgtttcccgaccaatccgcccccaacctgctgcaaggcttgaaccctgaacaactttccgccgtaacctggccgccgcaatccgcccttgtgctggcaggcgcgggcagcggcaaaacgcgcgtgctgaccacgcgtatcgcatggctgttgcaaaccggtcaggcaagcgtgcatagcattatggcggtaacgtttaccaataaagccgccaaagaaatgcagacccgtttgggcgcaatgattcccgtcaacgtccgcgccatgtggctcggcacgtttcacggtctctgccaccgctttttgcgcctgcaccaccgcgacgcaggcctgccgtcttcctttcaaattctcgacagcggcgaccagctttccctcatcaaacgcctgctcaaaagcctcaacatcgccgaagaaatcatcgcaccgcgttcgctgcaaggctttatcaacgcgcaaaaagaatccggtttgcgcgcttccgtgttgagcgcgcccgacccgcacacaagccgcatgatcgaatgctacgccgaatacgacaaaatctgccaacgcgaaggcgtggtcgattttgccgaactcatgctccgcagctacgaaatgctgcaaagcaacgaaatcctgcgccagcattaccaaaaccgcttcaaccacattctcgtcgacgagttccaagacaccaacaaactgcaatacgcctggctcaaactcatggcgggcggaaacgcagcggtatttgccgtcggcgacgacgaccaaagcatttaccgtttccgtggcgcaaacgttggcaatatgaccgcgctgatggaagaattccacatcgacgcgcccgtcaaactcgaacaaaactaccgctccgtcggcaacatccttgccgccgccaacgctgttatcgaaaacaacgacgaacgcctcggcaaaaacctgcgcaccgacgccgaagcaggcgacaaaattcgctactactccgcctttaccgacctcgaagaagcccggttcatcgtggacgaaaccaaagccctcgaacgcgaaggctgggatttggacgaaatcgccgtcctctaccgcagcaacgcccaatcgcgcgtcatcgaacaaagcctgttccgcagcggcatcccctacaaaatctacggcggcttgcgcttttacgaacgccaagaaatcaaacacgcgctcgcctacctacgcctcgccgtcaatcccgacgacgacaacgccctcttgcgtgtcatcaacttcccaccgcgcggcatcggcgcacgcaccgtcgagaaccttcagacggcctcaaacgaacaaggcatcaccctctggcaagccgcctgcaacgccggcgcgaaagccgccaaaatcgccgccttcgtccgcctgattgaagcactgcgcaaccaagtcggacaactgcccctgtccgaaatcatcgtcggcatcctcaaagacagcggcctgaccgaacactaccgaacccaaaaaggcgacaaccaagaccgcctcgacaaccttgacgaactcgtcaacgccgccatcgagttcaaacccgaagacagcaactttgaaaccctgcccgaaaacatttcagacgaccccgccttccccatcctcgccttcctcagcaacgccgccctcgaatccggcgaaaaccaagcaggcgcaggtgaaaaagccgtccaactcatgaccgtccacgccgccaaaggcttggaattcaacgccgtcttcctcaccggcatggaagaaggccgcttccccagcgaaatgagccttgccgaacgcggcggcctcgaagaagaacgccgcctcatgtacgtcgccatcacccgcgcccgcaaacgcctctacatcaccatggcacagcaacgcatgctgcacggacaaacccaattcggcatcgtctcccgcttcgtcgaagaaatcccacccgaagtattgcactacctgtccgtcaaaaagcctgcctacgacagttacggcaacacgcgtcaaactgccacgttcaaagacaaaatcatcgacgactacaaacagccgcaaacctacgcaggcttccgtatcggacaaaacgtccgccacgccaaattcggcaccggcgtgattatcgatgccgcagataaaggcgaatccgcccgactgaccatcaacttcggcaaacagggcgtgaaagagttggataccaagtttgcgaaattggaagcgatgtaa

SEQ ID NO: 37903 - DNA, 621 bp, Neisseria meningitidis
atgaattcgaccgcaagtaaaaccctgaaaggattgtcgctggtgtttttcgcctctggattctgcgccctgatttaccaggtcagctggcagaggcttctattcagtcacataggtatcgatttgagttcgattactgtcattatttctgtatttatggtcggcttgggtgtaggtgcgtatttcggtggacgcattgctgaccgttttccttcaagtatcatccccctgttttgcatcgctgaagtatccatcggtctgttcggtttggtaagcaggggtctgatttccggcttggggcatcttttagttgaggctgatttgcccatcatcgctgctgccaatttcctcttattgctgcttcctacctttatgatgggcgcgaccttgcccttgctgacctgtttttttaaccggaaaatacataatgttggcgagtctatcggtaccttatattttttcaacactttgggtgcggcactcggatcgcttgccgccgccgaatttttctacgtcttttttaccctctcccaaaccattgcgctgacagcctgctttaaccttctgattgctgcttcagtatggctgcgttacagaaaggatggatatagtgaacactaa

SEQ ID NO: 37904 - DNA, 1452 bp, Neisseria meningitidis
atgctttctttccttagcggcttattgagcttgggtatagaagtcttgtgggtaaggatgttttcgttcgcagcacagtccgtgcctcaggcattttcatttacccttgcctgttttctgaccggtatcgccgtcggcgcgtattttggcaaacggatttgccgcagccgctttgttgatattccctttatcgggcagtgcttcttgtgggcgggtattgccgactttttgattttgggtgctgcgtggttgttgacgggtttttccggcttcgtccaccacgccggtatcttcattaccctgtctgccgtcgtcagagggttgattttcccgctcgtacaccatgtgggtacggatggcaacaaatccggacgacaggtttccaatgtttatttctccaacgttgccggcagtgcattgggtccggtccttatcggctttgtgatacttgatttcttgtccacccaacagatttacctgctcatctgtttgatttctgctgctgtccctttgttttgtacactgttccaaaaaagtctccgactgaatgcagtgtcggtagcagtttccctaatgttcggcatcctcatgttcctactgccggattctgtctttcaaaatattgctgaccgtccggataggctgattgaaaacaaacacggcattgttgcggtttaccatagagatggtgataaggttgtttatggggcgaatgtatacgacggcgcatacaataccgatgtattcaatagtgtcaacggcatcgaacgtgcctatctgctaccctccctgaagtctggcatacgccgcattttcgtcgttggattgagtacaggttcgtgggcgcgcgtcttgtctgccattccggaaatgcagtcgatgatcgttgcggaaatcaatccggcataccgtagccttatcgcggatgagccgcaaatcgccccgcttttgcaggacaaacgtgttgaaattgtattggatgacggtaggaaatggctgcgtcgccatcctgatgaaaaattcgacctgattttgatgaatacgacttggtactggcgtgcctattccaccaacctgttgagtgcggaatttttaaaacaggtgcaaagccaccttaccccggatggtattgtaatgtttaataccacgcacagcccgcatgcttttgctaccgccgtacacagtattccctatgcataccgctatgggcatatggtagtcggctcggcaaccccggtagttttccctaataaagaactgctcaagcaacgtctctcccggttgatttggccggaaagcggcaggcacgtatttgacagcagcaccgtggatgctgcagcacaaaaggttgtctctcgtatgctgattcagatgacggaaccttcggctggggcggaagtcattaccgacgataatatgattgtagaatacaaatacggcagagggatttaa

SEQ ID NO: 37905 - DNA, 201 bp, Neisseria meningitidis
ctcaatattaaagtaaccggcggcaaggaagcaccgactgccgcgcaaaaagcggaactgatcggcggcgtaaccgaattgctggcacgcgtgctgggcaaaaatcccgaaacaacggttgtcgtgattgacgaagtggataccgataactggggaataggcggcaaaagcgtcagcgaacggcgcaaagagggcaggtaa

SEQ ID NO: 37906 - DNA, 1497 bp, Neisseria meningitidis
atgttttctaaccatcttctcagcttggcaatatggatacccattgccgcaggtgtgctggttttggcgaccggtaaagacagccgtgcgccgctggcgcgtgtgcttgcctttatgggtgcgcttgccggtttcttggtaacgctgcccctgtttaccggtttcgaccgtttgagcggcggctatcaatttaccgagttccacgagtggattccgctgctgaaaatcaactatgcattgggcgtggacggtatttcggtgctctttatcatcttgaatgcgtttattacgctgttggtggtattggccggttgggaagttattcagaaacgcccggcgcagtatatggcggcattcctgatgatgtcgggtttgattaacggtgcgtttgccgcgcaggatgcgattctgttttatgtgttcttcgagggtatgctgattccgctgtacctgattatcggtgtatggggcggcccgcgccgcgtctatgcgtcggtcaagctgttcctctatacgctgatgggttcgctcctgatgctggttgctatggtttacctgtactatcaaacaggcagcttctctattgtcgatttccaaaacatcaaacagattccgttgggcgtacagcagcttttgtttgcggcattcttcctgtcatttgccgtaaaagtgccgatgttccccgtacacacttggctgccggatgcccacgttgaagcgccgaccggcggttcgatggtgttggcggcgattacgctgaaactgggtgcgtatggtttcttgcgctttatcctgccgattatgccggacgcggcacgctattttgcccccgtgatcatcgtattgagcctgattgccgtaatttatatcggtatggtggctttggtgcaaaccgatatgaaaaaactggtggcgtattcgtccatcagccatatgggttttgtaacgcttgggatgtttttgtttgttgacgggcagttggacgactgggcattgaaaggtgcaatcattcaaatgatttcccacggtttcgtgtctgccgcgatgtttatgtgtatcggcgtgatgtacgaccgcctgcatacgcgcaatattgccgattatggcggcgtggtcaatgtgatgcccaagtttgcggcgtttatgatgctgttcggtatggcgaacgccggtctgcctgcgacttccggctttgtgggcgagtttatggtgattatgggcgcggttaaagtgaatttctgggtaggcgctttggccgccatgaccctgatttacggtgcgtcttataccctgtggatgtacaagcgcgtgattttcggcgcgattcacaatccgcacgttgccgaaatgaaagacatcaactgccgcgaatttgcgattctggcggtgttggcggttgctgttttgggtatgggcctgtatccgaacgcatttatcgaagtggtgcatcaggcggcaaacgatttgattgcccatgtggcacaaagcaagatgtga

SEQ ID NO: 37907 - DNA, 342 bp, Neisseria meningitidis
atgatggataaaaatcagttagaacaagaatttcataaagccatgttaaatatttatcaggaggctttgaatttgccgcaaccttacaaggcgacacgatttttacaaattgtaaatgaatttggtggtaaagaggcggcggataaattattgagtacgggggaaaagaagactcagaccggttttacagagctgattttgagtggtggcggagtccacgccttgaaatacagtatggaatatctggtgttacaaaagccgtggtgtgatttatttactgaagagcaattagctgtggcacgcaaacgattggagcgtgttggatttgtttttccgaagtaa

SEQ ID NO: 37908 - DNA, 576 bp, Neisseria meningitidis
atgccgtctgaaaacccgataggaaaaacgatgaaatccatagacgaacaaagcctgcataatgcccgccgcctgtttgaaagcggcgacatcgaccgtatcgaagtcggtaccaccgcgggcctgcaacagattcaccgttacctgttcggcggcttatatgattttgcgggtcaaatcagggaagacaacatttccaaaggcggttttcgttttgccaacgccatgtatttaaaagaggctttggttaaaatcgagcagatgcccgagcggacttttgaagaaatcatcgccaaatatgttgaaatgaacattgcccatccgtttttggagggtaatggcagaagtacccgcatctggctggatttggtgctgaaaaaaaacctgaaaaaagtcgtgaactggcaaaatgtaagtaaaaccctgtatttgcaggcgatggaacgcagccccgtcaacgatttagaactgcgctttctgttaaaggacaacctgactgacgatgtggacaaccgtgaaatcatctttaaaggtatcgagcagtcgtattattacgaagggtatgaaaaaggctga

SEQ ID NO: 37909 - DNA, 300 bp, Neisseria meningitidis
atgaccgcatccatgtacatccttttgctgcttgccttgatttttgccaacgcccccttcctcacgaccaagctgttcggcatcgtaccgctcaagcgcaaacatttcggacaccacctgatcgagctggcggcaggtttcgcgctgaccgccgttcttgcctacatcctcgaatcccgtgcgggagcggtacacgatcagggttgggagttttacgccaccgtcgtctgcctgtacctgatttttgcgtttccctgtttcgtgtggcggtatttttggcacacgcgcaacagggaatag

SEQ ID NO: 37910 - DNA, 1857 bp, Neisseria meningitidis
atgttgaacaaaatattttcctggttcgagtcccgaatcgacccttatcccgaagccgccccgaaaacgccagaaaaaggcttgtggcggtttgtctggagcagcatggccggcgtgcggaaatggatagccgccctggctgcgctgaccgccggcatcggcattatggaagccctggtttttcaatttatgggcaaaatcgtggagtggctcggcaaatacgcgcccgccgaactgtttgccgaaaaaggttgggaactggcggcaatggcggcgatgatggtattttcggttgcgtgggcgtttgccgcgtccaacgtgcgcctgcaaacccttcagggcgtgttccctatgcgcctgcgctggaacttccaccgcctgatgctgaaccaaagcctcggtttttatcaggacgaatttgccggacgcgtgtccgccaaagtcatgcagaccgcgctggcgttgcgcgacgcggtgatgacggttgccgatatggtcgtttatgtgtcggtgtatttcattacctccggcgtgattctcgcctcgctcgactcatggctgctgctgccctttatcggctggattgtcggtttcgcttcggtgatgcgcctgctgattcccaaattggggcaaaccgccgcatggcaggcggatgcccgctcgctgatgaccggccgcattaccgatgcctattccaatatcgccaccgtcaaactcttctcccacggcgcgcgtgaagccgcctatgccaagcagtcgatggaagaatttatggttacggtgcgcgcccaaatgcggctggcgacgctgctgcattcgtgcagcttcatcgtcaacacctccctgaccctctccaccgccgcactgggcatctggctctggcacaacgggcaggtcggcgtgggcgcggtcgccaccgccaccgcgatggcgttgcgcgtcaacgggctgtcgcaatacattatgtgggaatccgcgcggctgtttgaaaacatcggcaccgtcggcgacggcatggcaaccctgtccaaaccgcacaccatcctcgacaagccgaacgccctgccgctgaaagtgtcgcaaggcgaaatcaagttcgaacacgtcgatttctcctacgaagcgggcaaaccgctgctcaacggcttcaacctcaccatccgacccggcgaaaaggtcggcttgatcggacgcagcggcgcgggcaaatccaccatcgtcaacctgcttttgcgcttctacgaaccgcaaagcggcacggtttcgatcgacgggcaggacataagcggcgttacccaagaatctttacgcgcccaaatcggtttggtcacgcaagatacctcgctgctgcaccgttccgtgcgcgacaacattatttacggccgccccgacgcgaccgatgccgaaatggtttctgccgccgaacgcgccgaagccgccggcttcatccccgacctttccgatgccaaagggcggcgcggctacgacgcacacgtcggcgaacgcggcgtgaaactctccggcggtcaacgccagcgcatcgccatcgcccgcgtgatgctcaaagacgcaccgattcttcttttggacgaagccaccagcgcgctcgattccgaagtcgaagccgccatccaagaaagcctcgacaaaatgatggacggcaaaaccgtcatcgccatcgcccaccgcctctccaccatcgccgcaatggacaggctcgtcgtcctcgacaaaggccgcatcatcgaagaaggcacgcacgccgaactcctcgaaaaacgcgggctttacgccaaactctgggcgcaccagagcggcggcttcctcaacgaacacgtcgagtggcagcacgactga

SEQ ID NO: 37911 - DNA, 465 bp, Neisseria meningitidis
atgtttaccatcgttttataccaaccggaaatccccccgaacacgggcaacatcatccgcctgtgcgccaataccggcgcggatttgcaccttgtcaaaccgctcggcttcccattggattccgccaaaatgaaacgcgccgggctcgactaccacgaattcgccagcctgacggtgtacgaaaacttcgacgactgcctcaaggcactcgcaggcaggcgcattttcgccctgaccaccaaaggcacggcgcgccccgatgaaaccgcgtttcaaaaaggcgacgttttactgttcgggccggaaacgcgcggactgcctgccgacatcctcgacagcctgcccgccgcgcaaaaaatccgcctgcccatgcagcccggcagccggagtatgaacctttccaataccgttgccgtgattctctttgaagcgtggcggcaacacggttacgcaggcggcgtttga

SEQ ID NO: 37912 - DNA, 726 bp, Neisseria meningitidis
atggattttctctcttgttggcggcgcatcgcagacgcgcccactatcaggcgttgcgtattatgccacggttcgtccggcgtttcagacggcatctgcgccggctgccgcgacgatttggcggcataccgcaccgacgcggcaaacagctgccccctgtgtttcatgcacgttcaaggcggcgcggtgtgcggcggctgtcagaaaaaaccgcccgcattcgaccggatgtgggcttcgctgcattacgaaccgcccgtcagcaatatgatacacgcgctgaagcacttggctgatttgagcatggtgcagccgctggcagacctgatgatgcagaatccgcccgaccggcttgcagacgaatgtttcgatttcgtcctgcccgtaccgctaagcagggagcggctgctgcaacgcgggttcaaccaaagtgaaagcatcgtcgggctgctggctcaacgctacggttggcgcacgctgcccctgcataccgtattccgccgccaccggccgccgcaaagcacgctcaaaggcggcgaacggcggcgaaatatcaaaaacgcctttgaaatccgcacaccgccgccgaaaaactgtaatattttgttaatcgacgatgtctttaccaccggcgcgacgctggacgaattggcaaagacgctgaaaaaatcgggcgcaaaccgaatctgctgctggacgctggcacgcacgccaatgaaaaaataa

SEQ ID NO: 37913 - DNA, 297 bp, Neisseria meningitidis
atgaacaaaaaattaaactatatttttatgttggactgtttagggttggtgatattgtttacttgtataatagctacttttgaaagagattatggatttaaaatttttactaattctaagaggcctgaattttattattggattggaatgttttattatggaattatttcttgctggtttgattatcaattaatttcaacaaaggcgaattcgtataaaagaaaagttaaacaatataaaattttttcagtaatattttcagttttgatatttatttctactatagtaaaactttaa

SEQ ID NO: 37914 - DNA, 426 bp, Neisseria meningitidis
atgtattgggaacgcggtctgcacatgtataaggcaagtgctgtcgtgccaacgggatatgtacgggttgggaataccgcgccgctggtcggcgaagacacgcaacggtatgcctctttttggggcgacggctacgacgtgtaccgtcagttgagatggcagcagatacccgaaaaacagagaaaggcattcaaaaaagccgccaaaagcaaaaagaccgtgatgtttgccggacgggaatacggcatatccaaacagaatttgagcgatgtttgggatgattttgaagacgcgatggaactgaaggcgtttccctgcctgtcttcgctgtttctgaccaaatggcataaaaatctatatgatagtggattaacaaaaaccagtacggcgttgtctcgccttagctcaaagagaacgattctctaa

SEQ ID NO: 37915 - DNA, 2301 bp, Neisseria meningitidis
atgcaccgaccgaccgccaaacagattttgcacgaagtattcggttatcccgaatttcgcggcaagcaggagtctatcgtcaatgctttggccggcggcgagagtttgatggtgctgatgccgacgggcgggggcaagtctttgtgttaccagattccggcgctgatgcgcgaaggcgtggcagttgtcgtatcgccgctgattgcgttgatgaacgaccaagtggccagtctgcatgtggccgggattgaagcggcggcagtcaacagcagcacatcggcagatgaggcgcgcgagattgccgacaagcttgcccaaggccgtctgaaactgctttatgtcgcgccggaacgcttggttaccgaccgctttttgcgttttctcgaccaacaaaccgtcagcctgtttgccattgacgaggcgcattgcgtcagccaatggggacacgatttccgccctgaatatcaacagctcggcatccttgccgaacgctatccgaacgtcccgcgcatcgccctgaccgctaccgccgatgccgccacgcgcgccgacatcaagcattatctgcacttggacaatgcgcccgaatttgtctccagcttcgaccgtccgaatatttattatcaggttatcgaaaaaaacaacggcaaaaaacaattgctggatttcatccgcaaagaaatgacggggcaaagcggcattgtgtattgcctaagccgcaaaaaggtggaagatgtggcgcagtttttgcgtgaaaacggattaaacgcgattccgtatcatgctggtttgagcatggacgtgcgcgaggaaaaccaacgccgctttacgcatgaagacaatattatcgtggtggcgaccgtggcgttcggcatgggcatagacaaacccgacgtgcgctttgtcgcccatctcgatatgccccagagtgtcgaacatttctatcaggaatcggggcgtgccggccgggacgggctgcctgccgtgagctggctgtgttacggtttgaacgattgggtgttgctgcgcgaacggattgccgaaggcaacagcgacgaggtgcaaaagcaaatcgaaatgcaaaaactcgatgccatgctttccgtctgcgaaaccgccgcctgccgccgcgtactgctgctcaaacatttcggcgaagcatccgaaccatgcggccattgcgacaactgcctgcatccgcccgtacggtttgacggcacggtgttggtgcaaaaattactcagctgcgtgtaccgcgccggacaacgttttgccgccggttacatcaccaaccttttacgaggtaaaagcgacgattggatacgcggcaaccggcacgaacaactgtccacattcggcatcggtacggagttgtccgacaaagaatggcgcagcgtcatccgccagtgtatcagcctcggctacctcaccgtcaacattacccgatatcaggcattgcaactgaccgaagccgccaaaaaagtcctcaaaggcgaaaccgaagtgatgctgcgtccgctcaagcgcgacaagcccgccgcccgcaccctcaaagacaactggctgcgtaccgaacgcgaagaacgcctgtggcaggcattgcgcgtttggcgtatgaaacaggcagaagccgaagtcatccccgcctatatgattttcggcgacaaaaccctgcgcgaccttgtcgaaaaaatgccgcaagacctcaacggactgcacgacatctacggtttgggcgaagccaaaatcgaccgtttcggacacggcatcctcgaagtctgccgcaacaccgccgactttagccacaatgccgtcatccgcccgcaaaccgaacgcgaacaacaactgcgtcaaaaactcgaagcctggcggtatgaacaggcaagggcggaaaactgcgccctgcatgccgtcctctccgacgaaagccttgccgatatgcttgccgatacgcccgaaaccgaaaccgacctcgaaggcgtacacggcttgggcagcgtacgcgccgccaaatacggacgggacatcctcgccgtctgccgtccgttttcagacggcatcgatgaagccgccaaacacaaacgccgcctgatgcgcgccctgattcaatggtgcaacgaaacggcaaaacacgaacagtccgaaccctaccgcattctcagcaaagccgccctgcgcgccattgccgccaaacagccggaaggcttggcggagcttgccgccgtatacggcgtaggcgaagaaaaagccgcacgttacggtgcggcggtgttggcggtattggaacgaaatgccgtctga

SEQ ID NO: 37916 - DNA, 783 bp, Neisseria meningitidis
atgaccgacatcctcaataaaatccttgccaccaaagcacaggaagttgccgcccaaaaagccgccgtcaacgccgaacacatccgcgcacttgccgcagaagccgcgcccgtccgcagcttcatcgatttgatacgcggcaaacaccgcctaaacctgcccgccgtcattgccgaaatcaaaaaggcaagcccgagcaaaggcctgatccgtccggacttccgaccggccgagattgcacgcgcatatgaaaacgccggagcggcatgtttgtccgtactgaccgacgaaccctatttccaaggttcgcccgaatacctcaaacaggcgcgcgaagccgtatcgctgcccgtgctgcgcaaagacttcatcatcgacgaatatcaggtttatcaggcgcgcgcatggggggcggatgccgtcctgctgattgccgcagcactggaacaggaacaattggaacgctttgaagcggtggcgcacgaattgggcatgaccgtcctgctcgagctgcacgatgaaaccgaattggaaaaatgccgcaacctgaccacgccgttgtggggcgtaaacaaccgcaacctgaggacttttgaagtctccctcgaccaaaccctgtcgctgctgcccgcgctggaaggcaaaaccgtcgttaccgaaagcggcattacgggtaaggcggatgtggaatttatgcggacgcgcggtgtgcacaccttcctgatcggcgaaacgttcatgcgtgccgccgatattgaggcggaagtgggcaaactcttctaa

SEQ ID NO: 37917 - DNA, 1539 bp, Neisseria meningitidis
atgaatatgctgggagctttggcaaaagtcggcagcctgacgatggtgtcgcgcgttttgggatttgtgcgcgatacggtcattgcgcgcgcattcggcgcgggcatggcgacggatgcgttttttgtcgcgttcaaactgcccaacctgcttcgccgcgtgtttgcggagggggcgtttgcccaagcgtttgtgccgattttggcggaatataaggaaacgcgttctaaagaggcgacggaggcttttatccgccatgtggcggggatgctgtcgtttgtgctggtcatcgttaccgcgctgggcatacttgccgcgccttgggtgatttatgtttccgcacccggttttgccaaagatgccgacaaatttcagctctccatcgatttgctgcggattacgttcccctatatcttattgatttcactttcctcttttgtcggctcggtactcaattcctatcataaattcagcattccggcgtttacgcccacgttcctgaacgtgtcgtttatcgtattcgcgctgtttttcgtgccgtatttcgatcctcccgttaccgcgctggcttgggcggtttttgtcggcggtattttgcagctcggctttcagctcccttggttggcgaaactgggttttttgaaactgcccaaactgaatttcaaagatgcggcggtcaaccgcgtcatgaaacaaatggcgcctgcgattttgggcgtgagcgtggcgcagatttctttggtgattaacacgattttcgcgtcttatctgcaatcgggcagcgtttcatggatgtattacgccgaccgcatgatggagctgcccagcggcgtgctgggggcggcactcggtacgattttgctgccgactttgtccaaacactcggcaaaccaagatacggaacagttttccgccctgctcgactggggtttgcgcctgtgcatgctgctgacgctgccggcggcggtcggactggcggtgttgtcgttcccgctggtggcaaccttgttcatgtaccgagaattcacgctgtttgacgcgcagatgacgcaacacgcgctgattgcctattcttttggtttaatcggtttaatcatgattaaagtgttggcacccggcttctatgcgcggcaaaacatcaaaacgcccgtcaaaatcgccatcttcacgctcatctgcacacagttgatgaaccttgcctttatcggcccactgaaacacgtcggactttcgcttgccatcggtctgggcgcgtgtatcaatgccggattgttgttttacctgttgcgcagacacggtatttaccaacctggcaagggttgggcagcgttcttagcaaaaatgctgctctcgctcgccgtgatgggaggcggcctgtatgccgcccaaatctggctgccgttcgactgggcacacgccggcggaatgcaaaaggccgcccggctcttcatcctgattgtcatcggaggctgcctgtatttcgcatcactggctgcactgggcttccgtccgcgccatttcaaacgggtggaaagctga

SEQ ID NO: 37918 - DNA, 1065 bp, Neisseria meningitidis
atgatgaaaatcaaagccctgatgattgccgccgcattgctggcagcagccgatgtccacgccgcaccgcaaaaggcaaaaaccgcatccgccaaagctgccaaagctgccaaagctgccaaagctgccaaagttgccaaagttgccaaagttgccaaagttgccaaagttgccgccacggcgcaaaaagaagccgcacccgcacaacagcagggcggtatccgcttttcagacggcattgccgccgttgccgacaacgaagtcatcacgcgccgccggcttgccgaagccgttgccgaagccaaagccaacctgcccaaagacgcgcagataagcgaatccgagctgtcccgacaggtgctgatgcagcttgtcaaccaatccctgattgtacaggcgggcaaacgccgcaacattcaagcaagcgaagcggaaatcgatgccgtcgtcgcaaaaaatcccgccctcaaaaacctcagccccgcccaacgccgcgattttgccgacaacatcattgccgaaaaagtccgccagcaggcagtgatgcagaacagccgagtgagcgaagctgaaatcgatgccttcctcgagcaggcgcaaaaacaaggcatcaccctgcccgaaggcgcaccgttgcgccaataccgcgcccaacacatcctgattaaagccgacagcgaaaacgctgccgtcggcgcggaaagcaccatccgcaaaatctacggagaggcccgcagcggcacagacttttccagcctggcgcgccaatattcgcaagacgcgagcgcgggcaacggcggagatttgggctggtttgccgacggcgtgatggttcccgcctttgaagaagccgtccacgcgctcaaacccggacaggtcggcgcgcccgtccgcacccaattcggctggcatatcatcaaattgaacgaagtgcgcgatgccggcacacctcaggaacgtatccgcaattccgtgcggcaatacatcttccaacaaaaagccgaacaggcaaccgtcaacctgttgcgtgacctgcattccggcgcgtatgtcgacatccgctaa

SEQ ID NO: 37919 - DNA, 489 bp, Neisseria meningitidis
atgaccccgttatttagaaaagccgtttggctgctgtttgccgtttcggtctgtgcatttgccggttctttggcggcacagtatgttttgggtatggagccttgcgttttgtgtatcagtcagcggttatgcgttttggcaaccgcattgtgtacggcaattgtcctgatgtgcagaccaagaagaagggcgggcggtttgttcggtgctgtctttatcagcatcccggccgttacgggtatttctgttgcggcatatcagttgtggttgcagtcgctgccgccgggtacggctccttcgtgcggtgcgccgtggacgtttcgattgaagggctggcctttgtttgattggttcgagcctgtcgtgcgcgggttcggaaattgtgccgaaccggattatctgctgggggttgctttgcctgtttggagcgcggcgtattttctggcggttgtcctgacggtttggtgggcgtgggcaagggctaaataa

SEQ ID NO: 37920 - DNA, 633 bp, Neisseria meningitidis
atggagaatacaaaccgtgtgccggagcaggcacgttatgatgccgaacgcaggcaggcagacgaagcattggcgggcgtgtttccggcagtcagtatcttcggcagcgcgcgcacgccgcagaatcatgcggattatgcgttcgcctgccgtctggcgcggcggctgtcggattcgggcattgccgtcatttcgggcggcgggccggggattatggaggcggcaaacaagggcgcgtttgcagggaagtcggtttcggtggggctgaacatcgttttgccgcacgagcagaaaccgaatccgtatcaggacatcgccttgcggttttcccgttttgccgaacgcaaggcggtgtttttccgctattcccaagcatatgtcgtgatgccgggcggcttcgggacgctggacgaattgtttgaaatcctgaccttggtgcagacgggcaaagtgccgccgcgtccgattgttttggtcggaaaggcgttttggtcgggcttggcggagtggataaacgcgcagcttttggcgcgcggtctgatttccgaaggggcagcctctttgttcgccatatcggacgatgaagacgaaatcgttgagtatctgtcggaacacgggcttcagacggcatag

SEQ ID NO: 37921 - DNA, 645 bp, Neisseria meningitidis
atggtggaatttgcattatcagaacctttcccatttgaagtaggagaaatagtcgagcaacaaaatagtgatattgctttaagtgaaatcagcaagtacttatctcaggagatgcttaaagagattgtacttactgcgcataataatattcaggacaaagcagcattatctgacagaaatacattggggatgtatcggcaagcagaaattacatttgctctaagggtatatttaagtaaagatggctggacgcttgagccttggtcgggtggtgcatttctatgtctctcgccatgtcgaactaaaagtattattgtggctactgctacttcagatgttggtaggcatcacgggatgccaatgacaaccgcaaggaaaggtaagggatttgaggaggctattcgtaattcaaaactagatttgcctgatactgtgcagttttgggttctgctgtttcactggaagtataataaagtgcaacttgaattatctttaccgagtggttttgttagtcatcaaataactgggtacaagcagcgaattatattagctgatgttgatttaactaaatttgatgagcttgaacgtaagcaacctgttgaagaatatgagcctttggttgaaagaaaacaaaaagcaggataa

SEQ ID NO: 37922 - DNA, 246 bp, Neisseria meningitidis
atgagaagtttactggttcgggcgatgtttggggagaggatggtgggaagatttgttttacaaagtggcaaaaggtcgtctgaaaatagggttcagacgaccttttggtttagttgggaagggctgtggtttaaaaagactgcgtgcgtatgtaccgcacacaccctacacacggattccaagttttgcgtgatttgcaggtcgggtgtgccgaaagataaggacacggttgggcaggctacttat

SEQ ID NO: 37923 - DNA, 1422 bp, Neisseria meningitidis
atgaccaccatctacaacacccttacccgccaaaaagaaccctttgcccccatcgaccctgaaaacgtgcgtatgtacgtttgcggcatgaccgtttacgactattgccacttaggccatgcccgtgtgatggttgtgttcgacatgattgcccgttggttgcgcgagtgcggctatccgctcacttatgtacgcaacatcaccgacatcgacgataaaatcattgcccgtgcggctgaaaacggcgagactatcggcgaactgaccgcgcgtttcattcaggctatgcacgaagatgccgatgctttgggtgtgttgcgtcccgatatcgagccgaaggcgacggaaaacatcccgcaaatgattgccatgattgaaaccctgattcaaaacggcaaggcatatcctgccgcaaatggcgacgtttactacgccgtgcgcgagtttgccgcttacggacaactgtcgggcaaatcgttggacgacctgcgcgcgggcgaacgcgtggaagtggacggtttcaaacgcgatccgcttgattttgtattgtggaaagcggcgaaagcaggcgaaccggcgtgggaaagcccgtggggcaacggccgtccgggttggcacattgaatgctctgccatgagtgaaaacctgttcggcgatacgttcgacattcacggcggcggcgcggatttgcagttccctcatcatgaaaatgaaatcgcccaaagcgtcggcgcgacggggcatacctgcggtcatcatcacgcgcaaacccaccacgggcaaagcatcgccagccacgtcaaatactggctgcacaacggcttcatccgcgtggatggcgaaaaaatgtcgaaatcgctgggcaacttcttcaccatccgcgaagtattgaaacaatacgaccctgaagttgtgcgtttcttcatcctgcgcgcccactaccgcagcccgttgaattactccgacgcacatttggacgacgcaaaaggtgcgctgacccgcctgtacactacattgaaaaacacaccagcggctgagtttgacttatctgaaaacgtcaacgactacacccgccgtttctacgccgccatgaacgacgattttggtacggtcgaagcggttgccgtgttgttcgaactggcaggcgaagtgaacaaaaccaatgacgcacagctcgccggctgcctgaaagccttgggcggcatcatcggactgctgcaacgcgatccgaccgagttcctgcaaggcggcgcggcttcagacggtctctccaacgaagaaatcgaagacttgattgcccggcggaaacaggcgcgctccgataaaaactgggcggaatccgaccgcattcgcgaccttctgaacgaacacaaaatcattttggaagacaacgccggcggcacgacttggcggcgcggttga

SEQ ID NO: 37924 - DNA, 975 bp, Neisseria meningitidis
atgattgccaaacacatcgaccgcttcccgctattgaagttggaccgggtgattgattggcagccgatcgagcagtacctgaaccgtcaaaaaacccgttaccttagagaccaccgcggccgtcccgcctacccgctgttgtccatgttcaaagccgtcctgctcggacaatggcacagcctctccgatcccgaactcgaacacagcctcatcacccgcatcgatttcaacctgttttgccgttttgacgaactgagcatccctgattacagcaccttatgccgctaccgcaattggctggcgcaagacgacaccctgtccgaattgctcaaactgatcaaccgccaactgaccgaaaaaggtttaaaaatagagaaagcatccgctgccgtcgttgacgccaccattattcagaccgccggcagcaaacagcgtcaggccatagaagttgacgaataaggacaaatcaacggccaaaccacaccgagtaaggacagcgatgcccgttggatcaagaaaaacggcctctacaaactcggttacaaacaacatacccgtaccgatgcggaaggctatatcgagaaactgcacattactcccgccaatgcccatgagtgcaaacacctgtcgccgttgttggaaggactgcccaaaggtacgaccgtctatgccgacaaaggctatgacagtgcggaaaaccggcaacatctgaaagaacatcagttaccggacggcattatgcgcaaagcctgccgcaaccgtccgctgacggaaacgcaaaccaaacgcaaccggtatttgtcgaagacccgttatgtggtcgaacagagcttcggtacgctgcaccgtaaattccgctatgcgcgggcagcctatttcggactgattaaagtgagtgcgcaaagccacctgaaggcgatgtgtttgaacctgttgaaagcggccaacaggctaagtgcgcccgctgccgtctaa

SEQ ID NO: 37925 - DNA, 1449 bp, Neisseria meningitidis
atgaaaggcgatattggtgtaatcggtttagcggttatggggcaaaacctgattttgaatatgaacgattgcggatttaaggttgtcgcctacaaccgaacaatcggtaaggtggacgaatttttaaacggcgcggcaaaagggaccggtattatcggcgcgtattccctgcaagacttggtcgataagctggcaaaaccaagaaaaattatgatgatggttcgcgcaggttcggtggttgacgactttatcgaacaactgcttccgctgttggaagaaggcgacatcattatcgacggcggcaatgccaattaccccgacacgacacggcggacacattaccttgctgaaaaagggattttgtttgtcggcgcgggcgtatccggcggcgaagaaggcgcgcggcacggcccgtccattatgccgggcggggataagcgcgcttgggaagccgtcaaaccgattttccaggcgattgccgccaaaacgccgcagggcgaaccgtgttgcgactgggtcggcaaagacggtgcggggcattttgtcaaaatggtgcataacggcatcgaatatggcgatatgcagttgatttgcgaagcgtaccagttcatgaaagacggcttggggctgtcttacgacgaaatgtaccgcgtgtttgccgagtggaacaaaaccgagctggattcttatctgattgaaatcacagcggcaattttgggctataaggacgaaggcggcgaaccgctggtcgagaaaatcctcgatacggcagggcaaaaaggtacaggcaaatggacgggcatcaatgctttggatttgggtattccgctgacgctgatttccgaagccgtattcgcccgctgcgtttcgtcgttcaaagaacagcgcgtgcagaccggcaaactgttcgcccgaaccgttacgcccgtcgaaggcggcaaacaagaatgggtcgaggcgttgagacaggccctgcttgcatctaaaatcatttcctacgcacaaggctttatgctgatccgcgaagcgggcgaaagctacggctgggatttggactacggcaacactgcgctgctgtggcgcgaggggtgcatcattcgcagcgcattcttaagcaatatccgcgacgcgtatgaaaacaatcccgatttggtgttcttgggtgcggatccgtatttcaaaaatattttggaaaactgcctgccggcgtggcgcaaggtggttgccaaggcggtcgaatgcggcatccctatgccatgcatggcttcggcgattacgttcttggacggctacacgaccgaacgtctgcctgccaacctcttgcaggcacagcgcgactacttcggcgcacacacttacgagcgcaccgacaaaccgcgcggcgagtttttccataccaactggacgggcaagggcggagataccgcttcgacaacctacgatatttga

SEQ ID NO: 37926 - DNA, 1326 bp, Neisseria meningitidis
atgaaaaaatacctgttccgcgccgccctgtgcggcatcgccgccgccatcctcgccgcctgccaaagcaagagcatccaaacctttccgcaacccgacacatccgtcatcaacggcccggaccggccggtcggcatccccgaccccgccggaacgacggtcggcggcggcggggccgtttataccgttgtgccgcacctgtccctgccccactgggcggcgcaggatttcgccaaaagcctgcaatccttccgcctcggctgcgccaatttgaaaaaccgccaaggctggcaggatgtgtgcgcccaagcctttcaaacccccgtccattcctttcaggcaaaacagttttttgaacgctatttcacgccgtggcaggttgcaggcaacggaagccttgccggtacggttaccggctattacgagccggtgctgaagggcgacgacaggcggacggcacaagcccgcttcccgatttacggtattcccgacgattttatctccgtccccctgcctgccggtttgcggagcggaaaagcccttgtccgcatcaggcagacgggaaaaaacagcggcacaatcgacaataccggcggcacacataccgccgacctctcccaattccccatcactgcgcgcacaacggcaatcaaaggcaggtttgaaggaagccgcttcctcccctaccacacgcgcaaccaaatcaacggcggcgcgcttgacggcaaagcaccgatactcggttacgccgaagaccctgtcgaacttttttttatgcacatccaaggctcgggccgtctgaaaaccccgtccggcaaatacatccgcatcggctatgccgacaaaaacgagcatccgtatgtttccatcggaaaatacatggcggataagggctacctcaaactcggacaaacctccatgcagggcattaagtcttatatgcggcaaaatccgcaacgcctcgccgaagttttgggtcaaaaccccagctatatctttttccgagagcttaccggaagcagcaatgacggccctgtcggcgcactgggcacgccgctgatgggcgagtacgccggcgcagtcgaccggcactacattacccttggcgcgcccttatttgtcgccaccgcccatccggttacccgcaaagccctcaaccgcctgattatggcgcaggataccggcagcgcgattaaaggcgcggtgcgcgtggattatttctggggttacggcgacgaagccggcgaacttgccggcaaacagaaaaccacgggatatgtctggcaacttctgcccaacggtatgaagcccgaataccgcccgtaa

SEQ ID NO: 37927 - DNA, 1479 bp, Neisseria meningitidis
atgttgcagaaaataagaaaagctctcttccacccaaaaaaattcttccaagattcccagtggtttgcaacacctttatttagcagcttcgcacccaaaagcaatctttttattatttctacatttgcccaacttaatcaagctcatagtctgactaagatgcaaaaattaaaaaataatttactggttattttatataccacacaaaatatgaaaatgccgaaattaattcagaaatcagttgataaagaattattttcagtaacttacatgtttgaactcccaagaaagccgggaatcgtttccccaaaaaaattcctatatatccagcgtggatataagaagcttctcaaaactatccaacctgcacacctttatgttatgtcttttgctgggcattattcctctctgctcagcttagcaaaaaaaatgaatatcacaacacatttagtagaagagggaaccgcaacctatgccccactcttagaatcatttacatacaaacccacaaaatttgagcaacgttttgtgggtaacaacttacatcaaaaaggctattttgataaatttgatattttgcatgtagctttccctgagtatgcgaaaaaaattttcaatgctaatgaataccaccgtttttttgcacattcaggcgggattagcacaagccaatctattgctaaaattcaagacaaataccgcatatctcaaaatgactatatttttgtaagtcaacgctatcctgtttcagatgaagtttattataaaactattgtcgaaacattaaatcaaatgagtttgcgaatagaaggtaaaatttttattaaactccatcctaaagaaatggagaataaaaatattatgtctttattcctgaatatggtaacaattaatccccgtctagtagtgattaatgaacccccttttctcattgacccactaatttatttaacaacccctaaaggaattattggactgacatcgacttctattgtttatacacctttactttcccctactacccaatgtctgtcaattgggcaaatcgtgattgattcgatacaccatacagcccaacaagagaacaccgctttaattgaagagcatttagagattgttaaacaattcgattttattaaaatattatcaagtatagaggatggtatagacaccaattcttttaagacagaagaaacattagaaatgcttctaaaatcagctgaatatgcatataaaaacaaaaacttttaccaagcaattttttattggcaactggccagtaataatgatctatctgtattaggctataaatcattatggtattacaatgcccttaataaagttaagcagaattataaaatgaaatatttagaaattaactacattgaaagaatttccttatattttaatgataaagataaaatgatttggcaaaacatcaaaaatgatttttttaaatatagcctttgtaaccaataa

SEQ ID NO: 37928 - DNA, 1404 bp, Neisseria meningitidis
atgaacaatcccgacttaccctatcggcaggccttagaacgcctgtctcaaaaacaatataactttaccgaagtccgccgactgctgacagaagcggcctcggcaggtcatcccgccgccgcattcgagttggcaaaacacctgatggacgcggacagcccctaccaagaccgcgaacaaggtatggaaatgctccgcatcgccgccgaacagggacatccctacgcgcgttacaatctggcatatatccaagaattggaaggcgcacccccggaaaccctgatatcgctttacagaccattagcagaggaagggctgcctgaagcacaagtccgcctgatgtacctgctgtatgcgtcccgacattttgaagaagccctgaaatgggcaaaaacaagcgcaaaaaacaacaacccccacgggcaatacctgcttgcccaatactgccggtacggcacgccgccggattttgaaacggcacaccttctctaccgcgaggctgcagcacaaggcttggcggcggcacaatggcagctcggccttcaataccgtttcggacaaggtacaccaaccgacacgacccaagctatcaatcatttgcgcgccgccgcacaacaaggatacattcccgcctacaccccgcttgccgagctcatcctacctacggctcccgataaagccgtttaccggtttcaacaggccgcacaggaaaatgaccccgatgcccatgccgcacttgccgacatctacctgcaaggcaagcatccggaaagaaactacaaacttgccctgcatcacgccgaagcagccgccgccgaacgccatcccgaaggtttgcggatactgggcgacatctgccgctacggactgggcatgacttccgataaagaaaaagcccggcattattaccggcaggcagccgaagccggcagccttaccgcctatcagaaactcatatccgacagcgcgttaaaccatcctgaccaatacggcggcattaaagattccgccattaggcggcaaagggcagaacagctttatcaaaaagcccaagccctgcattatggattacaatgcgcgcccgaatacgcagccgcgctcaaactctacacagaagccgcagaactcggacacagcaaagcccaaaccaatctgggcagcatgtattacttcggacagggtatgaccgccgactacaatgaagcacgcaaatggtttgaaaaagccgccgcaaaaaaagacagtatggcgttctacaacctcgcctgcatccattacagcggacacggtgtcgggccggacaaagaaaaagcctgccgctacctgcaagaagccataaacaacggatacgggcaaaaaagcgtcctgcaagaactgctgcaacaatggcaaaatgccgtctga

SEQ ID NO: 37929 - DNA, 867 bp, Neisseria meningitidis; identical to SEQ ID NO: 37866

SEQ ID NO: 37930 - DNA, 159 bp, Neisseria meningitidis
atgaaaccccccctccccatctgcaccctgtcggcactcgccgcctgcaccctttccggacaaggcggcagcagggtttacggcgaaatcaaagcccgagacctttgcgttaccgctcctatcctgctttctgctttctgtcttgcctgctctcgttga

SEQ ID NO: 37931 - DNA, 828 bp, Neisseria meningitidis
atgcaaaaccacgttatcagcttagcttccgccgcagaacgcagggcgcacattgccgcaaccttcggcgcgcgcggcatcccgtttcagtttttcgacgcactgatgccgtctgaaaggctggagcaggcaatggcggaactcgtccccggtttgtcggcgcacccctatttgagcggagtggaaaaagcctgctttatgagccacgccgtattgtggaagcaggcattggacgaaggtctgccgtatatcgccgtatttgaggacgacgttttactcggcgaaagcgcggagaaattccttgccgaagacgcttggctgcaagaacgctttgaccccgattccgcctttatcgtccgcttggaaaccatgtttatgcacgtcctgacctcgccctccggcgtggcggactactgcgggcgtgcctttccgctgttggaaagcgaacactgggggacggcgggctatatcatttccaaaaaagcgatgcggtttttcctggacaggtttgccgccctgccgcccgaagggctgcaccccgtcgatctgatgatgttcagcgattttttcgacagggaaggagtgccggtttgccagctcaatcccgccttgtgcgcccaagagctgcattatgccaagtttcacgaccaaaacagcgcattgggcagcctgatcgaacacgaccgcctcctgaaccgcaaacagcaatggcgcgattcccccgccaacacattcaaacgccgcctgatccgcgccttgaccaaaatcagcagggaaagggaaaaacgccggcaaaggcgcgaacagttcattgtgcctttccaataa

SEQ ID NO: 37932 - DNA, 843 bp, Neisseria meningitidis
atgcaaaaccacgttatcagcttggcttctgccaaagagcgcagggcgcacattgccgataccttcggcaggcacgacattccgtttcagtttttcgacgcactgatgccgtctgaagaactgaatcggatgatggcggaattggtgccgggattggcaaaacagcacctgttgagcgaagtggaaaaagcctgctttatgagccacgccgtattgtggaaacaggcattggatgaaggtctgccctatgttgccgtatttgaggatgatgtcctgcttggcaaagacgcagaaaagttccttgccgaagatacttggttggaagatcgttttgataaggattctgcctttatcgtccgtttggaaacgatgtttgcgaaagttattgtcagaccggataaagtcctgaattatgagaaccggtcatttcctttgctggagagcgaacattgggggacggctggctatatcatttcgcgtgaggcgatgcggtttttcttggaaaggtttgccgttttgccggcagagtggattaaagcggtagattggatgatgtttacttatttctttgataaggaggggatgcctgtttatcaggttaatcccgccttatgtacccaagaattgcattatgccaagttcctcagtaaaaacagtatgttgggtagcgatttggaaaaagatagggaacaaggaagaagacaccgccgttcgttgaaggtgatgtttgacttgaagcgtgctttgggtaaattcggtagagaaaagaagaaaagaatggagcgtcaaaggcaggcggagcttgagaaagcttacggcaggcgggtcatatcgttcaaatag

SEQ ID NO: 37933 - DNA, 291 bp, Neisseria meningitidis
ttgaaggttcccgcaaaacgctatttcacgctggacgagttgtgcggactgttgcaaatcagcccctatggttttgcgcaatggcagcatgatcacggtgtggttgtcggttacggcggcgaacgctacacccgtttggatgtggtgaaactgttgaaattgcagagcacgtttgcaccgtatgcagaaggtgcggaatcgggttcggacggcaaccgtccggttacgcttcaggaaatcggagacggtctgaaagacctgttggcggatttggataaggaattgtgctga

SEQ ID NO: 37934 - DNA, 774 bp, Neisseria meningitidis
atgaacactattgcagacgtgcaatccagccgagatttgcgcaatctgccgatcaatcaggtcggtatcaaagacctgcgctttccgattaccctgcaaactgcagaaggcatccagtccaccattgcccgtctgaccatgacggtttacctgcccgccgagcagaagggtacgcatatgtcgcgctttgtcgcattgatggagcaatattctgaagccttggatttcgcacaattgcataggctgactgccgaaatggtcgcgcttttggattcccgcgccggtaaaatcagcgtttctttcccatttttccgcaagaaaaccgccccggtttccggtattcagtctttactggattatgatgtctgcctcacgggcgaaatgaaagacggtgcatacggccacagtatgaaggtcatgattcccgtaacctcgctttgcccgtgttccaaagaaatttcccaatatggcgcgcacaaccagcgttcgcacgttaccgtcagcctgactgccgatgccgaagtcggtatcgaggaagtcatcgattatgtggaggcgcaggcgagctgccaactctacggcctgctcaaacgccccgatgaaaaatacgttaccgaaaaggcctacgaaaacccgaaattcgtggaagatatggtgcgcgatgtcgctacttcgctgatcgccgacaaacgcatcaagagtttcgttgtcgagagcgagaatttcgagtctatccacaaccattcggcttatgcctatatcgcctacccgtag

SEQ ID NO: 37935 - DNA, 1158 bp, Neisseria meningitidis
atgaaattcgccacgaaagccattcattccagctacgattgcgacgaacacaaccgcgcgctgatgccgccgatttatcaaaacagtatgtttgcgttgcacgagattggcgaaaatgtgccttaccgttattcgcgcctgagcaacccgacccgtcagattttggaagacaccgttgccgatttggaacacggtgcgacagggtttgcgttttccagcggtatggcggggattgatgccgtatggcgtaccttcctgcaacagggcgacaccatcgtcgcggtcgccgatatttacggcggcgcgtatgacttattggtcgatgtttatcaaaaatggggggtgaacgttgtttttgccgatttgggcaatcccgataatctggacgagctgctcaaagcgcacaaggtcaaactggtctggctggaaacgccgtccaatccgcttttacgcttggtagacatcaaagcccttgccgcgaaagccaaagcgaccggcgcactggtcggtatcgacaacacctttgccacgccgtatctgcaacagcccttggatatgggttgcgattttgtattccattccgctaccaaatatttgtgcggccattccgacgtattgatgggcatcgtcgttgccaaaaccaaagaactggcgcagcctttgcacgatatgatggtgcataccggcgcggttgccggcccgctggactgctggctggtgttgcgcggcatcaaaacgcttgccctgcgtatggaggcacactgcaaaaacgcactcgaaatcgcgcgccgtctggaagaccatcctgccattgaaaaagtgttccatcccggcctgccgtcgcacgaacattatgaactcgcccaagcgcaaatgcctaaaggcatcggcggcgtggtgacggtttatctcaaaaacgacacgcgcgaagcggcaaacagcgtgattaaaaacatgaaactggtcaaaatggcttccagcctcggcggcgtggaaagtttggtcaaccattgctattcccagtcccacagcggcgtgccgcataatgtgaaaatggaaatgggcatcagggtcggtctgctgcgtttctctgtcggtatcgaagatgtagatgatatttggaatgatatttccgccgcactggatacgactgtataa

SEQ ID NO: 37936 - DNA, 759 bp, Neisseria meningitidis
atgaaaaaagtcagcgtattgattgttgccaaaaacgaagcaaaccacattcgggaatgtattgaaagttgccgtttcgataaagaagtcatcgttatcgacgactacagcaccgacaatactgccgaaattgccgagggtttgggcgcaaaagtcttcagacggcatttgaatggggatttcggagcgcaaaaaacatttgccatcgaacaggcaggcggagaatgggttttcctgattgatgcagacgaacgctgcacgccggaactatctgatgaaatctcaaacattgtccaaaccggcgattatgccgcctattttgtcgaacgccgcaaccttttccccaaccatcccgccacacacggcgcgatgcgtcctgacagcgtatgccgtttgataccgaaaaaagacagttcggtgcaaggcaaagtacacgaaaccgtacagaccccctaccccaaacgccgtctgaagcattttatgtaccattatacgtacgacaactgggaacaatatttcaacaagttcaacaaatatacttccatttcagccgaaaaataccgagagcagggaaagcccgtgcgtttcgttagggacattatcctccgcccgatttgggggtttttcaaaatttatatcctgaacaaagggtttctcgatggaaaaatgggttggattatgtccgtcaaccacagctattacacgatgattaaatatgtcaaactatattatctgtacaaatctggcggaaaattttaa

SEQ ID NO: 37937 - DNA, 1116 bp, Neisseria meningitidis
atgggcttgaaaaaggcttgtttgaccgtgttgtgcctgattgttttttgtttcgggatattttatacatttgaccgggtaaatcagggggaaaggaatgcggtttccctgctgaaggagaaacttttcaatgaagagggggaaccggtcaatctgattttctgttataccatattgcagatgaaggtggcggaaaggattatggcgcagcatccgggggagcggttttatgtggtgctgatgtctgaaaacaggaatgaaaaatacgattattatttcaatcagataaaggataaggcggagtgggcgtattttttccacctgccctacggtttgaacaaatcgtttaatttcattccgacgatggcggagctgaaggtaaagtcgatgctgctgccgaaggtcaagcggatttatttggcaagtttggaaaaagtcagcattgccgcctttttgagcacttacccggatgcggaaatcaaaacctttgacgacgggacaatcaatttaattcaaagcagcagctatttgggcgatgagttttctgtaaacgggacgatcaagcggaattttgcccggatgatgatcggagattggagcatcgccaaaacccgcaatgcttccgacgagcattacacgatattcaagggtttgaaaaacattatggacgacggccgccgcaagatgacttacctgccgctgttcgatgcgtccgaactgaaggcgggggacgaaacaggcggcacggtgcggatacttttgggttcgcccgacaaggagatgaaggaaatttcggaaaaggcggcaaaagatttcaacatacaatatgtcgcgccgcaccctcgccaaacctacgggctttccggcgtaaccacattaaattcgccctatgtcatcgaagactatattttgcgcgaaattaagaaaaacccgcatacgaggtatgaaatttatacctttttcagcggcgcggcgttgacgatgaaggattttcccaatgtgcacgtttacgcattgaaaccggcttcccttccagaagattattggcccaagccggtgtatgccctgtttacccaatccggcatcccgattttgacatttgacgataaagattaa

SEQ ID NO: 37938 - DNA, 969 bp, Neisseria meningitidis
atgaaaattttgcttgtccgcttgtctagtatgggcgatttaattcacactttgcccgcaatcgaagatttggcgcgacaatgtcctgatgtagaactgcattggctatgtgaggctggatttgcagatattgcgcgcctgcatccgtttgtaaaaaaaatccatgtgatgaaatggcggcaatggcgcaaacatctctttcgggctgaaacttggcgggaaatgggtcatctgaaacagactttgcggcaggaagtatttgatttcgtattggacagtcaaggtctgattaaaagcgcgtgtttcgctaaaatggcaaaatccccgatttgtggtttggataaaaacagtgcgcgcgagggatgggctgctttggcgtatgtaaaaacatacgctgtaccgaagggaaaaaatgccgtttggcgcaaccgtgaactgtttgcccaagtatttgggtatgtaatgccggaaacgcaggtatttggcttgactgttcctgaagcaggccgtctgaaaaatttagcgcagccgtattatgcggctttgcatgcgaccagtcgggacagtaagttatggcctgtggaaaactggcggtcattgctgcaaaagttgaatgaagaacagcaatgcaatatttacctgccttggggaaatgaagatgaaaaaacgcgtgccaaacaaattgcagacggactgccgtttgctattgtgtgcgacaaaataaatttattgcaggcagcgtatctgctgaaatacgcggtcggaattgtcggcgtggataccggtttgctgcatttggcaaatgccttggaaaaacctgtggtcggcatttataccgataccgatccgattaaaacaggcgttcaggtttcgccaattgcaaaaaatttgggcaatatcgggcagattccgaccgcagatttggtttatcaagcgctgatggattgtgttgcagcagataaaggctaa

SEQ ID NO: 37939 - DNA, 234 bp, Neisseria meningitidis
ttgagaactaagttcttcaaaaatcctacacctactccttccacggcagcaccttggtcaaaacggcagacggctacaaagccattgcccatatccgagccggcgagagcgtcctctccaaggacgaggcaagtggaaaaacgggatacaaacccgttaccgcccgatacggcaatccctatcaagaaaccgtttacattgaaatttcagacggcatcggcaacagtcaaaccc

SEQ ID NO: 37940 - DNA, 483 bp, Neisseria meningitidis
atgccccaactcactttagacaaaaccgatattaaaatcttacaggttctccaggaaaacggcaggctgaccaatgtcgaactgtccgaacgtgtcgcactttcgccttctccgtgcctgcgccgtctgaagcagttggaagatgccggcatcgtccgccaatatgccgcgctgctgtctccggaatccgtcaacctggggcttcaggcatttatccgcgtttccatccgcaaagcaaaagacgcgcgggaagactttgccgcatcggtccgaaaatggccggaagtcttgagctgcttcgccctgacaggggaaaccgactacctgcttcaggcgttttttaccgatatgaacgcgttttcccattttgttttggatacgctcctgtcccaccacggcgtacaagatgcgcaatcgagctttgttttaaaagaaatcaaacacaccacctccctgccgctcaaccacctgctgaaggaatag

SEQ ID NO: 37941 - DNA, 687 bp, Neisseria meningitidis
atggcagacctgaccttccaacaagccgtttccaacatcatcggtatgaaaggcgaaatcgtccgcgcattgggcgaaaccttcgtaatggtcggcttgtccaccacattcgccgtcgttttcggcacgttgctgggcgtgctgctcttcgtaacctccagccgccagttgcattacaacaagccggtaaatttcctgctcgacaacttagtcaacctgatgcgcgccttccccttcgtcattttgatgattgcgatgatacccgccacacgcgccatcgtcggcagcaccatcggcccgattgccgcctcgctggtgttgagcgtgtcgggattgttttattttgcccgactggtggaacaaaacctgcgcgaagtccccaaaggcgtgattgaagccgccgccgcgatgggtgcgcctccgattgccatcgtctgcaaagtcctcttgaacgaagcgcgcgcgggcatggtttccagcattaccgtgcttgccatcgggcttttgtcatacagcgcggcggcagggatgataggcggcggcggcttgggcgacctcgccatccgctacggctactaccgctaccaaaccgaagtcatcgtcttcatcgtcgccctcctcgtgctgctggtcatcctgattcaaagcaccggcaacgcgttggcgcggaaactcgacaaacgttaa

SEQ ID NO: 37942 - DNA, 573 bp, Neisseria meningitidis
atgatggtacggcgtttgataatcggcatcagtggggcgagcggtttccaatacggcgtgaaggctttggaacttttacgcgcgcaagatatcgaaacgcaccttgtggtatcgaaaggtgcggagatggcgcgcgcttcggaaacggattatgcgagagacgaggtatatgccttggcggacttcgtgcatccgatcggcaatatcggggcgtgcattgccagcggtacgtttaaaacggatgggatgctggtcgccccctgttcgatgcggacgcttgcctctgtcgcgcacggcttcggcgacaatctgctgacgcgtgcggcggatgtggttttgaaggaaaggcggcggctggtgctgatggtgcgcgaaacgccgctgaaccttgcccatttggacaatatgaagcgggtaacggaaatgggcggcgtggtgtttccccctgttcctgcgatgtaccgcaaaccgcagacggcggacgacatagtggcgcacagtgttgcacacgctttgtcgctgttcggaatcgatacgccggattcggcggaatggcagggaatggcggattaa

SEQ ID NO: 37943 - DNA, 339 bp, Neisseria meningitidis
atgaacacacgcatcatcgtttcggctgcgttcgttgcgttggcattagcaggttgcggctcaatcaataatgtaaccgtttccgaccagaaacttcaggaacgtgccgcgtttgccttgggcgtcagcccaaatgccgtaaaaatcagcaaccgcaacaatgaaggcatacgcatcaactttaccgcaactgtgggtaagcgcgtgagccaatgctatgttaccagtgtaatcagcacaatcggcgttaccacttccgatgcaatttgtttgggaggcggaacgcacaaaggcaaaagtcaatgcaatgctttgcttaaagcggcaggccgttgctaa

SEQ ID NO: 37944 - DNA, 642 bp, Neisseria meningitidis
atgagatgttttatgattcaaaatgtcgttacttcaataatcctgtattctgggacagccgtagacttacttattatcctaatgttattttttgccaaaagaaaaagcagaaaagacatcattaacatctatttaggacaatttctaggctctgttagcctgatattgctaagtttgctttttgcatttgtcttagattatattcctagtaaagagattttaggtttgctcggcttgattccaattttcctaggcctcaaagttttgctgttaggagattccgatggagaggctattgccaaagagggtttgcgcaaagataataaaaacctgatttttctagtcgctatgattacttttgcaagttgtggtgctgacaatattggtgtctttgtcccatattttactaccttaaattcagcgaatttgatagtggctttacttacctttctagtcatgatttatctcttggttttttctgcccaaaaattagcacaagtcccttctgttggagaaactttggaaaaatatagcagatggtttgttgctgttgtttatttaggattgggggtatatatcctgattgaaaacaacagttttgatatgctatggactgtgtcgggccaggaaaaaatattatga

SEQ ID NO: 37945 - DNA, 438 bp, Neisseria meningitidis
atgatagggcttttaatcatcacacacgaaaccataggcgaagcctaccgcaagctggcacatcatttttttccgggcggactgcctgaaaacgtccgcatactcggcgtgcagccgacggaagaccaagacgacatcatcaacaacgccattgccgcgcttcaggaatttcccgacaacgacggcgtgctgattatgaccgatattttcggcgcgaccccctgcaatgcagcccgccgcctcgtgcgcgaaaacaaatcggcgattttgaccggactgaacgcgccgatgatggttaaggccgtccaatattcgccggcggcggaagaccttgccgcctttaccgaatgtgtcagagaggcggctgtaaaaggcattttcgccatcacgtccgcgcccgaagatttggtgtgccggcgcagcggcgatgccgtctga

SEQ ID NO: 37946 - DNA, 1332 bp, Neisseria meningitidis
atgaacacaacatcccaatttaccagtaatttctggaatatatatattgcagttattgtcttactgagctttatcgctttggcttggctgctgctgtctcaaaatgttgtcaaacgtccgaagaagggcgaagaagtacaaactacgggtcatgagtgggacggcattgccgaatacgacaatccgctgccccgctggtggttttggctgtgtgttttgacgtggctgttcggtatcggttatttggttatgtatccgggtgtcggcgactacaaaggtctgctgaaatggaccagccataaccaatatgaaaaagaggtcaaaaaagccgatgagcaatacggcaaactgtatgccaagtttgcggatatgccgattgaaaaagtggcaaaagaccctcaagccaagcaaatcgcccaaaacctgtttaacacttattgtatccagtgccacggctctgatgctaaaggctctaaaggttttccgaatctgaccgatagcgattggttgtggggcggtgatcccgataaaatccacgagaccatcgaaaaaggccgtgttgcgactatgcctgcctggggtcctgctttgggcgaagaaggcgtgaaagacgttgcccattatgtgatgtccctttcaaaacccgaaggtcagtatgatgaggaacgtgccgcgcgcggacaagccttgttcagcggtccgcctgccaactgtttcacttgccacggcgataagggacaaggtatccaaggtttgggtccgaacctgactgatgacgtgtggttgtggggcggtacgcaaaaatccattatcgaaaccattaccaacggtcgcagcagccaaatgcccgcttggggacatttcttggataaagacaaactgcatattatgactgcttatgtatggggtctttccgataaagacggtaaagctccggtgaaaaaagccgagcctgcaccgactcccgcaccggcggcagaacccgcagcctctgctcctgcagaagcagcacaagccgcgtccgaagccaaacctgccgcagcagaacctaaagccgaggaaaaagctgcacctgctgccaaagcggacggcaaataggtttatgaaaccgtttgtgccgcctgccatggcaatgcggttccgggtattccccatgtaggcatcaaagccgattgggccgaccgcatcaaaaaaggcaaggacacgttgcacaaacacgcgatcgaaggtttcaatacgatgcccgcaaaaggcggtcgcggcgatttgagcgatgatgaggttaaagctgcggttgactatatggtcaaccagtcaggcggcaaattctaa

SEQ ID NO: 37947 - DNA, 924 bp, Neisseria meningitidis
atgaatacaggcaaaccccaaaaacgtgccgtcaacggtgttttgctcttggacaaacccgaaggcctttccagcaacaccgcgctgcaaaaagcgcggcgtttgttccgtgccgaaaaagccggacataccggcgtgctcgatcctttggcaaccggacttttgcccgtctgcttcggcgaagcgaccaagttctcccaatacctgctggatgccgacaaagcctacaccgccacgctgaaactcggcgaagccagcagcacgggtgatgccgaaggcgaaatcgttgccaccgcccgtgccgatatttccttagccgaatttcagacggcctgccaagcactgacaggcaacatccgccaagtgccaccaatgttttccgcgctcaaacacgaaggtaaaccgctgtacgaatacgcgcgcaaaggcatcgtcatcgaacgcaaagcgcgcgacattaccgtttacgccatcgatattgccgaatttgatgcgcccaaagccgtgataagcgtgcgttgcagcaaaggcacctatatccgcaccctcagcgaagacatcgccaaacacatcggcacgttcgcccacctgaccgccctgcgccgcaccgaaaccgccggttttaccatcgcccaaagccacacgctcgaagccttggcaaacttggacgaaaccggacgcgacagcttgctgctgccctgcgacgtattggttgcccattttccccaaaccgttttaaacgattatgccgtccatatgctccaatgcgggcaacggccgcgtttcgatgaagacctgacttccgatacgccggtacgcgtttacacggaaaacggccactttgtcggcctggcggaatatcaaaaagaaatatgccgtctgaaagccttgcgcctgatgaacacggcggcatccgccgtctga

SEQ ID NO: 37948 - DNA, 291 bp, Neisseria meningitidis
atgaacatccaacttcaaggccacatcgtcggcgttaaaaaattcaacggacaaatcgaaggcaggagcttcgactattgccgcctgattgtcgccacacccttagacagctcccaaggcaacgcattgggcagctctactactgaatacgatttcggcggctctgccaatttcgagcagttccgaaacgcccaatttcccatcgaagcaaacctgaacgtagaaatcgtcactacgggcaaaacccaaaaactgaaagtcatcggttttcaacccgttaagaaaggctga

SEQ ID NO: 37949 - DNA, 291 bp, Neisseria meningitidis; identical to SEQ ID NO: 37948

SEQ ID NO: 37950 - DNA, 315 bp, Neisseria meningitidis
atgacaaagtctgagttaatggttcgtttggcagaagtgtttgccgccaaaaacggcacgcatcttctggcaaaagacgtagagtacagcgtaaaagtcttggttgacaccatgactagatcgcttgcccgaggtcaacgcatcgaaatccgcggtttcggcagcttcgatttgaaccatcgtcctgcccgcatcggtcgcaatcccaaaaccggcgagcgtgtggaagtacctgaaaaacatgtaccccacttcaagcccggtaaagaattgcgcgagcgggtcgacttggctttaaaagaaaatgccaattaa

SEQ ID NO: 37951 - DNA, 402 bp, Neisseria meningitidis
ttggagtctcaaatggccaaatctttcaaccaagcagcttctgaacttactgatatattccctaatatctctctaaccggctttgacggtgtgaattacccagtaaccgttaattgtcctatgcacgggaacgttcgttattcgacatttaatgcccttataaagtcaaagtacgggtgtcctgagtgtgctaagatgtcaaaaacccaaacacctccaaatgtagggaagcccctcctcatcctcgacacaacgaccaacgaaacactcacgttcccaagcgttactgccgcaggtgctgctttaggtgtacatttccaacaaatcaatcacaggctcaagggtcgaacgtcgcccgacaaccttatttcaaacaggtacaaagtgcttgggtacgatagg

SEQ ID NO: 37952 - DNA, 408 bp, Neisseria meningitidis
atggcacttacatttactcaagcagtttctaagctaacctctaaatttccacatttgaatcttgtggagttcaatggcgttcgttacccgacggtaatcgtctgtcctatacacgggagggttacttgctctacattcaaaagtatgttggactctaaaagtgggtgtccaaaatgtgcatcttatggtgtcaattcccacaaaattccagaagatacaatagataaattatctaaaaatacagtattggaggatactgtaactggcgaaacacttacattcccctcaagagcatctgctgcaaggtcattgggtataaacccagcagctatcactgaccgtataaaaggtcgggttcacacagagactttacttgcagggaggtataaggttcacatctgcactaaa

SEQ ID NO: 37953 - DNA, 435 bp, Neisseria meningitidis
ttgaaaatttctatattttggttgtataatgctttcattttagaaaggtctataatgccaaaatcactctcgctacaagatgttcagttaaggttttccagtaaatttcctgataagacggttttgaagttcactaaaaactacgaaccggtaacaatccaatgccctttgcatgggtcggttgtttacgggaatctacaagctgccatgaaatcctcaacaggatgtcctgaatgtactcgaaatcccgaaaagccctctccaaacgccgttgccattaggttggaggacacagagacaggggaaatctacgagtttgcaagtacactggctgccagtaaatttatcggttgctccaacagcactttagctgtacgtttaagcggacgcactccgtttgaccgattgattaggtatcgttataggttggtaaag

SEQ ID NO: 37954 - DNA, 315 bp, Neisseria meningitidis
ttgatgtgtgtactattgcataggcggttaagccatgcaggagatgaaagtgtatatttcgcgcaaagcccattagccgcaagcgaggggcggggtgcgcgagagagaggggggcaggtgctaagtcattggttatctccttactatctatctaactacgggtgcattatgcgcctatgcctgttgtttgtcaaacactatacagttaaaatgtgtaaagatttagtaaggacatatacccttttctttacatttagctccatcggataccagtgcgttcagagaaaatttgaaaatttctatattttggttgta

SEQ ID NO: 37955 - DNA, 1227 bp, Neisseria meningitidis
atgacctttttacaacgtttgcaaggtttggcagacaataaaatctgtgcgtttgcatggttcgtcgtccgccgctttgatgaagaacgcgtaccgcaggcggcggcaagcatgacgtttacgacgctgctggcactcgtccccgtgctgaccgtgatggtggcggtcgcttcgattttccccgtgttcgaccgctggtcggattcgttcgtctccttcgtcaaccaaaccattgtgccgcagggcgcggacatggtgttcgactatatcaatgcgttccgcgagcaggcgaaccggctgacggcaatcggcagcgtgatgctggtcgttacctcgctgatgctgattcggacgatagacaatacgttcaaccgcatctggcgggtcaattcccagcgtccgtggatgatgcagtttctcgtctattgggctttactgacgttcgggccgctgtctttgggcgtgggcatttcctttatggtcggctcggtacaggatgccgcgcttgcctcaggtgcgccgcagtggtcgggcgcgttgcgaacggcggcgacgctgaccttcatgacgcttttgctgtgggggctgtaccgcttcgtgccaaaccgcttcgttcccgcgcggcaggcgtttgtcggggctttggcaacagcgttctgtctggaaaccgcacgttccctcttcacttggtatatgggcaacttcgacggctaccgctcgatttacggcgcgtttgccgccgtgccgttttttctgttgtggctgaacctgttgtggacgctggtcttgggcggcgcggtgctgacttcttcactctcctactggcagggagaagcgttccgcaggggcttcgactcgcgcggacggtttgacgacgtgttgaaaatcctgctgcttctggatgcggcgcaaaaagaaggcaaagccttgcctgttcaggagttcagacggcatatcaatatgggctacgacgagttgggcgagcttttggaaaagctggcgcggcacggctacatctattccggcagacagggttgggtgttgaaaacgggggcggattcgattgagttgaacgaactcttcaagctcttcgtttaccgtccgttgcctgtggaaagggatcatgtgaaccaagctgtcgatgcggtaatgatgccgtgtttgcagactttgaacatgacgctggcagagtttgacgctcaggcgaaaaaacagcagcaatcttga

SEQ ID NO: 37956 - DNA, 471 bp, Neisseria meningitidis
atgcggattatacaggcaaacgcgttcagacggcatctgaacgccatgccgtctgaacacgcggcttatgccgacttgacggcgagttccgccaagcgtttgctttgtgcgaaggcgatattgttttcttcggcggtcaggacgggagccgctgtcgggaatatcttttttgacggcttcgcagacggcggagactttggggacggtgcgcaatacggcttcgcaaccttcaacgctgtcgatgccgcgagcgattcggcgggcgggattgcgggggctgccgttttgggaatagtagaggacgaggattttgagggggatttgggttcatgggcggattccgttaaaatggttcggtcttcaaacggcataacagttgttccgatgccgtctgaaacagccgcagttcaggcatttgttcctgacggcaaaattggctataacatcgggcatcaatgcccaacttactga

SEQ ID NO: 37957 - DNA, 450 bp, Neisseria meningitidis
gtgttttatgggtttgagatgcgccgggcgttgattgcgaaaattaagattgctcaaaaggagctgggcttggacgacggtacctatcgcgcggtgttggagcgtgtgacgggcaagcggtcgtgtgcggatatggatgtttccgaacttgagtctgttgtcgctgatatgcggtcgcacggatttaagcctaaagcaaaaggtaacccacacggtaaaccacatctgcgtcggacatcatcagcggcaatgttggacaaagtcgaagccctgctgaccgtcggcggcaaacattggaactatgcacacgcaatggcgcggcggatgtttggtaaggataaggtcgaatatttagacgatacgcagctacataaactggttgctgcgttgcagattgcggaaaacaggaaaacggaaaaagcgggtggggatgatggcgttcgaaaaagt

SEQ ID NO: 37958 - DNA, 981 bp, Neisseria meningitidis
atggcaatggcagaaaacggaaaatatctcgattgggcgcgcgaagtgttgcacaccgaagcggaaggcttgcgcgaaattgcggcggatttggacgaaaacttcgcccttgcggcggacgcgttgttgcactgcaaaggcagggtcgttatcacgggcatgggcaagtcgggacatatcgggcgcaaaatggcggcaactatggcctcgaccggcacgcctgcgtttttcgtccaccctgcggaagcggcacacggcgatttgggtatgattgtggacaacgacgtggtcgtcgcgatttccaattccggcgaaagcgacgaaatcgccgccatcatccccgcactcaaacgcaaaaacatcacgcttgtctgcatcaccgcccgccccgattcaaccatggcgcgccatgccgacatccatatcaccgcatcggtttcgcaagaagcctgcccgctggggcttgccccgaccaccagcaccaccgccgtcatggctttgggcgatgcgttggcggtcgttctgttgcgcgcgcgcgcgttcacgcccgacgacttcgccttgagccaccctgccggcagcctcggcaaacgcctacttttgcgcgttgccgacattatgcacaaaggcggcggcctgcctgccgtccgactcggcacgcccttgaaagaagccatcgtcagcatgagtgaaaaagggctggggatgctggcggtaacggacgggcaaggccgtctgaaaggcgtattcaccgacggcgatttgcgccgcctgtttcaagaatgcgacaattttaccggtctttcgatagacgaagtcatgcatacacaccctaaaaccatcgccgccgaacgcctcgccaccgaagccctgaaagtcatgcaggcaaaccatgtgaacgggcttctggttaccgatgcagatggcgtgctgatcggcgcactgaatatgcacgaccttttggcggcgcggattgtataa

SEQ ID NO: 37959 - DNA, 1503 bp, Neisseria meningitidis
atgagtcgtgaaatgttacagctggcagaagcactggcaagcgaaaaaaacgttgatgccgaagtcgtcttccaagcactggaattcgccctgtctaccgccgccaagaaaaaggcagaccgcgaacacatggacgtgcgcgtacaaatcaaccgcgataccggcgaataccaaaccttccgccgctggctgattgtcgccgatgaagactatacctatcccgatgtcgaaaaaaccatcgaggaaatccaagaggaaattcccggcatcgccatccaaatcggcgaatactatgaagagcagctgcccaacgaaggcttcggccgccaagccgcgcaaaccgccaaacaaatcatcctgcaacgcatccgcgatgccgagcgcgagcagaatctgaacgagtttctcgccgtcaaagaagacatcgtgtccggcacggtcaaacgcgtcgaacgccacggcatcatcgtcgaagtcgttgccggcaaactggacgcgctgattccgcgcgaccaaatgattccgcgcgaaaacttccgcagcggcgaccgcatccgcgccctcttcctgcgcgtcgaagaaatcggcaacaccggccgcaaacaagtcatcctgagccgtacttccggcgatttcctcgtcaaactgtacgccaatgaagtacctgaaattgcagacggcatgcttgaaatccgcgctgtcgcccgcgacccgggacaacgtgccaaagtcgccgtcaaagccaacgaccagcgcatcgatccgcaaggcacctgtatcggcgttcgcggttcgcgtgtcaatgccgtcagcaacgaattgtccggtgagcgcatcgacgttgtcctttggtcgcccgagcctgcccaattcgtcatgagcgcgctctcacccgccgaagtcagccgcatcgtcatcgacgaagacaaacacgccgtcgatgtcatcgttgccgaagaccagctcgcgctcgccatcggacgcggcggtcaaaacgtgcgccttgcttccgagctgaccggctggcagctcaacatcatgacttccgccgaggcagacgaacgcaatgcggcagaagatgccgccatccgccgcctgtttatggatcacttgaacgtggacgaagaaaccgccgacgtactggttcaggaaggttttgcaaccttggaagaagtcgcctatgttcctgccgccgaactgcttgccattgaaggatttgacgaagaaatcgtcgatatgctccgcaaccgcgcccgcgatgccatcctgaccatggcgattgccgccgaagaaaaactgggcgaagtgtccgacgatatgcgcaacctcgaaggtatagatgccgatatgctccgcagccttgccgaagcaggcattaccacccgcgacgacttggcagagcttgctgtggacgaactgattgaaatcaccggtgtaaacgaagaaaccgcaaaagccgtcatcctgaccgcacgcgaacactggtttaccgaagacaaataa

SEQ ID NO: 37960 - DNA, 1536 bp, Neisseria meningitidis
gtgtctgattccaagacgaaagaacgcgccacattcggcacgcgccgcgcgtttatgattgccgccatcgggtccgccgtcggcttgggcaatatttggcgtttcccctatattgcttttgaaaacggcggcggcgcgttcatcctgccctatctggtcgcgcttctgacggcgggcatcccgctgctgctgctcgattatgccatcggccaccgttaccgtggttctgcgcccttggctttccgccgcctcggacgatggtttgagccggtcggctggtggaacgtgatgaccaatatcgtcatctgcatctattacgcggtaattatcggttgggcggcaagctatacctattattcggtcaacgccgcctggggtgcggatccgcagggttttttctttaaggacttcctgcaaatggcgggcccggaagccttgggtttggattttgtcggcaaagtcgccggtcctttggcgggcgtgtgggtttttaccgccgccattatggcgttgggcgtgcaaaagggcgtggcgcgcgcctcgtcgttctttatgccgctgcttttggtgatgtttttgattatggtcggcatttcactaaccctgccgggtgcggcaaagggcttggacgcattgtttacgcccgactggtcgaaactcgccgattccaaggtctgggtggcggcatacgggcagattttcttttcgctttccatctgcttcggcattatggttacctattcttcttatttgaagaaaaaaaccgacttgggcggaacggggctggtggtcggttttgccaacagcagctttgaactgctcgcgggcatcggcgtgtttgccgcattgggctttatggcgcaggcgggcggtaaggcggtcaacgaggttgcctcaggcggcatcggtttggcgtttatcgcctttccgaccattatcaaccaggcaccgatgggctggctgatcggcatattgtttttcggttcgctggtattcgccggcgttacgtcgatgatttccatccttgaagtgattgtggcggcgattcaggacaagctgaacatcgggcgcgtcaacgccacgctgctggtctgcatttcgatgggcattgtttccacgctgctgttcggtacggcgacggggctgccggttttggacgtgatggacaaattcgtcaacacctacggcattgttgccgccggctttgtttatgttgccgccatcatcatcagcggcaggctgccggaattacgcaagcacctgaacgctttgtcctccatccgcatcggcggcttgtggacggtctgcgtcgtggttaccgtcgtgatgctcggctatatgctgtttaaagataccagcggcctgatggagaaaaattacgaaggttatccggatggtttcctcagtattttcggctgggggatgtcggcggcgttggtcgtgttcgggctgctgctgtcgttgctgccttggaaacacggtcaggatttcaacgtcaaagacgaacacgaacatgaacaaggagaagaaaaatga

SEQ ID NO: 37961 - DNA, 276 bp, Neisseria meningitidis
atgcaatggagtatagaaaccgaagggctgggcttgaacgtcatctcgcacaagatactcggcaaagaccacgcccaagtcgaatttgaagcctacttccgagacggacaacaccgatccgcgcatcacgaactgtccggcttcgtcaacatcggcggacaatggtattttatcgatcccaccgttccgcatcctgcgatgaaacaaccctgcatttgcggatcaggcaaaaaattcaaagcctgctgcggcaaatatctgaaacctgtcgcataa

SEQ ID NO: 37962 - DNA, 936 bp, Neisseria meningitidis
atgaacccgaaaaaactcgtcatcgccagccgcgaaagcctgcttgctatgtggcaggcaaagcatatccaaggccgtctgaaggctctgtatcccgattgcgaagtcgagattttgggcatgaccacgcgcggcgatcagattttggacaaaactttgtcaaaagtcggcggtaaaggcttgtttgtcaaagagttggaacaggctttatatgacgggcgcgccgatttggcggtgcattcgattaaagacgtaccgatggatttgcctgaaggtttcgcgcttgcgaccatcggcgaacgcgccaatccgtttgacgcatttgtgtccaaccaatacacgcgtttggaagaaatgcccgaaggcgcggttgtcggcacatccagcctgcgccgcgaagcccagttgcgtgcgcgctatccgcatttgcttatcaaacctttgcgcggcaatgtgcaaacccgtttgtccaaactcgataacggcgaatacgacgcaattatcttggctgccgccggtttgcagcgtctgaaattggacggacgcatccgcatgattttgtcggaatccgacagcctgcctgccgccggacaaggcgcattgggtatcgaaattgccgcgcaccgcgaagatttgtatgaagttttgaaacccttgaaccacggcgttaccaatgcctgcgttaccgccgaacgcgccctcgcacgcgctttgggcggaagctgccaagtgcctttggccgcatattgcacggaagaaaacggcttgctgaccttgcgcggcttggtcggacaccccgacggttcggttgtgttgcgggcggacgcgcaagcccctgccgaatatgccgacgcgctcggacgcgcagtcgctaagaaattggcggacgacggtgcgcaggaattgattggggcggtattgaatacggaaaattga

SEQ ID NO: 37963 - DNA, 216 bp, Neisseria meningitidis
atgaaacaaggtattcacccgaactaccacgaagtcaacgttacctgctcttgcggcaacaaattcgcaaccaaatccgcgatggaaaaagaaaacttcaatatcgaggtttgctccctgtgccacccgttctataccggcacccaaaaaatcgtcgataccaccggccgcgtggacaaattcaacaacaaattcggcaacctgttcaaacgctga

SEQ ID NO: 37964 - DNA, 822 bp, Neisseria meningitidis
atgacgtttgataaatggttgggcttgtcaaaactgcctaaaattgaagcaagaatgctgctgcaatatgtttcggaatatacgcgcgtgcagttgttgacgcggggcggggaagaaatgccggacgaagtccgacagcgggcggacaggctggcgcaatgccgtctgaacggcgagccggttgcctatattttaggtgtgcgcgaattttatggcagacgctttacagtcaatccgagcgtgctgattccgcgccccgaaaccgaacatttggtcgaagccgtattggcgcgcctgcccgaaaacgggcgcgtgtgggatttggggacgggcagcggcgcggttgccgtaaccgtcgcgctcgaacgccccgatgcgtttgtgcgcgcatccgacatcagcccgcccgcccttgaaacggcgcgggaaaatgcggcggatttgggcgcgcgggtcgaatttgcacacggttcgtggttcgacaccgatatgccgtctgaagggaaatgggacatcatcgtgtccaacccgccctatatcgaaaacggcgataaacatttgttgcaaggcgatttgcggtttgagccgcaaatcgcgctgaccgacttttcagacggcctaagctgcatccgtaccttggcgcaaggcgcgcccgaccgtttggcggaaggcggttttttattgctggaacacggtttcgatcagggcgcggcggtgcgcggcgtgttggcggagaatggtttttcaggagtggaaaccctgccggatttggcgggtttggacagggttacgctggggaagtatatgaagcatttgaaataa

SEQ ID NO: 37965 - DNA, 912 bp, Neisseria meningitidis
atggttcatattatgtttaatcaggcagcacaagaattgacgactatccgcgatgttttacgttttgcagtcagccgttttaatgaggcagggctcttttttggtcatggaacagataatgcgcatgatgaagcggcttatttgattctgcatactttgaatttgcctttggatatgcttgccccatatcttgatgcaaaactcttggaagctgaaaaagaggaagtgctggcggttattgagcgtcgtgctgtcgaacacattccagccgcttatttgacacaccaagcatggcagggagagtttgatttctatgtggatgagcgcgtaatcatacctcgttcttttatttatgaattgttgggtaacggacttcgtccttggatagaatacgatgagctggtgcataatgctttggatctttgcaccggaagcggttgccttgccattcagatggcgcatcactatcccgatgcgcacattgatgcggttgatgtgagcttggatgctttggaagtggcagggattaatgtcgaagattatggtttggaagaacgcatccggcttattcatacggatttgtttgaaggattggaaggcacttatgatttgattgtttccaatccgccttatgtggatgcggaatcggttgagttattgcctgaagagtatttgcacgaaccgaaattggcattgggcagcggggcggacgggttggatgccaccaggcagattcttctgaatgcggcaaagtttctgaatcccaaaggtgtattgctggtggaaatcgggcataacagggatgtattggaagcagcgtatccggagttgccttttacttggttggaaaccagcgggggcgacggttttgttttcctcttgacgcgcgagcagttattgggtgaagagtga

SEQ ID NO: 37966 - DNA, 1356 bp, Neisseria meningitidis
atgtctgattttttccattctgacgtgttgtccgtttccgagttgaacgcatttgccaaaagtattttggaaaaccaccttgccggtctgtggattgcgggcgaagtatccaacctgacccgtgccgccagcggacattattacttctcgctcaaagacagccgtgcgcaggtgcgttgcgcgatgtttaagggtgcggccatgcgcttggcgaaacctttgaaagaaggcgaccatatcgaggtatcagggaaaatcagcatttacgaggcacggggcgaatttcagattaccgtgaacgaggtgcggctcaaaggtttggggcagctttacgaagcctatgagcgattaaaagcacagttgcaggcggaaggcgcgtttgcggcggaacgcaaaaaaccgttgcctccccgcccgcaatgcatcggcatcgtaaccagtctggcggcagcggcattgcgcgatgtcgtgaccaccttaaaccgccgcgcgcccgaaattcccgttatcgtttatccaacgcccgttcaaggcacaggtagtgagttgcaaattgcccaagcgattaaaaccgcttcgcaacgcgccgagtgtgacgtgctgattgtctgtcgcggcggcggcagcatcgaagacttgtgggcgtttaatgaagagccggtcgtacgcgccatcgaagcctgctcaattccggtcgtcagcggcgtaggacacgaaaccgatttcacgcttgccgatttcgtcgccgacgtacgcgcaccgacaccgaccggcgccgcagaattggtcagccccaaccgccaagaatcgttacaccgcctcgcccaagcgcaaggccatctgaaaaccattttggaacaacgctatttcgatgccagccaaaaactcgactggctggcgcggcaaatccgtcatccgcgccaaaaacttgacgatcagcgcacctacattcacaaactggtgcaaaccctgtcctactcgatgacgcaaaacctccgcgcccataccgcccgttttgaacgccaaacccaaaccctgaaacattgccgtcctgatgtttccgtttacaaacacaacatcgaccgctttcagacggccctgtcgcacgccttccaccaactgcttacccaccgccgccaaagcctgaccgcccaagcagcattgctcgaagccgtttcgccgcagcacattctggagcgcggcttttccgtcgtcaaaaacacacgcggacaagtcatccgcaacgccgatgttttgaagcaggggcagaagctgcacattatcttcgccgacggcgaaaccgacgtgcgcgtaagcaaagaacaagggcagcaggatttgttcgattgcatttaa

SEQ ID NO: 37967 - DNA, 3435 bp, Neisseria meningitidis
atgaccgagccgacctacatccccctgcgcctgcataccgagttttcgattaccgacggtatggtgcggattaaaaaactgattgccaaagcgcaggaatacggtttgcctgctttgggcatcagcgatttgatgaacgaattcggtttggtgaaattctataaagcctgccgcagcgcaggaattaagcccatcggcgcggcggacgtgtggataggcaatccgaatgcgcccgacaagccgttccgtgccatgctgattatccgcaacgatgcgggctatctgcgtttgagcgagcttttgacagaggcctatgtcggcaaagaccgcaatatccatcatgcggaactcaatcccgaatggctggaaaacggcgacaacagcggcttgatttgtttgagcggcgcgcattacggcgaagtgggcgtgaatctgttgaacggcaatgaagacgcggcgcgtgcggcggcgttgaaatatgcggcgtggttccccgatgcgttctatatggagctgcaacgcctacccgaacgccccgaatgggaggcttgcgtttcgggcagcgtgaagctggcggaggaattgggtttgccggtggtggcgacgcatccgacacagtttatgagccgcgacgatttcaacgcgcacgaggcgcgggtatgcatcgcaggcggctgggtgctgacggacaagaaacgtccgcgcgatttcacgccggaccagtttttcattccgccggaaacgatgctggagcgttttgccgatttgcccgaggccttggaaaacacggtggaaattgccaaacgctgcaacctgcacatcacattgggcaaaaacttcctgccccttttccccacgcccgacggtttatcgcgcgatgactatctcatcaaactctcaaacaagggtttgcaggaacgcatggttcagctttatcccgacgaggcggagcgtgcggcaaaaatgccggaatatcaggaacgtttggattttgagctgaacatcatcatccagatgaaattccccggctatttccttatcgtacaagactttatcaactgggcgaaaacgcacggctgtccggtcgggccgggacgcggttcgggcgcgggttcgctggtggcgtattcgctgaaaattaccgacctcgacccgctgaaatacgcgctgctgtttgaacgtttcttaaaccccgaacgcgtctccatgcccgactttgacgtggacttttgccaatccaaccgggggcgcgtgattgagtatgtgcgcgaaaaatacggcgcgaaggcagtcagccaaattgtcaccttcggcacgatgtcgtccaaagcagtgattcgcgacgtggggcgcgtactggaactgccgtttatgctgtgcgacaaactgtccaagctgattccgttggaagccaacaaacctctgggtttggacgacgcgatgaaggcggagccgcagattcaggaattaatcgaagcggaagaagcggacgaactgattacgctggcgaaaaagctggaagacctgacgcgcggtttgggtatgcacgcaggcggcgtgttgattgcgccgggcaagatttccgattacagccccgtgtatcaggcggatgaatccgcctctcccgtatccatgtacgacaagggcgacgtggaagacgtgggtttggtgaaattcgactttttaggtctgcgtaacctgaccattatcgaaatggcgcagaacaacatcaaaaacaccaccggcgacatcatcgatgtcggcaaaattccgctcgacgaccaggccgcctaccaaatcttccgcgatgcgaacaccaccgccgtgttccagttcgagtcgaccggcatgaaaaaaatgctgaaaacggcgcataccaccaagtttgaagaactgattgccttcgtatcgctctaccgcccaggcccgatggacaacatccccgacttcgtcgcgcgtatgaaggggcaagaattccaatacatccatccgctgctcgagggcatcctcgcgccgacctacggcattatggtgtatcaggaacaagtgatgcaggcggcacagattatcggcggctactcgctcggcggcgcggacctgctgcgccgcgcgatgggcaagaaaaagcccgaagaaatggtgaaacaccgcgaaatcttcgccgaaggcgcggcaaaacaaggcatttcgcgcgaaaaatccgacgaaatcttcaactacatggaaaaattcgccggctacggtttcaacaaatcccacgctgccgcctacgccctgatttcctaccagaccgcatggcttaaagcccactatcccgccgaatttatggcggcgaccatgtcgtccgaattggacaacaccgaccagctcaagcatttctacgacgactgccgcgccaacggcatcgagtttctgccgcctgacatcaatgaatccgactaccgcttcacgccgtatccggacatgaaaatccgctacgcgctcggcgcgattaaaggtacgggcgaagccgccgtcgaatccatcacctccgcgcggcaaagcggcggcaagtttaccggcctcttggacttctgcgagcgcgtcggcaaagaacacatgaaccgccgcacccttgaagccctgatacgcggtggcgcgttcgacagcatcgaacccaaccgcgccatgctcttggcgaacatcgacctcgccatgaacaacgccgaccaaaaagccgccaacaccaatcagggcggacttttcgacatgatggaagacgccatcgaaccggtgcggctcgtcgacgcgcccatgtggagcgagtcggaaaaactcgccgaagaaaaaaccgtcatcggcttctacctatccggccacccgttcggcccgtatgcccaagaagtccgccaaatcgccccgcagaaactgtcgaaactcaaaccgcaagacagcgtgcgcctcgccggattcgttaccgccgtgcgtacgatgatgggcaagcgcggcaaaatcgccttcgtcagccttgaagatttgagcggacaggttgaaatcatggtcggcggtcagacgttggaaaactgcgccgactgcctcaaagccgaccaagtgctgattatcgaatccaaagtcagccgcgacgactacggcggcggcgacgggctgcgtattctggcaaaccaagtcatgaccctgcaaacggcgcgcgaacgctacgcccgcagcctcagcctcgccctcgccccgcatcacgacatcggcggactggtacaactgcttgccgcccaccaactgcccgacacgccgcgcatcccgctgcaactgtcgtatgccaacgaaaaagcgtcgggcaggcttcaagtgccgccgaaatggacggttacaccgagctccgcattgttcggcgaactggaaacattgctcggcagccggtcggtgcgcgtgaattggtaa

SEQ ID NO: 37968 - DNA, 909 bp, Neisseria meningitidis
atgaacacgccccaatccgccatcattcccgaccacgcccaagccggcatctttatcgaagccgacttcgccgccaaccgcctcaacgatattaaagccgcctgccgcgcttcgctcgacgcgttaactgccttgaaagcccgctttccggacgatattttgggtctgaccatcgccttcggcagcaaagcctgggcaacattcggacatacggacgaaggcagtgaaatcaaacccttctccgaaatgggcaacgggcttgcgccgtccacgcagcacgatatgtccatccacatccaatccttccgccaaaacgccgcctacgcgcttgcccaatccgttttgggcgcgttcggcgacagcatatgcgtcgcgtccgaagaacacggtttgcgcctgtatcaggatcgcggactggacggtttcgtcgacggcacggaaaacccgcagggcgatgaaaatgtccgcgaagtcgccatcatccccgaaggaaaacccgatgcgggcggcagctatgtcctgctgcaaaaatacctgcacgatttgaaaaaatgggatgccgtccccgtcgccgaacaggaggcctcggtcggacgcggcaaggaaaccgacgacgaattcggccgcgatgtccgcctgcccgattcgcacctcggccgcgtcaacctgaaagaaaacggagtcggcctgaaaatcgtccgccgcagcctgcccttcggcaaaatcagcggcgaacacggtttgatgtttaccgcatactgccgcacgctgcacaatatcgaagcgcaattattgagtatgttcggcgatacggacggcaaaaccgacctgctgctccgacatctctccgccgccgtttcgggcggatactactacgcgccgtctgtcgaacgcctgcaaaacctctaa

SEQ ID NO: 37969 - DNA, 948 bp, Neisseria meningitidis
atggaatttttcattatcttgttggtagccgtcgccgttttcggtttcaaatcctttgttgtcatcccacaacaggaagtccacgttgtcgaaaggctcgggcgtttccatcgcgccctgacggccggtttgaatattttgattccctttatcgaccgcgtcgcctaccgccattcgctgaaagaaatccctttagacgtacccagccaagtctgcatcacgcgcgacaatacgcagctgactgttgacggtatcatctatttccaagtaaccgaccccaaactcgcctcatacggttcgagcaactacattatggcgattacccagcttgcccaaacgacgctgcgttccgttatcggacgtatggagttggacaaaacgtttgaagaacgcgacgaaatcaacagtactgttgttgcggctttggacgaggcggccggggcttggggtgtgaaggttttgcgttatgagattaaagacttggtgccgccgcaagaaatccttcgctcaatgcaggcgcaaattactgccgaacgcgaaaaacgcgcccgtatcgccgaatccgaaggtcgtaaaatcgaacaaatcaaccttgccagtggtcagcgcgaagccgaaatccaacaatccgaaggcgaggctcaggctgcggtcaatgcgtcaaatgccgaaaaaatcgcccgcatcaaccgcgccaaaggtgaagcggaatccttgcgccttgttgccgaagccaatgccgaagccatccgtcaaattgccgccgcccttcaaacccaaggcggtgcggatgcggtcaatctgaagattgcggaacaatacgtcgccgcgttcaacaatcttgccaaagaaagcaatacgctgattatgcccgccaatgttgccgacatcggcagcctgatttctgccggtatgaaaattatcgacagcagcaaaaccgccaaataa

SEQ ID NO: 37970 - DNA, 1416 bp, Neisseria meningitidis
atgaacctgcatgcaaaggacaaaacccagcatcccgaaaacgtcgagctgctcagtgcgcagaagccgattaccgactttaagggcctgctgaccaccattatttccgccgtcgtctgtttcggcatttaccacatcctgccttacagccccgatgccaataaaggtatcgcgctgctgattttcgttgccgcactttggtttaccgaagccgtccacattaccgtaaccgcactgatggtgccgattctcgccgtcgtactcggtttccccgacatggacatcaaaaaggcgatggctgatttttccaacccgattatctacatttttttcggaggcttcgcgcttgccaccgccctgcatatgcagcggctggaccgtaaaatcgccgtcagcctgttgcgcctgtcgcgcggcaatatgaaagtggcggttttgatgttgttcctcgttaccgcctttctgtccatgtggatcagcaacaccgccaccgccgcgatgatgctgcctctagcaatgggtatgctgagccacctcgaccaggaaaaagaacacaaaacctacgtcttcctcctgctcggcatcgcctattgcgccagcatcggcggcttgggcacgctcgtcggctcgccgcccaacctgattgccgccaaagccctaaatctggacttcgtcggctggatgaagctcggcctgccgatgatgctgttgattctgcccttgatgctgctctccctgtacgtcatcctcaaacctaatttgaacgaacgcgtggaaatcaaagccgaatccatcccttggacgctgcaccgcgtgatcgcgctgttgattttccttgccacagccgccgcgtggatattcagctccaaaatcaaaatcgccttcggcatttccaatcccgacaccgttatcgccctgagtgccggcgtcgccgtcgtcgtcttcggcgtggcgcaatggaaggaagtcgcccgcaataccgactggggcgtgttgatgctcttcggcggcggcatcagcctgagcacgctgttgaaaacatccggcgcgtccgaagccttgggacagcaggttgccgccaccttttccggcgcgcccgcatttttggtgatactcatcgtcgccgccttcattatttttctgaccgagttcaccagcaacaccgcctccgccgcattgcttgtaccgattttctccggcatcgctatgcagatggggctgcccgaacaagtcttggtattcgtcatcggcatcggcgcatcttgtgccttcatgctgccggttgccacaccgcctaacgcgattgtgttcggcacgggcttaatcaagcaacgcgaaatgatgaatgtcggcatactgctgaacatcctctgcgtagtattggttgctctgtgggcttatgctgtactgatgtaa

SEQ ID NO: 37971 - DNA, 324 bp, Neisseria meningitidis
atgggagattccgtactatccgccatccaacaaaccatcacccagcgaaaatctgccaatccgtccgaatcttacgtcgcacagctcttgcataagggcgaagacaaaatcctaaaaaaagtgattgaagaggcgggcgaagtgttgatggcatccaaagacaaaaacccgtcccacctggtttacgaagttgccgacttatggtttcacaccatgattcttctgacacaccacgacctgaaggcggaagacgtattggacgaacttgcgcgccgccaaggtttgtcgggcttggccgaaaaagccgctcgcacagaatcttga

SEQ ID NO: 37972 - DNA, 402 bp, Neisseria meningitidis
atgaacacaacccgactgccgaccgccctcgtcttgggctgcctctgcgccgccgcttctgccgccgacaacagcatcatgacaaaaggacaaaaagtgtacgaatccaactgcgtcgcctgccacggcaaaaagggcgaaggtcgcggaaccatgtttccgccgctctaccgctccgacttcatcatgaaaaaaccgcaggtgctgctgcacagcatggtcaaaggcatcaacggtacaatcaaagtcaacggcaaaacctacaacggattcatgcccgcaaccgccatcagcgatgcggacattgccgccgtcgccacttatatcatgaacgcctttgacaacggcggcggaagcgttaccgaaaaagacgtaaaacaggcaaaaagcaaaaaaaactaa

SEQ ID NO: 37973 - DNA, 1152 bp, Neisseria meningitidis
atgaatacgcacgcttttcctgtctgttggattttttgcaaggtcatcgacaatttcggcgacatcggcgtttcgtggcggcttgcccgtgttttgcaccgcgagctcggttggcaggtgcatttgtggacggacgatgtgtccgccttgcgcgcgctttgccctgatttgcccgatgttccctgcgttcatcaggatattgatgtccgcacttggcattccgatgcggcagatattgataccgcgcctgttcccgatgccgtcatcgaaactttcgcctgcgacctgcccgaaaatgtgttgcacattatccgccgacacaagccgctttggctgaattgggaatatttgagcgctgaggaaagcaatgaaaggctgcatcttatgccttcgccgcaggagggtgttcaaaaatatttttggtttatgggtttcagcgaaaaaagcggcgggttgatacgcgaacgtgattaccgtgatgccgtccgtttcgatattgaagccctgcgagagcggctgatgctgcccgaaaaaaacgcctccgaatggctgcttttcggctatcggagcgatgtttgggcaaagtggctggaaatgtggcaacaggcaggcagcccgatgaccctgttgccggcgggggcgcaaattatcgacagcctcaaacaaagcggcgttattccgcaagatgccctgcaaaacgacggcgatgtctttcagacggcatccgtccgcctcgttaagattcctttcgtgccgcaacaggacttcgacaaattgctgcacctcgccgactgcgccgtcatccgcggagaagacagtttcgtgcgtacccagtttgccggcaaaccctttttttggcatatctacccgcaagatgagaatgtccatctcgacaaactccacgccttttgggataaggcgcacggtttctacacgcccgaaaccgcctcggcacaccgccgcctttcagacgacctcaacggcggagaggctttatccgccacgcaacgcctcgaatgttggcaaatcctgcaacaacaccaaaacggctggcggcaaggcgcgaaggattggagccgttatcttttcgggcagccgtccgcatccgaaaaactcgccgcctttgtttcaaagcatcaaaaaatacgctag

SEQ ID NO: 37974 - DNA, 1224 bp, Neisseria meningitidis
gtgggacgcagaaaactttggtttgccctggcagcagcaggcgttatcggcggtttggtcggcattgtgctgacggaactgatgcacttcatacagcatacggcatacggttatggcgcggacggcgtgtacacttcgttccgcgaaggcgtggcacaggcttccagtatgcggcgcgttgtcgtgctgacgctgtgcggcgcggtcgcaggagtcggctggtgcttgctgaaagccttgggcaagccgcaaatcgaaatcaaagccgccttgaagcagccgttgcaggggctgccgtttctgacgacggtttttcatgttctgctgcaaatcataacggtcggactcggttcgccgctcggacgggaagtcgcgccgcgtgaaatgactgccgcgtttgcttttgccggcggcaggcggttgggtttggatgaagacgaaatgcgcctcttgattgcctgtgcgtccggcgcgggtttggcagccgtgtataatgtgccgctcgcctccacacttttcatcctcgaagccatgctgggcgtgtggacgcagcaggcggttgccgccgcgttgctgacttccgtcattgccaccgccgtggcgcgtatcggcttaggcgacgtacagcagtatcatcccgccaaccttgccgtaaatacttcattgctttggttttccgccgtcatcggcccgatattgggcgcagccgccgtctttttccagcgtaccgcccaaaagttcccctttatcaagcgcgacaacatcaaaattattcccttggcagtctgcatgtttgtgctcatcggcgcgattgccgtgtggtttcccgaaattttgggcaacggcaaagcaggcaaccaactgacttttagtggtttgaccggttggcaatacgctttggaacttgcagccgtcaaatggctggtcgtcttgatggcgctggcggcaggcgcatacggcggcctgattacgccgtctatgatgctcggcagcaccatttcttttgcagccgccgccgcgtggaacagcgttttccccgcaatgtcgtctgaaagcgcggcagtcgtcggagcggcggtgtttctcggcgtgtcgctcaaaatgccgctgaccgccattgtgttcgtattggaactgacctacgcgccgctgtccctgctgctgcctttgtgcatcggcatggcgggggcattgggaacatcgggaaaaatgggcttcaaatga

SEQ ID NO: 37975 - DNA, 1149 bp, Neisseria meningitidis
atgagcatctatctcgacttcggcattagtcctaaaacgttccgacagacttatctgtatcaaaagcccaagctctttaaaggagcggttcggaatctcgaagccgcatcttggaaagatatcaacgagatataccaacgagcagacccaaccgcaccgctgtttcatctgcgtaaaaaaggtgcaattgttcctaaagaagaatacgtcgaaagtttcgacgatttgggcaaaactcgctaccgttttattaaatccgttatctacgaacatatgaagaatggtgcgtcgttgctctataaccatattatagtggattaaatttaaaccagtacagcgttgcctcgccttgccggcgcacatactattgttagtgggtatcttgcttttggcagcgacgaatcttataaaaaccattgggacatccgagatgtgtatgccatccagcttttcggcaagaaacgttggcaacttactgcccctgatttccctatgccattgtatatgcaacagactaaagatactgatatttccattcctgaacatatcgatatggatattatccttgaagcaggtgatgtcctctacatcccgcgcggttggtggcacagacctatcccgctcggctgtgaaaccttccacctcgctgtcggtacctttccgcccaacggctataattacctcgagtggctaatgaagaaattccccaccatagaaagtctgcgccacagtttctcagactgggagcaagataggacgcgtatcaacgatactgccgcacaaattgctgccatgattgccaaccccgtcaattacgaagccttcagtgaagacttcctcggcaaagaacgtaccgataccgcttttcatctcgaacagttcgcgaatcccaacgctactccgctttcagacgacgtcaggttgagactaaatgccaataatttggatacgttggaaaagggatatttgattgggaatgggatgaagataagcgtagatgagttggggaaaaaagtgttagaacatatcggtaagaatgaaccgttattgttgaaaaatctactggttaacttcaatcagggaaaacatgaagaagttaggaagttgatttatcagttgatagagttagattttctggaacttttgtga

SEQ ID NO: 37976 - DNA, 279 bp, Neisseria meningitidis
atgattcacgaagaaatctgcgccatgcctatgggctatgaaaccttgatcggcgatatgggcagcgcactgtcaggcggacaaaaacaacgcatcgtattggcgcgggccttatattgcgaaccgaaaatcctatttttagatgaagcgaccagccatttggatattgccaatgaaaaagcagtcaatgcaaacttgaatggcttgtctatcataaaaattatggcggcacacagaaaggaaacggtggaatcagcagataggaaaatgtctttagga

SEQ ID NO: 37977 - DNA, 228 bp, Neisseria meningitidis
atggaaacttgggttcaaaactacacggcaatcggcggcagcctgtatctgactgccgccgccgcactcttacccatcgtctttttctttgccgcgctgaccgtcctgaagctgaaaggctatcaggcggggctttatacgctgctgattgcgcttgccgttgccgtattcggcttcgggatgccgacgggtatggcggtttcttccctgccgccgcagccgcattga

SEQ ID NO: 37978 - DNA, 1677 bp, Neisseria meningitidis
atgctgacctataccccgcccgatgcccgcccgcccgccaaaacccacgaaaagccgtggctgctgctgttgatggcgtttgcctggttgtggcccggcgtgttttcccacgatttgtggaatcctgccgaacctgccgtctataccgccgtcgaagcactggcaggcagccccacccccttggttgcccatctgttcgggcatgccgatttcggcataccacccgtgtatctttgggttgccgccgcgttcaaacatttgctgtcgccgtgggcagccgacccgtatgatgccgcacgctttgcaggcgtgtttttcgccgttgtcgggctgacttcctgcggctttgctggcttcaactttttgggcagacaccacgggcgcagcgtcgtcctgattctcatcggctgtatcgggctgattccgaccgtacactttctcaaccccgctgccgccgcctttgccgccgccggactggtgctgcacggttattctttggctcgccggcgcgtgattgccgcctcttttctgctcggtacgggctggacgctgatgtcgttggcagcagcttatccggcagcatttgccctgatgctgcccttgcccgtactgatgtttttccgtccgtggcaaagcaggcgtttgatgttgacggcagtcgcctcacttgcctttgccctgccgcttatgaccgtttacccgctgctcttggcaaaaacgcagcccgcgctgttcgcgcaatggctcgactatcacgttttcggtacgttcggcggcgtgcggcacgttcagacggcattcagtttgttttactatctgaaaaacctgctttggtttgcattgcccgcgctgccgctggcggtttggacggtttgccgcacgcgcctgttttcgaccgactgggggattttgggcgtcgtctggatgcttgccgttttggtgctgcttgccgtcaatccgcagcgttttcaggataacctcgtctggctgcttccgccgcttgccctgttcggcgcggcgcaactggacagcctgaggcgcggcgcggcggcgtttgtcaactggttcggcattatggcgttcggactgtttgccgtgttcctgtggacgggctttttcgccatgaattacggctggcccgccaagcttgccgaacgcgccgcctacttcagcccgtattacgttcccgacatcgatcccattccgatggcggttgccgtactgttcacacccttatggctgtgggcgattacccgcaaaaacatacgcggcaggcaggcggttaccaactgggcggcaggcgttaccctgacctgggctttgctgatgacgctgttcctgccgtggctggacgcggcgaaaagccacgcgccggtcgtccggagtatggaggcatcgctttccccggaattgaaacgggagctttcagacggcatcgagtgtatcggcataggcggcggcgacctgcacacgcggattgtttggacgcagtacggcacattgccgcaccgcgtcggcgatgtacaatgccgctaccgtatcgtccgcctgcctcaaaacgtggatgcgccgcaaggctggcagacggtttggcagggtgcgcgcccgcgcaacaaagacagtaagttcgcactgatacggaaaatcggggaaaatatattaaaaacaacagattga

SEQ ID NO: 37979 - DNA, 588 bp, Neisseria meningitidis
atgaacaatatgtttgccgcaaaattgtccaaactggtttataccgcttccgaccatcctgattccctgtcggagatggaggagtttgaccgcctgattctgctgatacgcaaactgtatcaaatattggacgggcaacatatcctctccagagtaacggtttgccttcaccaccaaaaccggcgcggtctgattgccttggataaagcggctgccggttgcgatgcggcaatgttgcgcgcccaacgttggcgcatctacacgcagattgcggaacgccttgccgggtcgggcggcggcttcacggttacggcagaaagcgtgtccgccgcctgtccggagcttgaaggacgctatctcgagcttgtccgccgcaccgccacctctttcggtttcgtgcaagtacaggaatatccggcaggcgggcaggaagaaacacaagccgtcccggatgccgcatcggatcattccgtcagaaaaccaatcaaaatcaatatagaagcgaaagtggaacgctatccggcataccgcccgaccgccgccctgaaagtaacccgccggcggtttttccggctgcaaaaccgataa

SEQ ID NO: 37980 - DNA, 660 bp, Neisseria meningitidis
atgggcaggcatttcgggcgcaggcgttttttgacggctgccgccgttgcggcggcgggcgcggcggtttcttttttgccgaatccttttgccgccgatgatgaaaaacgcaacggggatgaaaaacgcagtgaaaatgtgtttttctggaaaggtgtcgcactgggttccggtgcggagctccgtctgttcggtgtggacgacaggcgtgcggcggatttggtcaacaaggttttggcggaagtggcgcgtttggaaaaaatgttcagcctttaccgtgaagacagcctgatcagccgcctgaacagggacggttatctgacttcgccgtcggcggattttttggaactgttgagcctgtgccgcgatattcacgcgctgacggacggcgcgttcgatccgacagtgcaggcgttgtggaaactgtatgccgattattttgccgcccgtcccgatgcggaaacgccgccgcctcaaaacagcgtgaaggaagccctgaaacgggtcggcttcggcaaagtctcgtttgacgaccgtgaaatccgttttgccgaaaagggtatgggtttgtccttgaacggcatcgcgcaaggctatagtggattaacaaaaaccagtacggtgttgcctcgccttagctcaaagagaacgattctctaa

SEQ ID NO: 37981 - DNA, 879 bp, Neisseria meningitidis
atgaattacgcaaaagaaatcaatgcgttaaacaacagcctttccgatttgaaaggcgatatcaacgtttcgtttgaatttttcccgccgaaaaacgaacaaatggaaacgatgctgtgggattccatccatcgtctgcaaaccctgcatcccaagttcgtatccgtaacttacggtgccaactctggcgaacgcgaccgcacgcacggcatcgtcaaacgcatcaagcaggaaaccggcttggaggccgcgcctcacctgaccggtatcgacgcttctcccgacgaattgcgccaaattgccaaagattattgggacagcggtatccgccgcattgtcgccctgcgcggcgacgagccgcccggttacgagaaaaaaccgttttacgccgaagacttggtcaaactgttgcgctccgtcgccgacttcgacatttctgtagcggcatatcccgaagtgcatcccgaagcgaaatccgcacaagccgacctgattaatttgaaacgcaaaatcgatgcgggcgcgaaccacgtcatcacccaattcttcttcgatgtggaacgctacctgcgcttccgcgaccgctgcgtgatgttgggcatcgatgtggaaatcgtccccggcatcctgcccgttaccaacttcaagcagctcggcaaaatggcgcaggtaaccaacgtcaaaatcccaagctggctgtcgcaaatgtatgaaggtttggacgacgaccaaggcacgcgcaatctggtggcggcaagtatcgccatcgatatggtcaaagtcctgtcccgcgaaggcgtgaaagatttccacttctatacgcttaaccgcagcgagctgacttacgccatctgccatattttaggcgtgcgcccttaa

SEQ ID NO: 37982 - DNA, 864 bp, Neisseria meningitidis
atggaattgaacgaatttctcgataaagcctatgccgttttgcggcgtttggatgccgtgcttccgcccgaacccgggcatacggattggaacgcgcttgccttccgctggcagagtgcgggcaaaaaaggttttttggaacacttgcccgatccgcacacctttcccttggtaaggctggcgggagtcggcaggcaaaccgaattgctggtgcgtaataccgaacagttcattgtcggcagacccgcgaacaatgtattgatgagcggcgcgcgcggaacaggcaaatcctcgctggtcaaagccctgctacacgaatatgcggataagggattgcgcctgatcgaagtcgataaaagcgatttaatcggcctgccttacctgttgacgcttttgaaggaacgtccggaaaaatttatcgtattttgcgacgatttgtcgtttgaaagcggcgatgaaacctataaggcattgaaaaccgcgttagacggcggtctgtctcaacgttgcgccaacgttttggtttacgcgacttccaacagacggcacctgatgcccgaatattttgacgagaatgccggtacgacggggatgcggggggaaatccatcagaaagaagcggtggaagaaaaaatatccctgtccgaccgattcggattgtggctcagtttttatccgttcgatcaaaacgattatctggcggcggtgcaaaattggctggaagatttcggcgtgccgtatgatgaaaccgcacagatggcggcattgcagtgggcgcagacgcggggcagccgttcgggacgttccgcgtggcagtttgcctgcgactgggcgggcaggctgccgaaacaacgggcgttgtga

SEQ ID NO: 37983 - DNA, 1392 bp, Neisseria meningitidis
atgtttcccgatttctcccaaaccctctccaaagaccgccacttcctgcaatccgccttcaaaaatcccaacaaatacggcggcttgtccaaagtcgaagaaaaataccgaaaatcgcacgaaatctttttgaaacgtttggcagccttgcccaaacccgaattcgacaacaccctgcccgttcacgaaaaacttgacgaaatcaaaaaaaccgttgccgaacatcaggtaacgattatttgcggcgaaaccggttcgggcaagaccactcagttgcccaagatttgtctggaactcgggcgcggggcggcgggtttgatcgggcatacccagccgcgccgtttggcggcgcgttccgtagcagagcggattgccgaagagctgaaatccgaaatcggcagcgcggtcggctataaagtgcgcttcaccgaccacacctcgcgcgatgcctgcgtcaagctgatgaccgacggcatcctgctggcggaaacccagaccgaccgttatctcgccgcctacgacacgattatcatcgacgaagcgcacgagcgcagcctgaacatcgacttccttttgggctatttgaaacaactcctgccgcgccgccccgatttgaaagtcatcatcacctcggcaacgatagacgcagaacgcttttcccaacacttcaacggcgcgcccgtgctggaagtgagcggacgcacctatcccgtcgaaatcctctaccgaccgctgatcggcaaagacgaagacgacgcggaaatagaattgaccgacgcgattgtcgatgcggcggacgaattggcgcgatatggcgaaggcgatattttggtattcctgccgggcgaacgcgaaatccgcgaagccgccgaagccctgcgcaaatccacgctacgccgcaacgacgaaatcctgcccctgttcgcacgcctgtcgcacgccgagcagcacaaaatctttcacccctccggagcgaaacgccgcatcgtgctggcaaccaacgtcgccgaaacctcgcttaccgtgccgggcatcaaatacgtcatcgacaccggcctcgcgcgcgtcaaacgctattccgcacgggcgaaagtggagcagcttcatatcgaaaaaatctcccaagccgccgcccgccaacgctccggccgctgcggacgcgtctccgcaggcgtatgtatccaattgttttcagaagaaaatttcaacaaccgccccgaatttaccgaccccgaaatcgcccgcagcaacctcgccgccgtcatcctgcgcatggcatcgctgaaactcggcgacgtagcggcattcccatttttagaaatgcccgattcgaggtatattaatgatgggtttcaggtgttgctggaattaggggcagtggaggccgcctga

SEQ ID NO: 37984 - DNA, 558 bp, Neisseria meningitidis
atgaatccacttattcatcaagcaaaggaatcatctatgcaaacccgcattctctccgccgtactgctggctttttcaaccgctgcctttgccgggggcgcattcacgctgcaattcgacaacccgtccgaagacggcggcttcacgcaaaaccagcttttgagcgcgccttacggatttggctgttcgggcggcaatgcttcgcccgcgctgtcgtggaaaaatccgcccgccgggacaaaaagtttcgtcctgaccgtttacgataaagacgcgccgaccggactgggctggatgcaccgggtggtcgccgacattcccgccgatgtccaccgccgcaacgcgacctcgctgcaattaagccgctgcgccaacatcgccgacgaccagtccgcagccatatcggcggtaatcagtttgcggatttgccgcatcaggttgacgccttcgtacacggcaaaaccgatgccgtcatgctgcaaccacgccaacacgccgcaaagcgcgacctccgccgcattgtgcggcacttcttcatccgtcagcaccgccgccgca

SEQ ID NO: 37985 - DNA, 1059 bp, Neisseria meningitidis
atgtcttcacgcaaaattatccacatcgacatggacgcattctacgcatcggtagagctgcgcgaacagccgcatttgaaagggcggccggtggtcgtcgcgtgggagggcgcgcgttcggtgatttgcgccgcatcgtatgaggcacggcagttcgggctgcattccgcgatgtcggtggcaacggcgaaaaggctgtgtccgcaagcggtgtatgtgccgccgcatttcgatttgtaccgtcaggtttccgcgcagattcacgccgtattcaggcgttataccgatttaatcgaacccttgtcgctggacgaagcctatcttgacgttacccgtaatttcaaaaacatcccttacgccagcgaagttgccaaagaaatccgtgccgccatttttgcggaaacaggtttgactgcatccgcaggcatcgcgccgaacaaatttctggcgaaaatcgcgtcggactggcgcaagccgaacgggcagtttgtgttgccgccgcacaaagtcatggcatttttggaaaccctgcctttgggcaaaatccccggcgtgggcaaggtaacgctgaaaaaaatgcagtcgctgggtatgcggacggcgggcgacttgcgccgtttcgagcgcggcgaactcttaaaccatttcggacgctacggataccgcctctatgatttggtgcgcggtacggatgaacgccccgtcaaagccgaacgcgaacgcctccaaatctccacagaaatcaccctgcctgaagacctgccgctcgagcaggctgccggacacctgccccatcttgctgaagacctgtggcggcaaatcacgcgcaaaaacgtcgaagcccaaagcgtaacgctcaagctgaagacctacgatttccgcatcatcacgcgcacactgacttattcctccgtattgcccgactgcgcagctctgctgcaggctgcgcaaatgttgatagcgcgcgtcccgccgcagacggaagacgcgttccgccttatcggtatcggcgtggggcatcttgtgccgaaaaaccagcagcaggatttgtgggcgtaa

SEQ ID NO: 37986 - DNA, 1773 bp, Neisseria meningitidis
atgattccatccgacttcattgacgaacttctagccaaaaccgatattgtcgacatcatcgacgaacaggttccgctgaaaaaaggcggggcgaactatatggcgtgttgcccgttccacaaggaaaaaacaccgtcgttttcggtcagtccgaccaagcagttttaccactgtttcagttgcggggcgcacggttcggcgattggttttgtgatggagcatcaggggctgtcgtttccggaggcggttcagttccttgccgaccgcgtgggtatgattgtgcctaaagtgcgcgggcagaacgataatcccgaagtccgtgccgaacgtaagaaaaagcagcagacgctggaagaaacgacggcggcggcggctgatttttatgcgcaacagttgcgcttcaatccgacggcgaaggcttatttggacaagcgcggcttgagcgcggaagtcatcgcgcattatggtttgggctacgcgcccgacggctggcagcctttggcgcaagtattccaaccgtacccgaataccgcgttggtggatacgggtatggtgattgacaatgaggggcggtattacgaccgattccgtcatcggattatgttccccatccgcaatccgcgcgggcaggtcatcggtttcggcggcagggtgctggacgactccaaacccaaatatctaaactctcccgatacgcctttgtttgataaggggaaaaacctttacggattgtatgaagggcgtgctgctgtcaaggaagtggggcggattctggtggtcgaaggctatatggacgtggtcgcgctggcacagttcggcgtaggctacggtgtggcggccttgggcacggcaacaacagcggaacacgtcaaaatcctgatgcgtcaggcggacagtatttatttctgtttcgacggcgacagcgcggggcgcaaagcggcttggcgcgcgctggaaaacgcgctgccgcaattgaaggacgacaaatcgctgcattttttgttcctgcccgaggaacacgaccccgacagctacatccgcgcctacggcaaagcgcaatttgaagatgcgctgttgaatcaaagcaagcccttgtcggaatatttttgggaacatcttacagacggcattcatctcaatacgcaggaaggcaaggcggaattggtaaaaaccagttcgccgcttttggcgcagattaccgcgccggcattggcttatttgttaaaacaacggcttagcgagctggtcggcatcgaccccgacaacctcgcgcaactgctcggacaggaagcgccaaagcggcacgtcaaacaaaaaaactacaaactgcccccgatttccgtcaaacagcccgttatgccgacattggtgcaacggcaaatccgcagcctcttgataaatccggattgggctgcatatatagacctgcccgattatttggcgttggacggcgatttcgcctgccttgccaacctcgccgaaaccattaaaaaccatccttccgtgccggcaaccgcacaggttttggaacatatgcgcggttcgccctacgaagaaacaatcaaccgcatcttccggtcggcccttcaatcggaagaaatggaaggcggcggcgaagaagattgcgaaaacttccaaatcggcatcaaaaaactgctcaatgagttaaaatacagccaaatcgaaacattaaaacaaaaaagcctgcaatccggcttaaatgaaagcgagaaaaaacttttgctgtcgctgctgaccgcaaaacaaaattga

SEQ ID NO: 37987 - DNA, 2439 bp, Neisseria meningitidis
atgacagaaaaatcccataaaaaaacagcaaaaggcagggcgggaagcccgtccccaacgtccgcacgcaacaagaaagccgacaacggcgcacggggcaataaagtttccgagcggctcaaggcggtcaaagagttgcagaaaaccgaaaccaaaaaggcgcgtcccgaacatgtcgtcaaccttatcggcgacgcactgtggctgatgggtttggcggcaaccctgtatttggcgatttccctgatcagtttcgatatgggcgatccgtcttggtcgcacagttcgccggttgtggaagatgtcgccaattggggcggactgttcggcgcgtatgttgccgatgtcggctattatcttttcggctggtcgttctggtggtggatagcggctgcctgcgtcgtgctgtataaaaatttccgcctgcacgcaaaacagacggaaaacgaggcatacaaccacaaaatcgctgccgccgcgctgtttgtcctgacggtcttcagccccgtcttggagtattttgtgctgggcggaaaatatgccgactccctgcctgtcggagcaggcggtatggtcggcatacgcgtcggcgcagtgtttgcgtggctgctggggaaatcgggcagcctgctgattatcttggttgttctgctgttgtcgttgtccctactggtgcagatttcatggctggaatttttgaacggtgcaggcagggcggttcaaaaccgcctgagtgccttatccggcaaggtcatggctttaggaaaacgccggccgaataccaaaacagacggtgtcgatacccaaaatacacggcgcatggtaaaagaagccaagaatattacggccaaacccgttgccttgcccgaaggcagcagcagcaaccgcaaatccgtcgcggtttccgtcgcgccgccgcccaaaattcaggtttctctgtttgaagatgacgaacctcggcaggcgggcgaataccacaagcctacattgaacctattgcggattcccgacagcgagcccgtcagcatcaatcccgccgaattggagcgcactgccgaactaatcgaatccaagctggcagaattcggcatcggcgtacaagtcgtatccgccacatccggccccgtcatcacgcgctacgaaatcgaacccgcgcaaggtgtcaaaggcagccaaattgttgccttgtcgaaagatttggcacgctctatgtcgctgcaatccgtgcgtatcgtcgaaaccatcgccgggaaaaacacgatgggcatcgagttgcccaacgacaaacgccaagacgtgatgttgagcgaaatcttgtcctcgcccgtgtttgccgaagccaaatccaagctgaccgtcgcgctgggcaaagacattgccggtacccccgttgtcggcgacttggcgaaaatgccgcaccttttggtcgccggtatgactggttcgggcaagtccgtcggcgtgaacggcatgattatgtctatgcttttcaaagctacgcccgacgaagtccgcttcattatgatagacccgaaaatgctcgagttgagcatttacgacggcattccgcacctgctctgtcccgtcgtgaccgatatgcgcgaagcagggcaggcgttgaactggtgcgtcgccgaaatggaaaaacgctaccgcctgctttcccacgccggtgtacgcaatctggaaggcttcaaccaaaaagtcgaagccgcaaaagcggcaggcaagcctttgcttaatccgttcagcctgaaccccgacgagcccgagccgctggaaaaactgccgttgattgtggtcgttatcgacgaacttgccgacctgatgatgacggaacgcaaagccgtcgagcagcaaatcgcccgtctcgcccaaaaagcgcgcgccgccggtatccatatgattgtcgccacccaacgtcccagtgtcgatgtcgttaccggcctgattaaagccaacattccgacgcgtatggcgtttaccgtgcaaagcaaaatcgacagccgtaccatcctcgaccaaatgggcgcggacgaactgctcaaatatggcgattcgctgttccttcagcccggcagtgccgaaccgacccgcctgcaaggcgcgtttgtttcagacgacgaagtacatcaagtcgtcaactacgtcaaatcgcaagccccagccgactatattgaaggtctgctcagcggcgaggccgcgctggaaactgccaatatcgttaatccgaatgcagacagcgacgaattgttcgatcaggcagtcgcctatgttttggaaagcaaaaaaacctccatttcgtctttgcagcggcagttgcgtatcggctataaccgcgcggcaaacctgatggaggcactggaaaatgcgggtgtcgtttctcccgccgacctcaacggcagccgtaaaattttggcgcacaaggaccatttgtag

SEQ ID NO: 37988 - DNA, 1647 bp, Neisseria meningitidis
atgaaacaatccgcccgaataaaaaatatggatcagacattaaaaaatacattgggcatttgcgcgcttttagccttttgttttggcgcggccatcgcatcaggttatcacttggaatatgaatacggctaccgttattctgccgtgggtgctttggcttcggttgtatttttattattattggcacgcggtttcccgcgcgtttcttcagttgttttactgatttacgtcggcacaaccgccctatatttgccggtcggctggttgtatggtgcgccgtcttatcagatagtcggttcgatattggaaagcaatcctgccgaggcgcgtgaatttgtcggcaatcttcccgggtcgctttattttgtgcaggcattatttttcatttttggcttgacagtttggaaatattgtgtatcggggggggtatttgctgacgtaaaaaactataaacgccgcagcaaaatatggctgactatattattgactttgattttgtcctgcgcggtgatggataaaatcgccagcgataaagatttgcgagaacctgatgccggcctgttgttgaatattttcgacctgtattacgatttggcttccgcgccggcacaatatgccgccaagcgcgcccacattttggaagcagcaaaaaaagcgtcaacatggcatatccgtcatgttgcgcccaagtataaaaattatgttgtggttatcggtgagagcgcgcgttcggattatatgaatgtttacggtttcccattgcccgatacgccttttttgagtcagaccaaagggctgttgataaacggttaccaatcgaccgcccacgcgacgaatctttcgctgccgcagactttggggctgccgggagaaccgaacaataacatcgtcagcttggcgaagcaggcgggttttcggacggcgtggctgtctaatcaaggaatgttggggcattttgccaacgaaatttccacctatgccctacgcagcgattatccgtggtttacccaaaggggtgattatggcaaaagcgcggggttgagcgaccgccttttgttgccggcgttcaaacgggttttgataggaaatgcaggcacgaagcctcggctgattgtgatgcacctgatgggttcgcacagtgatttttgcacacgtttggataaggatgcgcggcggtttcagtatcaaactgaaaaaatatcctgctatgtttccaccatcgcgcaaaccgataaatttttagaagatacagttaagatattgaatgaaaataaagaaagctggtctttggtttacttttccgaccacggtttgatgcatgtcggtaaaggcggcgagcgaacgttgacacatggtgcgtggaagcgtcaaagctacggcgtgccgctggttaaaatttcgtccgatgacacgcggcgcgaaatgattaaagtgaggcgcagcgcgtttaattttttacgcggattcggcagttggacgggtatcgaaaccgacgagttgcccgatgacggctatgatttttgggggaatgttcccgatgtgcagggcgaaggcaataaccttgcctttatcgacggactgcccgacgaccccgcgccgtggtatgcgggaaaaggcaaatcgactaaaaatacgtctaaaaaatga

SEQ ID NO: 37989 - DNA, 774 bp, Neisseria meningitidis
atgaatagacccaagcaacccttcttccgtcccgaagtcgccgttgcccgccaaaccagcctgacgggtaaagtgattctgacacgaccgttgtcattttccctatggacgacatttgcatcgatatctgcgttattgattatcctgtttttgatatttggtaactatacgcgaaagacaacagtggagggacaaattttacctgcatcgggcgtaatcagggtgtatgcaccggatacggggacaattacagcgaaattcgtggaagatggagaaaaggttaaggctggcgacaagctatttgcgctttcgacctcacgtttcggcgcaggaggtagcgtgcagcagcagttgaaaacggaggcagttttgaagaaaacgttggcagaacaggaactgggtcgtctgaagctgatacacgagaatgaaacgcgcagccttaaagcaactgtcgaacgtttggaaaaccagaaactccatattttgcaacagatagacggtcagaaaaggcgcattagacttgcggaatcagtggcaaaaacggcactgggcagacaggaattgtcgggattgggcatggtatcctccgatttggcgaagagcaacgaacctgtttatctcgtgaaaataaaacccgacaaaccaaccatcactgcatacggtgaggaaaaaccgctgcaaatcggcatgacgttggaagcagacatcctacacgagaaacggcgattgtacgaatgggtattggagctgatttatagtatgtcgggcaaactg

SEQ ID NO: 37990 - DNA, 482 bp, Neisseria meningitidis
atgggaatagaaggcgttttgaaaaaaggtttcatcaccaccagcgcggatacggtgttgaactatatgcgtaccggttcgttgtggccggttactttcggcttggcctgctgcgccgtggaaatgatgcacgcgggtatggcgcgttatgaccttgaccgtttcggcatcattttccgtccgtccccacgtcaggccgacctgatgattgtgcggggtacgctgaccaacaaaatggcacccgccctgcgccgcgtgtatgaccagctcgccgagccgcgctgggtattgtctatgggctcgtgtgccaacggcggcggctattatcactattcttattccgttgtgcgcggtgccgaccgcgtcgtgcggtagacgtttatgtgccgggttgtccgccgactgcggaagccctgatttacggcctgattcagctccaacaaaaaatcaagcgcacttccaccatcgcgcgtgacgagtaa

SEQ ID NO: 37991 - DNA, 669 bp, Neisseria meningitidis
atgacgacccatctgtccaatgttgcaccggacctgcaaaactatttgaacgccatcggcgaacctgaacatcccgttttgacgcggctgcgtgagaagaccgggcatcaccgtatgggcaaaatggcgattgcgcgcgaacaggcggcggttttggtttggctggcaaagctgatccgtgcggaaaaatatctggaaatcggcgtatttaccggatacagcagcaccgcgcttgcattggcgttgcccgaacacgggcggattaccgcctgcgacatcaatgtaagctttaccgatacggcgcgtcaggtttggaacgaggccggtgtggcacataaaatcagcctgcacctgcaacccgcattgctgacattggatgatttgattgcacagggtgaagccggaagctacgatttggcactgatagacgcagacaaaccgcccacgccgcgatatttcgagcgttgcctcaaactcgtccgtcaaggcggcatcatcgccatcgacaatattttgctgaacggaagggtgatgcgcgaagcggcttccgatgcgccgcccagcgtcggcatcctcaaagatttcaatcaaaacctgccgaacgatacgcggattgtccccatcaccctgcccgtcggcgacggcttgaccctgcttctgaaaaaataa

SEQ ID NO: 37992 - DNA, 543 bp, Neisseria meningitidis
gtgcagagttggaaagaaaggcgcgatttcaatattgtaaagcaggatttggatttttcctgcggggcggcttcggtggcgacggttttgaacaattttcacgggcaaaagctgacggaagaggacgtgttgaaaaagctggataaggagcagatgcgcgcgtcgtttgaggatatgcggcgcatcatgcctgatttgggttttgaggcgaaaggctatgccctgtctttcgagcagcttgcacagttgcaaatccccgtcatcgtgtatctgaaataccgcaaggatgatcatttctcggtattgcgcggtatagacggcaatacggttttgcttgccgacccgtcgctgggtcatgtttcgatgagcagggcgcagtttttggatgcttggcaaacccgtgagggaaatttggcaggtaagattttggcggttgtgccgaaagggagggatgccggcggggataaggcgtttttcacacgcagtccgaaacgtcagacggagtttgcggtcggacaggtaaaatggtggcgtgcttattga

SEQ ID NO: 37993 - DNA, 2190 bp, Neisseria meningitidis
atgatctaccaccgcatcgccgtaaacgtgccgctttcagacggccttttgacttattcccattccgatccgcttcctccgggaacgcgggtgcttgtgcctttccgcaataaaaccgtggtcgggatggtgtgggaaacggatattgcgccggatatggatacggcgcggattttgagtattcagacgacctttttagacgagccgccgttgcctgaaagctggcgtgatttgctctcgtttacgtcgcgttattaccactatccgacggggcaggcggtgtttgccgcgctgccgcagggtttgaaggaaacgcgcgcggtggaaatgccgcagccgccgttgttttacgcgctgaacgaagcgggcagggcgcaaacgccgccgctggcgcggttcaacaaaaaagcggctttgtgggacgcactgctgtcgggcgggatgacgatggcggcgttgaagcaggtaaacgcgcaggcggcgaaattgattgaggattgggctgaacaaggctggattgaaacgacggaagcggcgaagcccgttttaaggtcgtgtaatgggcaggcttcgcactctgaatttgtattaaatgctgaccagcagaaggcttccgatgccattcagacggcattgggacgcttccagccgtttctgctgtacggcatcaccggcagcggcaagaccgaggtgtattttgatgcgatggcgaaagtgttggctcaggggcggcaggtgttgtttctgttgcccgaaatcaacctcacgccgcagcttttgaagcgggtggaaaaccgttttgccgacgtgccgaccgccgtgttgcacagtcagatggcggcaggcaagcgcacgcaggattatctgcgcgcgatgttggggcaggcgaagctggtgatcggcacgcggttggcggtgttcacgccgatggatgatgtcgggctgattgtggtcgatgaggaacacgacggctcgttcaaacaggacaacgaattgcgctaccacgcccgcgatttggcggtgtggcgggcgaagcagggcggctgcccgatcatattgggcagtgccacccccagcttggagagctggcacaaggcgcaaagcggcgcgtaccgcctgctgcaactgaccgaacgcgcccataccgccgcgcaactgccgcaagtggacatcctcaacgtaggccgtctgaaacttgacaacggcttctcgccgcaagccttgcagcttttgaaacagaactttgaagcaggtggcatgtcgttggtgtacctcaaccgtcgcggcttcgcgcccgcgctgttttgcggcgactgcggttataccttcggctgcccgaactgctccgccaaaatggtgctgcaccaacgcgtccgccaactgcgctgccaccactgcgaccaccgcgaacccataccgttcaaatgccccgactgcggcaatcaagacctgaccgccgtcggacacggcacgcagcgcgtcgaagaaaccctgcgcgctttcctgcccaaggccgccgtcgtccgcgtggacagggacagcaccgcgcacaaaaacgactgggcggatttgtaccgccgcatcgccgacaacgaaatcgatattctggtcggcacgcagatgctcgccaaaggtcatgatttcgcgcggctcaacctcgttatcgtattgaacgccgacggcagcctgtacagcgcggatttccgcgcgccggaaaggctgtttgccgagctgatgcaggtgtccggcagggcggggcgcgccgacaagcccggcaaggtgctgatacagacccaactgcccgaacatcccgtcttcgccgccgtcaaagcgcaggactacgtcgtgtttgccgaaaacgaattgaatgagcggcaaatgttcgccatgccgcccttcggttttcagacggccgtccgcgcggacgcgccgcgtgttgccgatgcgatggaatttctcaacgccgccaaagaaaccctcgccccgcttttgcccgaaagcgtttcacagttcggcgccgccccgatgctgatggtgcgcctcgccgaacgcgaacgcgcgcaaatcttcctcgaatcaacatcccgacaggatttgcaccgcgccgtgagtttgtgggtgcaggtgttgcagcaaaacagggacggcaaaatccgatggtcggtggatgtcgatccgcatgaggcttga

SEQ ID NO: 37994 - DNA, 1410 bp, Neisseria meningitidis
atgaatttccccaaaacagcggcctccctgctgctgcttctcgcctccctcgccgcacacgcgctcgatacgggtcgcattccgcaaaacgaaatcgccgtatatgtccaagagcttgacagcggaaaagtcatcattgaccaccgctcggatgtccccgtcaaccccgcctccacaatgaaactcgttaccgcgtttgccgccttcaaaaccttcggcagcaattaccgctgggcgaccgagtttaaaagcaacggtacggtaaacgacggcacgcttgacggaaacctgtattgggcgggcagcggcgaccccgttttcaatcaggaaaacctgcttgccgtccaacgccagttgcgcgaacaaggcatacgcaatatcacgggacacctgatgctcgaccacagcctgtggggcgaagtcggcagccccgacgatttcgaagccgacagcggttcgccgtttatgacgccccccaatccaactatgctgtctgccggtatggttatggtgcgcgccgaacgcaatgccgccgacagtaccgacatcctcaccgatccgcctttgccgcatattttcgcccaaaacaacttgaaaattaccgcctcccaagctgcctgcccttcgatcaaaaaactgatgcgtgcatctttttcggacaatacgctgaaattgcgcggcaatattcccgagagctgtttgggcaagcctgtcggtgtccggatgttcgcgcttgacgaactgatccggcaaagttttaccaaccactggctgctcggcggcggacggatttcagacggcatcggcatatccgacacgccggaaggcgcgcagacgcttgccgttgcacactcaaagccgatgaaggaaattttgacggacatgaacaagcgttcggacaatctaattgcgcgttccgtcttcctcaaactcggcggcaacggcaaactgcccgccgtttccgaacaggcagcgtctgccgtccggcgtgaacttgccgtgtcgggcatcgatgttgcggatttggttttggaaaacggttcaggtctgtctagaaaagaaagggtaacggcgagaatgatggcgcaaatgttggaaacggcttatttcagcccgtttgcacaagatttcatcgatacgctgcccatcgccggcacagacgggactttacgcaaccgcttcaaacaaagcggcgggctgttgcgcttaaaaaccggcacgctcaacaatgtccgcgcccttgcaggttattggctgggcgacaaaccgatggcggtggtcgtcatcatcaacagcggccgcgccgtttccctgctgcccgacttggacaacttcgttgccaacaacatcatctccggcggcgatggctggctggatgcgaaactgatgtgcaaagaacgccgagcctga

SEQ ID NO: 37995 - DNA, 1032 bp, Neisseria meningitidis
atgagcctgccagcaatggatgccggtatttatctcgaagaaaccgccccgcgcgccctgattgaacacaacaatattttggataattcggtcggcgtatatctgcatggttctgccgatgcgatggtgcgcgagaataaaattgtcggcgacgcgactttgcgcgtgaacgagcgcggcaacggcgttaccgtttggaacgcacccggcgcgcaggtcgtcggcaacgacatttccaaagggcgggacggcattttttccaataccagcacgcacaacacctacaaaaacaaccgcttcagcgatttgcgtttcgccgtccactatatgtacaccaacgacagcgaaatcagcggcaatatttccgtgggcaacaatatgggctatgtgctgatgttttccgaacggctcaaagtattcgacaatattgccgtcggtagtcgcgactagggcatcatgctcaactatgtcaactattccgatattcacgacaatattatcaacaaagcgggcaagtgcgtttttgcctacaatgccaactacgataaactgtccgccaatcattttgaaaactgccaaatcggcatacactttaccgccgccatcgaaggcacgtctctgcacgacaattcctttatcaacaacgaaagccaggtcaaatacgtcagcacgcgctttctcgactggagcgagggcggacacggcaactattggagcgacaacagtgcgttcgatttgaacggcgacggcttcggcgacagcgcgtaccggcccaacggcatcatcgaccaaatcatctggcgcgcgcccgtattgcgcctcttgatgaacagtctcgcaatcagcatcgtcaaatgggcgcaggcgcagtttcccgccgttctgcccggcggcgtggtggacagcaaaccgctgatgaagccttatgtccccaaaattcaaacccgctatcaggcaatgaaggacgagttgctcaaagaagccgaaacacggcagtcggaatggggcagggcggaaaacggttctttgaac

SEQ ID NO: 37996 - DNA, 342 bp, Neisseria meningitidis
atgctgccgaataaagttttgggtaaatatgattggaatgtggacggaaaaacaggaataggcgcagcatgggttgtcgctgcgtttatcctgcccatattggtgtgggcgatatttatgttgtcgcggatgcaaggctggcttgcgccgaccaaggcaaacccgacatgggcgttggtgtggctgctgatctgcatgccctgcctgctgattgcgtccaaatgtttgggttggaaaggctggcggcgggtggtgaatatttttgcctgcctgaccgtctgcgccatattgagcgtacccgcttcgctgctcatcgcctttaccctccgggacctgctgaaa

SEQ ID NO: 37997 - DNA, 1541 bp, Neisseria meningitidis
atgatgaccgaaatacaacaacgcgcccaactgcaccgccaaatttggaaaattgccgacgaagtacgcggcgcggtggacggctgggactttaaacaatacgttctcggcacacttttctaccgctttatcagcgaaaactttaccgactatatgcaggcaggcgacagcagtattgattacgccgctatgccggacagcatcatcacgcccgaaatcaaagacgatgccgtcaaagtcaaaggctatttcatctaccccggccagctttttgcaatattgccgccgaagcccatcaaaacgaagagctcaacaccaagctgaaagaaatttttaccgcgattgaaagctccgcctccggctatccgtccgaacaagacattaaaggcctgtttgacgacttcgacaccaccagcagccggctcggcagcaccgttgccgacaagaacaaacgccttgccgccgtcctaaaaggcgtggcggaactcgatttcggcagttttgaagaccaccacatcgaccttttcggcgatgcctacgaatacctgatttccaactacgctgccaacgcaggcaaatccggcggcgaatttttcaccccgcaaagcgtatccaagctgattgcgcggctggcggtgcacgggcaggagaaagtaaacaaaatctacgacccagcttgcggctcgggcagcctgctcttgcaggcgaaaaaacagtttgacgagcacatcatcgaagaaggcttcttcgggcaggaaatcaaccacaccacctacaacctcgcccgcatgaatatgtttctgcacaacgtcaattacaacaaattccacatcgaattgggcgacacactgaccaatcccaaactcaaagacagcaaaccctttgatgccgtcgtttccaatccgccctattccatcaactggataggcagcggcgaccccaccttaatcaacgacgaccgctttgcccctgcaggcgtactcgccccgaaatccaaagccgattttgccttcattctgcacgcactgaactacctttctggcagaggccgcgccgccatcgtctcattccccggcattttctatcgcggcggcgcagagcagaaaatccgccaatatctggtggagggcaactacgtggaaaccgtcatcgcccttgcgcccaatctcttttacggcaccggcatcgccgtcaatatactggttttgtccaaacacaaagacaataccgacatccaattcatcgacgcaggcggcttctttaaaaaagaaaccaacaacaacgtcttaaccgaagaacacattgccgaaatcgtcaaactcttcgccgataaagccgatgtgccgcatatcgcccaaaacgccgcccagcaaaccgtcaaagacaacggctacaacctcgccgtcagcagctatgttgaacccgaagacacccgcgaaattatcgacatcaaacagcttaacgccgaaatcagcgaaaccgttgccaaaatcgaacggctgcggcgtgaaattgacgaagtgagtgcagagattgaagca

SEQ ID NO: 37998 - DNA, 1929 bp, Neisseria meningitidis
atgaagacagacattcaaaccgaattaacccaagccctactaccacacgaaaaagtatgggcgaacgaagaaaaaaccattttagccaaaaacatcctgttggatttggtggaaaaaaccgacccgtccattatcgagttgttattggggaatgatgagttaaaacgccatttctttgtggaagtgaatggtgtgctggtgtttaaattgcaggatttccgttttttcttggacaaacacagcgtcaataattcctacacaaaatacgccaaccgcattggtttgacggacggcaaccgctttttgaaagacaattcggatattgtgttggattttccgtttaaagattgtgtgttgaatggcggacaaagcaccgaagaaggcgaagagatttattttaaacgcaataatagtcagtcagtcagtcagtcagtcagtcagtcagtcagtcagtcagtcagtcagtcagtcagtcaattatacaccaaattaacccgaaagagacaagaaatcttttttaatcaaacgcttgcttttgatgaaatcgatcggctttttgacgcaaaagcattctcaaaattctctcgccacaccacagatggcaaacaagcggttggcgaaatcaaacgacattcagacggcacacccgccgaaaatctcattatcaaaggcaataatctgattgccctgcattcgcttgccaagcagtttaggggcaaaatcaagctgatttatattgacccgccgtataacacagaaaccgatagctttgcatataacgataaatttaatcgctctacttggctgacatttatgaaaaacaggttggagattgctagagaattattggcagatgatggcgcaatttatataaacttagattaccacgaagtacattattgcaaagttttgatggacgagatttttggtgaatacaatttccagcgtgaaattatttggcgtattggttgggtatcaggctataaaactactgtctccaattatatccgtaatcatgacaccattttattttattcaaaagattataatcatctgaattttaacaaatattatattgataataagcattttaaggtattagtagatttagatagggcaacaaaaaatacatttacaaaattcggtattaataaagaaactgccgagaaaatcctgcaagaaattaattttagcaaccgtcccgaacgttatccgttagaagatgtttggaatgcgaatgaatatgatgatttgaatagtattgcaattgtcagctattcaggcgaaagcgtatcaaaaatgctgggattagaggaaattaaaggacaaaaatctgaaaaactgttaaaacggattttagaagcgcataccaagccaaacgatattgttttggattttttcggtggtagcggtacaacggcagccgttgcccataaaatgaatcgccaatatatctgtatcgagcaaatagacaaacaaactgacactattgtaaagcggttaaacaagattttagtaaacgaatcaagtgggatttccaaagccgtgaattggcaaggtggcggcgagtttgtttatgccgaacttgctccatttaacgaaaccgcaaaacaacaaattttggcttgcgaagattcagacggcatcaaaacactgtttgaaggtttatgcgaacgctatttcttgaaatacaacgtcagcataaatgaatttagccaaattattgaagagcctgaatttcaatctttgccattagacgaacaaaaacaaatggtgcttgaaatgttggatttaaatcaaatgtatgtttcattatccgaaatggatgacgaacaatttgcagattgcctgaacgatgatgataaagccttaagccgtgcattctatcaatcagtaaaaaatcaagcggagaaaaaagatggcgaataa

SEQ ID NO: 37999 - DNA, 912 bp, Neisseria meningitidis
atggacaccctgttcagcctcaaggttttccgccaagtcgtccaaagcggcggcttcacccgcgccgccgacgcgctcggcatctccaccgcaatggcaagcaaacacgtcagccacttggaaaacaccgtccaagccaaactcctgcaccgcaacagccgcaacctcagcctgaccgaagccggggaagaatactaccggcaatgcagttacgcgctcgacacgctcgacgatgccgcgcaaaaagccgccggggggacggaaaaaccgcaggggctgctgcgcgtaacgatgccactgtggtttgccggcagccagatatgcaactggctggcggaataccgcgaacgttatcccgaagtgacattagaactgattttggacaaccgccacgtcgatttgattgccgaaggcgtggatttggcgttgcgcgtttcccaaaccctgtccccgtcgctgattgcgcgcccgctggcggaaatcgaatttgccctgctcgcctcgcccgatttcctgaggcgcaacggcgtaccggaaacgccggaagaagtggcggggctgcccgccgtcctgccgacctacaccaaccagcagaaactcgacctcacccgcaaatcggacggcaaaaaataccggcttgaactgacccccgtcatccgtaccgacaacacgctgatgatgcgcgaaatgattaaggcgggcgcgtgcatcggttatcagccgctttgggcggcggaacacgatttgcgctgcggctcgctggtgaggctgctgcccgaatataccgtcccgaccgaccgcctgaatgccgtttatgcggacagggcgttcttaagcgcgaaagtccgcagcttcatcgattttctgaacgaaaaaatcgccagcaggaaaggctgccgaaatgccgtctga

SEQ ID NO: 38000 - DNA, 702 bp, Neisseria meningitidis
atgacggaacctgcggccgaaggcggtaaagctgccaaggcgttaaaaaaatatctgattacgggcattttggtctggctgccgattgcggtaacggtttgggtggtttcctatatcgtttccgcgtccgaccagcttgtcaacctgctgccgaagcaatggcggccgcaatatgttttggggtttaatatcccggggctgggcgttatcgttgccattgccgtattgtttgtaaccggattgtttgccgcaaacgtattgggccggcagattcttgccgcgtgggacagcttgttggggcggattccggttgtgaagtccatctattcgagtgtgaaaaaagtatccgaatcgttgctgtccgacagcagccgttcgtttaaaacaccagtactcgtgccgtttccccaatcgggtatttggacaatcgcattcgtgtccggtcaggtgtcgaatgcggttaaggtcgcattgccgcaggatggcgattatctttccgtgtatgtcccgaccacgcccaacccgaccggcggttactatattatggtaaagaaaagcgatgtgcgcgaactcgatatgagcgtggacgaagcgttgaaatatgtgatttcgctgggtatggtcatccctgacgacctgcccgtcaaaacattggcaggacctatgccgtctgaaaaggcggatttgcccgaacaacaataa

SEQ ID NO: 38001 - DNA, 792 bp, Neisseria meningitidis
atgaatttatttttcgatactgaattggggaagcaacaaaataaagcaacccacaaaatccgtgtaatgagcgaggcttggttggaaaaaaacggctactgcccctgttgcggaagcaagccgatgaagagatttgccaataacaaacctgttgcagacctcttttgcccaaattgccacgagcaatatgaattaaagagtaaaaatcaaaaaaccataggcaacatcgtgcctgacggtgcatatcacaccatgttggagcgcatccggtcagataccaaccccaactttttctttcttgcatataaaaaagcggattactccatacggcaattggtgcttgtacccaaacatttcatcacgccggatatgattattcccagaaataaaggcattaaaaaccggccgcaccacattatgtgttccatcaatctcgcccctttgcctgaaagcggaaaaatattcttaatagacgattcccgcattatcgaacccgaaaccgttctgaaaaaatggcaatctaatctgtttttacgcaaccaaaatgcggagcgcaaaggttggcttttggctgttatgaaatgtatcgaccaactccccgaagaattcacattgtcgcaaatgtatgaatttgaaaacaaactatccatccaatttccccaaaacaaccatatcaaagacaaaatccgccaacagttgcaaattttgcgcgaccaaaatacgatcgaattcattggtcgcggactttacaaaaaaatcgacaaattgcgtccgacttccaaggcggtttga

SEQ ID NO: 38002 - DNA, 489 bp, Neisseria meningitidis
atgctcaaaataaccctaattgcggcgtgtgcggaaaacctgtgcatcggggcgggcaatgctatgccttggcacatccccgaagatttcgcatttttcaaagcctataccttgggcaaacccgtcattatggggcggaaaacgtgggaatccctgcccgtcaaacccctgcccggacggaggaacatcgtcatcagccggcaggcggattattgcgcggcaggcgcggaaacggcggcaagtttggaggcggcattggcattgtgcgcaggcgcggaagaagctgtcattatgggcggcgcgcagatatacggacaagcgatgccattggcgaccgatttgcggataaccgaagtggatttgtctgtggaaggagatgcatttttccccgaaatagaccggacgcattggaaagaggcagggcggacggaacgccgcgtcagcagcaaaggcacgcgctatgcttttgtgcattatttgagatattga

SEQ ID NO: 38003 - DNA, 474 bp, Neisseria meningitidis
atgtcccgcaataccgaagagctgcaaggcatctcgcttttgggtaatcagaaaacccaatatccgatcggctacgcgcctgaaattctcgaagcattcgacaacaaacatcccgacaacgactatttcgtcaaattcgtctgcccagagttcaccagcctctgccccatgaccgggcagcccgacttcgccaccatcgtcatccgctacattccgcacatcaaaatggtggaaagcaaatccctgaaactctacctcttcagcttccgcaaccacggcgattttcatgaagactgtgtcaacatcatcatgaaagacctcattgccctgatggatccgaaatacatcgaagtattcggcgagttcacaccgcgcggcggcatcgccattcatccgtttgccaactacggcaaagcaggcaccgagtttgaagcattggcgcgtaaacgcctgtttgagcacgacgcacaataa

SEQ ID NO: 38004 - DNA, 309 bp, Neisseria meningitidis
atgtacgcggtcgtaaaaaccggcggcaaacagtataaagtttccgtcggcgaaaaattgaaagtagaacagataccagccgaactcgacagccaaatcgaactgaccgaagttttgatgattgctgacggcgaatctgtaaaagttggcgcaccctttatcgaaggtgcaaaagtaacggctaaagtagtggcacacggtcgtggcgaaaaagtccgcatcttcaaaatgcgccgccgcaaacactaccaaaaacgccaaggccaccgccaaaatttcacccaaatcgaaatcgtggcaatcgcctaa

SEQ ID NO: 38005 - DNA, 999 bp, Neisseria meningitidis
atgagcagacccgtacccgccgtattcggcagcgtttttcacagtcaaatgcccgtcctcgcctaccgcgaaggcaaatggcagccgaccgaatggcaatcttcccaagacctctccctcgtaccgggcgcgcacgccctgcactacggcagcgaatgtttcgagggactgaaagccttccgtcaggcagacggtaaaatcgtactgttccgtccgactgccaatatcgcgcgtatgcggcaaagtgcggacattttgcacctgccccgccccgaaacccaagcctatctcgatgctttggtcgaactggtcaaacgtgccgccgacgaaattcccgatgcgcctgccgccctgtacctgcgcccgaccttaatcggtaccgatcccgttatcggcaaggccggttctccttccgaaaccgccctgctgtatattttggcttcccccgtcggcgactatttcaaagtcggctcgcccgtcaaaattttagtggaaaccgaacacatccgctgcgccccgcatatgggccgcgtcaaatgcggcggcaactacgcttccgccatgcactgggtgctgaaggcgaaagccgaatacggcgcaaaccaagtcctcttctgcccgaacggcgacgtgcaggaaaccggcgcgtccaactttatcctgattaacggcgatgaaatcattaccaaaccgctgaccgacgagtttttgcacggcgttacccgcgattccgtgctgacggttgccaaagatttgggctataccgtcagcgaacgcaatttcacggttgccgaactgaaagctgcggtggaaaacggtgcggaggcgattttgaccggtacggccgcggtcatttctccggtaacttctttcgtgattgacggcaaagaaatcgaagtgaaaagccaagaacgcggctacgccatccgtaaggcgattaccgacatccagtatggtttggcggaagacaaatacggctggctggttgaagtgtgctga

SEQ ID NO: 38006 - DNA, 1170 bp, Neisseria meningitidis
atggacaacgaattgtggattatcctgctgccgattatccttttgcccgtcttcttcgcgatgggctggtttgccgcccgcgtggatatgaaaaccgtattgaagcaggcaaaaagcatcccttcgggattttataaaagcttggacgctttggtcgaccgcaacagcgggcgcgcggcaagggagttggcggaagtcgtcgacggccggccgcaatcgtatgatttgaacctcaccctcggcaaactttaccgccagcgtggcgaaaacgacaaagccatcaacatacaccggacaatgctcgattctcccgatacggtcggcgaaaagcgcgcgcgcgtcctgtttgaattggcgcaaaactaccaaagtgcggggttggtcgatcgtgccgaacagatttttttggggctgcaagacggtaaaatggcgcgtgaagccagacagcacctgctcaatatctaccaacaggacagggattgggaaaaagcggttgaaaccgcccggctgctcagccatgacgatcagacctatcagtttgaaatcgcccagttttattgcgaacttgcccaagccgcgctgttcaagtccaatttcgatgtcgcgcgtttcaatgtcggcaaggcactcgaagccaacaaaaaatgcacccgcgccaacatgattttgggcgacatcgaacaccgacaaggcaatttccctgccgccgtcgaagcctatgccgccatcgagcagcaaaaccatgcatacttgagcatggtcggcgagaagctttacgaagcctatgccgcgcagggaaaacctgaagaaggcttgaaccgtctgacaggatatatgcagacgtttcccgaacttgacctgatcaatgtcgtgtacgagaaatccctgctgcttaagtgcgagaaagaagccgcgcaaaccgccgtcgagcttgtccgccgcaagcccgacctcaacggcgtgtaccgcctgcttggtttgaaactcagcgatttggatccggcttggaaagccgatgccgatatgatgcgttcggttatcggacggcagctacagcgcagcgtgatgtaccggtgccgaaactgccacttcaaatcacaagtctttttctggcattgtcctgcctgcaacaaatggcagacgtttacgccaaacaaaatcgaagtttaa

SEQ ID NO: 38007 - DNA, 531 bp, Neisseria meningitidis
atgaaattcgtcagcgaccttttgtccgtcatcctgtttttcgccacctataccgttaccaaaaacatgattgccgcaacggcggttgccttggttgccggtgtggttcaggcggcttttctgtattggaaatataaaaagctggatacgatgcagtgggtcggattggtgctgattgtggtattcggcggcgcaaccattgttttgggcgacagccgcttcattatgtggaagccgagcgttttgttttggctgggcgcgctgttcctgtggggcagccacctcgccggtaaaaacggcttgaaggcgagtatcggcagggagattcagcttccggatgccgtatgggcgaaattgacgtatatgtgggtcggtttcctgatttttatgggtatcgccaactggtttgtgtttacccggttcgagtcgcaatgggtcaactataaaatgttcggctcgactgcactgatgcttgttttctttattattcagggtatttatctgagtacctgtctgaaaaaggaggattga

SEQ ID NO: 38008 - DNA, 492 bp, Neisseria meningitidis
atgcgtgcggtcatacagaaaacggtaggtgcaaaggtggatgtcgtgtccgaagccggcacggaaacctgtggcaaaatcgacggcgggtttgtcgtgttactcggcgtaacgcatagcgacacagaaaaagatgcacgctatatcgccgacaaaatcgcccatttgcgcgtgtttgaagacgaagcgggcaagctgaacctgtctttgaaagatgtcggcggcgcggtgctgctggtgtcgcagtttacgctttatgccgacgcggcaagcgggcggcggccttcgttttcgcaagccgcacctgcagaacaggcgcagcagctttacctgcgaacggcggaactgttgcgcgggcacgggattcatgtcgaaacagggcgtttccgcacgcatatgcaggtgtcgctctgtaacgacgggccggtaaccatactgctggactctttcatgacgcggatttccccaaaaatgaaggttgttccggattga

SEQ ID NO: 38009 - DNA, 537 bp, Neisseria meningitidis
atgcaggcaatttctcctgaattacaggcgcgcgccgccaaaatcaaactgctgatcctggatgtggacggtgttttgaccgacgggcgcatctttatccgcgataacggcgaagaaatcaaatcgtttcacacactggacggacacggtctgaaaatgcttcaggcaagcggcgtgcagactgcgattatcacaggtcgggacgcgccctccgtcggcatccgcgtcaaacagttgggcataaattactacttcaaaggcatttcggacaaacgcgccgcgtatgaagagctgcgcgctcaggtcggcgtggaagaagccgagtgtgcctttgtcggcgacgacgtggtcgatttgccggtgatggtgcgttgcggattgccggttgccgttcccgacgcgcattggtttacgctgcaacacgccgcctatattgccaaacgccccggcggtgcgggcgcggtgcgcgaagtgtgcgacctgattatgcaggcgcaagggactttgggcgcggctttgaacgagtacatcaaatga

SEQ ID NO: 38010 - DNA, 735 bp, Neisseria meningitidis
atggcttcgcataatactacacatcagatgaaaacgctgtgttcttcctgttctttgcgggaactctgcctgcctgtcgggctgctgcccaacgagctcagccaactcgatgccgtcatccgtcaaagccgccgcctgaaaaagggcgaatacctgttctgtgtcggcgaagcctttacctcgctctttgccatccgttcgggcttcttcaaaacaaccgtcgccagtcaggacggccgcgatcaggtaacgggtttctttatgtcgggcgaactcatcggcatggacggcatctgttcccatgtgcacagttgcgacgcggtcgccttggaagacagcgaagtgtgcgaactgccgtttacccacatcgaagaactggggcagaatatccccagcctgcgtacccactttttccgcatgatgagtcgtgaaatcgtgcgcgaccaaggtgttatgctgctgttgggcaatatgcgcgccgaagagcggattgccgcctttctgttgaacctttcccaacgcctttattcccgaggttttgctgccaacgacttcatcttaagaatgtcccgcgaagaaatcggcagttatctcgggctgaaacttgaaaccgtcagccgcacattatctaaatttcatcaggaaggattgatttccgtcgaacacaaacacatcaagatcctcaatctgcaggtgttgaagaagatggtatccggttgttcgcacgccatttga

SEQ ID NO: 38011 - DNA, 1035 bp, Neisseria meningitidis
atgccgaattgtttcaaatttcataccgttatcgaacggcattggcaaaaaccttatccggttttgtcttttctgcttaagccgctctccgggctgtttgccaaaattgcggcaaaacggcggacggattttttatcgggaaaacggcaaagcgaaaagctgcccgtgcctgtggttgtggtcggcaatatccatgccggcggtacaggaaaaacgccgattgttgccgcgctggtgtcgggtttgcaggaaaagggcgtcaaggtcggcatcatcagccgaggctacgggcgcaagagcaaggcggttcatgtattgaatgccgagagccgagcggaagatgcgggcgatgagcctttgctgctgttccgcaaaaccggtgcgccgacggcggtgggcagcagccgtgcagaggcaggcagggcgttgctggcggcgcatcccgacatcggactgattgtggcggacgacggtttgcagcattacgccctgcggcgagatgtggaaatcgcggtgtttccggcggcggatacggggcgcacggatttggacttgctgcccaacggcagtttgcgcgaacctttgtcgcggctggattcggtggatacggtcgtcgtcagcggcggcaaggcggatgcgctgtttaggccgtctgaaaatatgtttcacagccgtatcgaagtgggacgaatttaccgtttgaacaatccgtccgaaatactggacacaggccgtctgaaaaatcaaaccgtcgtcgccgtggcaggtattgccaagccggcgcgttttttcgattcgttgcggaatatgggcattaccgtgaagcgaaccgtcgcgctgcccgaccacgccgacatttcggcggcagatttgcccgatgcggacgcggtcattattacggagaaagatgcggtcaaattttcagacggcatttgcaccgataatgtttgggtgttgcccgtttgtgcgataatcgaacctgatttggcggcgtttgtgttggagcggttggaagatgtaccgaaggccgtctga

SEQ ID NO: 38012 - DNA, 978 bp, Neisseria meningitidis
atgcaagaaaacccgaccgtgtggctgttcgacctcgacaacacgctgcacaatgccgatgccggcatcttccacctcatcaaccgcgctatgacacgctatatggcacaccgcctcaaactctccgaatccgccgcgtccgacctgcgtcaggaatattggcaccgctacggcgcaacgcttgccggactgcaaatccaccatcccgaaatcgacatcgccgattttttgcgcgaaagccatccgatcaatgcaatcctgactaggctgcacggcatgcctgaaacacaaaacaccctgagccgcctaaaagggcgcaaggcagttttttccaacggcccgtcgttttacgtccgcgccgttgtcggcgcactcggtttggaaaaccgtttcgacgcactgttcggcacggatgatttcggactgctgtacaaacccaatccgcaagcgtatctcaatgtctgccgccttttggacgtaccgcccgaatgctgcattatggtggacgacagcgcggacaacctgcatcaggcaaaagcattgggcatgaaaaccgtctggttcggcgcaaaatcccacgcgctgccctttatcgatgcttccgtaagcgatatggcgcaactggctcggtatgcagaaactttgtcagaacaccgccaaaatcattacaatactccacaacccccgaaaatacgaaagaatgttatgcgtaaaaccttccttatcctgatgactgccgccgcccttttgtcgggctgcgcgtgggaaacttatcaagacggcaacggcaagaccgccgtccgtcaaaaatatcccgccggcacgcccgtttattaccaagacggcagctactcgaaaaatatgaactacaaccaataccgtcccgaacgccatgccgtgctgcccgaccaaaccgacgattccgaacaaggcgtacgcggacagaactggcaaaagcccaaatttcaaaaccgataa

SEQ ID NO: 38013 - DNA, 348 bp, Neisseria meningitidis
atggctttgcgcactcactttgtcatttccaatgttccaagtacacctaatctgctaagaggaagacagcttgaaggaaaacttattttagaagttcctgctcaggtcaatccaattccacaatctgtattaagggcggcacaagaagaaaatgttatcattagagatacaacaggaaggatttacaataggtggtggtttagtattaggtggttgtgcaggtgcacatcttgcaagaaaagaatcattgatactaacagggaaaacaggggcaggtgcgtcagcaattgcaaatgcaagcattggatatcaatggactgtcaatttgtcaaagccaaaagaaggagc

SEQ ID NO: 38014 - DNA, 186 bp, Neisseria meningitidis
atgtatcactaccaatccgaagccacacaattcctcaaccgcctgattgaagaaaaacctgagttggaacagcagcgtttggaaaaccgggggcttttgtgggatgtcgaactcaatcccgaagaacaggaaaacttcgaggcggcaaaagtagcgaaaaaaccttatacctattaccaagactga

SEQ ID NO: 38015 - DNA, 1497 bp, Neisseria meningitidis
atgtcgcttgccttggtttacagccgcgccttgagcggtatgaatgcgccgttggtcgaagtggaagcccaccttgccaacggcctgccacatttcaacatcgtcgggctgcccgatacggaagtcaaagaaagtcgcgaccgcgtccgtgccgccattattcaaagcggttttgaattccccgccaaaaaaatcaccgtcaacctcgcccccgccgacctgcccaaagagtcggggcgtttcgatttgccgattgcaatcggcatccttgctgcatcggggcaggttgcgcccgaaaaactggcggaatacgagtttgcgggggaattggcactgtcggggctgttgcgccccgtgcgcggcgcgttggcgatggcgtggcagggtatgcaggcaaaacgtgcatttgttttgcctgaagaaaacgcaggacaagccgccgtgatgcgcggcattaccgtttacggcgcgcgctctttgggcgaagtcgccgcccatttgaacggtatcgaacctttggcgcaaaccgaatgccaagttcctcagatgccgtttgaacatggcggacaacctgatttgtgcgatgtgaaaggtcagcacaccgcgcgccttgctttggaaatcgctgccgcaggcggacacagcctcttgatgatgggtccgccgggaacgggcaagtctatgctctcccaacggctgcccggcatcctgccgccgctgaccgaagacgaattggtagaagtttgggcattgcgttcgctcctgcccaaccaccaacaacaactcgacagcaaccgtcctttccgcagtccgcatcacagcgccagcgcggcggctatggtcggcggcggttcggatccgcgtccgggcgagatttcattggcgcaccacggcgtattgtttttggacgagctgcccgagttcgaccgcaaagttttggaagttttgcgcgaaccgttggaaaacggcgaaatccacatttcccgcgcggcgcgccaagccgtctatcctgccaaattccaacttgttgccgccatgaacccctgcccgtgcggttatctcgggcatcccgtcaaaccctgccgctgcacgcccgaaagcgtcgcgcgttaccgcagcaagatttccgggccgctgctcgaccgcatcgatttgaccatcgaagtcccgagcctgtccgccgccgaactgatgcagcaggaagcaggggaaaggagcgcgtccgttttggaacgcgttatcgccgctagagacaaacaatacgcacggcaaggcaaagtgaatgccgccttgagtgtcagtgaactcgacacatccgcccgcatccaaaaagaagcgcaggaagcattgggcagcctgctggaaaaactctccctttccgcccgcagcttccaccgcattatgcgcgtggcgcgtacattggcggatttggcaggcgacgaagaagtcggcagaagccacgtcatgaaagccataggtttccgccgtgctttatag

SEQ ID NO: 38016 - DNA, 456 bp, Neisseria meningitidis
atgttcggcggcgcacacgaattaagcatcgacagtaaggggcggttggctgttcctgccaaattccgtgacattctgtcgcgcctctatacgcctgccgtagtggtaacgctcgagtcgaaacacaagctgttgatgtaccctgttgcggagtgggaaaaggttgcggcgcaacttttaaacttaaaagtggcggataaccctgttttgcggcggtttcaaaatcttttgctgcataacgcggaaattttggaatgggacagcgccggccgggtgctgcttcctgccggactgaggaaaagggtggatttcgaccgtgaagtcgttttggtcggtcgtgccaaccgtttggagctttggggtcgcgagcagtgggaggctgagatggttcaggctttggatgacgatcctgacgaacttgccttccagttgagtcagacggatttgcaattgtga

SEQ ID NO: 38017 - DNA, 1746 bp, Neisseria meningitidis
atgttgattaagagtgaatataagccccggatgctgcccaaagaagagcaggtcaaaaagccgatgaccagtaacggacggatcagcttcgtcctgatggcaatagcggtcttgtttgccggtctgattgcccgcggactgtatctgcagacggtaacgtataactttttgaaagaacagggcgacaaccggattgtgcggactcaaacattgccggctacacgcggtacggtttcggaccggaacggtgcggttttggcgttgagtgcgccgacggagtccctgtttgccgtgcctaaagagatgaaggaaatgccgtctgccgcacaattggaacgcctgtccgagcttgtcgatgttccgattgatgttttgaggaacaagctcgaacagaaaggcaagtcgtttatctggattaagcggcagctcgatcccaaggttgccgaagaggtcaaagccttgggtttggaaaactttgtatttgaaaaagaattaaaacgccattacccgatgggcaacctgtttgcacacgtcatcggatttaccgatattgacggcaaaggtcaggaaggtttggaactttcgcttgaagacagcctgcatggcgaagacggcgcggaagtcgttttgcgggaccggcagggcaatattgtggacagcttggactccccgcgcaataaagccccgaaaaacggcaaagacatcatcctttccctcgatcagaggattcagaccttggcctatgaagagttgaacaaggcggtcgaataccatcaggcaaaagccggaacggtggtggttttggatgcccgcacgggggaaatcctcgccttggccaatacgcccgcctacgatcccaacaggcccggccgggcagacagcgaacagcggcgcaaccgtgccgtaaccgatatgatcgaacccggttcggcaatcaaaccgtttgtgattgcgaaagcattggatgcgggcaaaaccgatttgaacgaacggctgaatacgcagccttataaaatcggaccgtctcccgtgcgcgatacccatgtttacccctctttggatgtgcgcggcatcatgcagaaatcgtccaacgtcggcacaagcaaactgtctgcgcgtttcggtgccgaagaaatgtatgacttctatcatgagttgggcatcggtgtgcgtatgcactcgggctttccgggcgaaactgcaggtttgttgagaaattggcgcaggtggcggcccatcgaacaggcgacgatgtctttcggttacggcctgcaattgagcctgctgcaattggcgcgcgcctataccgcactgacgcacgacggcgttttgctgccggtcagctttgaaaaacaggcggttgcgccgcaaggcaaacgcatattcaaagaatcgaccgcgcgcgaggtacgcaatctgatggtttccgtgaccgagccgggcggcaccggtacggcgggtgcggtggacggtttcgatgtcggcgcgaaaaccggcacggcgcgcaagttcgtcaacgggcgttatgccgacaacaaacacatcgctacctttatcggttttgcccccgccaaaaacccccgtgtgattgtggcggtaaccattgacgaaccgactgcccacggttattacggcggcgtagtggcagggccgcccttcaaaaaaattatgggcggcagcctgaacatcttgggcatttccccgaccaagccactgaccgccgcagccgtcaaaacaccgtcttaa

SEQ ID NO: 38018 - DNA, 513 bp, Neisseria meningitidis
atgggatcaaaattctttttcctgctgctgcgttttgccggttcggggttgccgccgtcacatatgcgcggcatcggcatcgtcggcagacgggtgcgcggttttttggcgcggcgggtttctccgcatatcggacgcggggtcaatatcgaacgcggggcgtatgtgtttccggatacggttttgggcgacggctcgggcatcggggcaaactgtgaaatctgccgtgggccggtggtcggcaaaaatgtgatgatggagccggaatgtctgttttattcaaataaccacaagtttgaccgttaaaaacgctttgagggctacacggaaatccgtccgattacgttggaggacgatgtctggccggggcgcagggtgattgtaatggcaggcgtaaccgtcggacgcggttcggtcgtgggcgcaggcgcggtggttacaaaagacattccgccctactctttggcggcaggcaatccggcagtggtgaaaaagaatctgccgaaaggttga

SEQ ID NO: 38019 - DNA, 873 bp, Neisseria meningitidis
atgcccattttgaaccatattgccctcatcggtgtagggctgatcggcggttcgttcgttctcgacctcaaaaggcagggactcgtccgcaccgttaccggtatcgacaccgaccgcgacaacctcgaacgtgcattggaacgcggcgtgattgaccgtgcgtccgttgccatcgacgcggacagcatcggcggtgcggacttggtactgattgccacgcccgtcgccaccgttcccgacattttgaccgcgctgcgccccgttttgccggaacacacttggatttccgatgtcggcagcaccaaatcttcggtcatcgaagccttccgccgctgtctgcccgaccgtctgcaccactgcatcgccgcccacccaattgccggttcggacagaagcggtgcgcaagccgcgcagttcgggctgttccgccacagaaaactcatcatcacgccacacggcggcgaacattcagacggcattgccttggtagaagaactgtggcacgcggtcggtgcggaaatttatacgatggacgcgcaacgccacgacgcggttttcgctgccgtctcccatatgccccacctgaccgccttcgcctatgtccaccagattctcgaccaccccgacggacaggaatatctgaaattcgccgccacgggctttcgggacttcacccgcatcgcctccggtcatcccgccgtgtgggcggacatctgccttgccaacaaagacagcctgctgcaactggttcaaggcttgggcaaacagttggacgttttggcaaacatcctgaccaccgacgaccgcgaagccctgtaccgctattttgaagaagccaaaaccacacgcgaccgctggctggacggcaactga

SEQ ID NO: 38020 - DNA, 855 bp, Neisseria meningitidis
atgttttaccaaatccttgccctgattatctggagcagctcgtttattgccgccaaatatgtctatggcggcatcgatcccgcattgatggtcggcgtgcgcctgctaattgccgcgctgcctgcactgcccgcctgccgccgtcatgtcggcaagattccgcgtgaggaatggaagccgttgctgattgtgtcgttcgtcaactatgtgctgaccctgctgcttcagtttgtcgggttgaaatacacttccgccgccagcgcatcggtcattgtcggactcgagccgctgctgatggtgtttgtcggacactttttcttcaacgacaaagcgcgtgcctaccactggatatgcggcgcggcggcatttgccggtgtcgcgctgctgatggcgggcggtgcggaagagggcggcgaagtcggctggttcggctgcctgctggtgttgttggcgggcgcgggcttttgtgccgctatgcgtccgacgcaaaggctgattgcacgcatcggcgcaccggcattcacatctgtttccattgccgccgcatcgttgatgtgcctgccgttttcgcttgctttggcgcaaagttataccgtggactggagcgtcggaatggtattgtcgctgctgtatttgggtttggggtgcggctggtacgcctattggctgtggaacaaggggatgagccgtgttcctgccaacgtttcgggactgttgatttcgctcgaacccgtcgtcggcgtgctgctggcggttttgattttgggcgaacacctgtcgcccgtgtccgccttgggcgtgtttgtcgtcatcgccgccaccttggttgccggccggctgtcgcatcaaaaataa

SEQ ID NO: 38021 - DNA, 1143 bp, Neisseria meningitidis
atgaaggtttttaaacaacagcttgaacaactcggcgcgcaaaaccaatatcgttcgattccggatttgattcatcaagggcggtatattacgcgggaaaactgcaaaatgctgaatatgtcgtctaatgattatttgggtttggcatcagatgaaaacttgcgccggtcttttttgcagcaatacggcggtaattttccctcttttaccagttcttcatcgcgtttattaacgggcaactttcctatttataccgatttggaagagcttgtcgcacaacgtttccaacgggaaagcgcgttattgttcaacagcggctatcacgccaatctcggtattttgcctgctttgacgacgacgaaaagtttgattttggcagataaatttgttcacgccagtatgattgacggcatccgtttgagccggtgtgcgtttttccgttatcgtcataatgattatgaacatttgaaaaatctgcttgaaaaaaacgtcggaaaatttgaccgcacttttatcgttaccgaatctgttttcagtatggacggcgatgtggcggatttgaaacagcttgtccaattaaaaaaacagtttcccaatacttatctttatgtggatgaagctcacgcaatcggtgtttatgggcaaaacggattggggattgccgaacgggataatttgattgccgagattgatttattggttggcactttcggtaaagccttagcctcggtgggggcgtatgccgtctgcaaccaagtattgaaagaatgtttgattaatcaaatgcgcccattgattttttcaaccgcattgccgccgtttaatgtggcttggacttattttatttttgaacgattgccgcaattctcaaaagaaagaagccatcttgagcagttaagtgcatttttacggcgggaagtggcgcatcggacgcaaataatgccgagccaaacctgtatcgtcccctatattttaggcgggaatgaagccacccttgccaaagcggaatacctgcaaaggcagggttattattgcctgcccatcagaccaccgacagtaccaaaaggtacatccagaatacgattgtctttgacggcagatatgacaatggatgaagtgcggcagtttgcggcgtgcctgtaa

SEQ ID NO: 38022 - DNA, 783 bp, Neisseria meningitidis
atggaatcactgactgccataaataaatcgcgcattcggcaggctttccaaaaagcattaaacgattatgaccggcacgccttaatccaacaaaaaatgacgattaatctaatggcgcatttgcaagattatttgccggatatgccattggaaaacgtgttggaattgggctgtggctcaggaatgttgagtgccttgctgcaaaaacagatttcagcgaattattggttatttaatgatttgtgcgatgtgcagccccaactggctgaaaaactgccgcaatcctttgatttttattgcggcgatgcggaaaactttccttttcaacgacaatttgacttaatcgcaagcgcatctgccgtgcaatggtttcatcaacccgacgcttttatcgctcattgcaaaacaggcttgaaagcaaacggattattggcggttgcaacctttggcaaagacaatttaaaagaagtccgccaaattacaaatataggcttaaattacccgactttatcccaatggcagacttggttagccaaagattttgagcttttatggtgtgaggattttaaggtaatactagactttgatacgccgttagatgtactcaaacaccttaaatatacaggcgtaacagccacgaaccaaaaaaattggacaagaaaaaatctcaatgaatttattggcgattacttgtcggcgttcagtatgccgtcgggcaaagtgcacctgacttatcatccgttattttttatcgcgcgctactctgcggcgggcaggcaataa

SEQ ID NO: 38023 - DNA, 1098 bp, Neisseria meningitidis
atggaagttcaactgccgaaaattaaaacagtacgcgtaatgttggcggggatgacggcgcagcaggaatccgttttcaaaatggcattcaaaatgcacaataccacccgttatgaaacagtatccccttcagacggcagtgccgtgcccgatttggttttggcggataccgatgccgagggcggttttgaactttggaaagagcttgccgagcgttataaggatatacccgtcgccgtctgttcggagaaagttcccgattctgaagttccctacctgcccaaaccgattcggtttgaaacattgtttcctatgctccgcaaattgttgcagggcgagaatgtttatgggaaatcgtttattgcacccgcagaccggtcggcgaaaaataacgggaatgtgcagcgtacggttacgatacgccagtttaacccgaataaaggattattgggggcgttgcggtttgcggaaaagaacaggcaggacatcgctatcttgcatggaaataagccggtccttattgttttcccctcgatacaacgggttttgctgacagaaagtgtgcaaaaactcgaagaattgtgcaaagacgaaaatttgcaggtcagctgcaagactgttcccgataacccgcaatggcgcgaaaaggctaaagtaggcattatgtcctgtatgtggcagttttccatttggacggcgcagggcaggttgatttatccgatttctcccgatactccgtttacgttgaaatcttggccaaacctgacccggttggcaaatgtgccggggtcgatacgcttgtcggcatttctgaccaaggcatccgtcaaccttaacgtgttgtataaagtgatgcctttaaacctcaatgatattctgaattatcttgcggcaacctatacaaccgggtttttgtcggtagatttaaaaacggtttcacaacaggcatactccgatatggcggataaaataaatatcggagccgattctgcctctgatagtgaaatgatgaaaaaagcggaaaaaatcacaacaccatcccaatcccagtcgcgcggccttctgcaaaggctgatgaaaaaactgttgggcagctaa

SEQ ID NO: 38024 - DNA, 372 bp, Neisseria meningitidis
atgaaactcctcttcatcctcctagtcctcttcgtcgccgtcgaacatttctacatcgcctggcttgaaatgacgcagattcccagcgaaaaagcggcggaaatattcaagctgccttatgaatttatggaacaaaagcgcgtgcagaccctgttcggcaaccaagggctgtataacggctttctcggcatcgggctggtgtggtcgcggtttgccgcgccggataacgcggtgtacggcgcaatggtactgtttctcggcttcgtcctgattgccgccgcgtggggcgcgttctcttccggcaacaaaggcatactcgtcaaacaaggtttgcccgcatttttggcagcggcggcggtgttggcggtatga

SEQ ID NO: 38025 - DNA, 630 bp, Neisseria meningitidis
atgaacagacacatccgccaagaaattttcgaacgcttccgcgccgccaacccccatccgaccaccgagctgaatttcaactcccctttcgagcttttaattgccgttctgctttcggcgcaggcgaccgatgtcggcgtaaacaaggcgacggcgaagctgtttccggttgccgatacgccgcaggcgatgctggatttgggtttggacggcgtgatggaatatacgaaaaccatcgggttgtataaaaccaagtccaagcacatcatgcagacctgccgcatcctgctggaaaaatacaatggcgaagtgccggaagaccgcgaggctttggaatcgttgccgggcgtggggcgcaaaacggcaaacgtggtattgaacacagcgttcggacaccccgttatggcggtcgatacgcatattttccgcgtgtccaaccgaaccaaaatcgcacccgggaaagatgtgcgcgaagtcgaagacaaactgatgcgcttcattcctaaagaatttctgatggacgcgcaccactggctgattttgcacggacgctacacctgcaaggcactcaaaccgcaatgccaaacctgcatcatcaacgatttgtgcgaatatcccgccaaagcctga

SEQ ID NO: 38026 - DNA, 414 bp, Neisseria meningitidis
atgataccctcctacacctacgccgccctcgccttttccgccttcacttccgccaccctcctgcccggcacatccgaagccgcctttgccctgttcgtccgccgctttcccgaacacgcatacggcgcgttgctgtgcgccggccttgccaacggattgggcagtatggtttcctattggatgggacgtttgctgccttcccgaaaaatgccgtctgaaaaaacactgaatctgatgcggcgtttcggtatttggctgcttccgtttgcctggctgcccgtcgtcggcgacgcactgccgcttgccgccggctggctgcggttgaatccgtggacaagcgggctgatgctggttatcggcaaaacggcgcgttacgccttcattctgtggggaatgcaatattacgccgcctga

SEQ ID NO: 38027 - DNA, 465 bp, Neisseria meningitidis
atgattgagatgagtaaagattaccgaaatgatttgtacgatgtatatgtttcctacccgccccaagtggatcgcgggcttatccgggagtgcctcagggagaatctcggcgaggaaaaggcggaaggattgatcgaatcgctcgattccaaacctcaagtgctggttgaggaaaaatgcacttgggcgaaacgggaagagttgcatgattatttcagctatttgggtttggatattattacccggagatatatggagttggaaacggtcgtgccgccggaggaaggggagggcgaaggagaaggcgcggatggggaaatgcccgaatatcttgaacttcacggcgggcgggaagatgatatttccgcaccttcgcaacccgaaccgccgtcccgcaatatcaaactgctggttttcgggctgctgattgcctttttgggctatctgctcggtaagattttttga

SEQ ID NO: 38028 - DNA, 1512 bp, Neisseria meningitidis
atgaaatggttgaaacgcctgacggttattgtcgggactttttaccgctatcggctggcaggtctgtgtgcttcgctgatgggtagcggttggatatgcgctctgctgaaaatgatgccgcagtcgtccaaattgaaaaacgaaccgcctgctgtccgtctgcgccttgccttggaaagcctggggccgattttcatcaagttcgggcaggttttgtccacacgccccgatttgattccgcacgattacgccgtcgaactggcaaagctgcaagacaaagtgccgccttttgacgcgcggctttcgcgtgaacaaatcgaaaaatcgttgggtcagtccatcgaaaagctgtatgcggaatttgaaaccgagcccatcgccagcgcgtccatcgcccaagtacacaaagcccgcctgcattcgggcgaacgagtggcggttaaagttttgcgccccaaccttttgccccttatcgaacaggatttgtcgctgatgcgtttcggcgcggcctgggtcgaacgcttgttttcagacggcaggcgtctgaagccgctcgaagtggtggcggagttcgacaaatacctgcacgacgagttggatttgatgcgcgaagccgccaatgccggacagctcgggcgcaatttccaaaacagcaatatgctgattgtgcccaaggtgttttacgactactgcaccagcgacgtgctgacaatcgaatggatggacggcacgccggttgccgacatcgccaaactcaaagcagacggcatcgatttgcacaaactcgccgattacggcgtggaaatctttttcacgcaggtcttccgcgacggctttttccacgcggatatgcaccccggcaatattttggttgccgccgacaaccgctacatcgccctcgatttcggcatcgtcggcacgctgaccgattacgacaaacgttatctcgccatcaatttcctcgcctttttcaaccgcgattaccggcgcgtcgccaccgcccacatcgaatcgggctgggtgcctgccgacacgcgtgcggaagaattggaagccgccgtccgcgccgtgtgcgaaccggtgttcaacaaaccgatttcgcagatttccttcggcttggtgctgatgcgcctgtttgaagtcagccgccgcttcaatgtcgaaatccaaccgcagcttgtgctgctgcaaaaaacgctgctcaacatcgaaggcttgggccgccagctcgatcccgatttggacttgtggaaaaccgccaaaccgtttttggtgaaatggataaacgggcaggtcggccctaaagccctttggcgcaacctcaaaaacgaagcccccgactgggcgcaaatcatcccttcattgccgcgcaaaatcagtgcgttgattgatgaaaaccgccagcaggaaatgcgtgatgcctatatccatttggtcaaagtgcagcagcggcaaagcctgtggctggctgtgattgcggttgttttgctgctgattttgcttttgaaatag

SEQ ID NO: 38029 - DNA, 1344 bp, Neisseria meningitidis
atgattaaaatcaaaaaaggtctaaacctgcccatcgcgggcagaccggagcaagtcatttatgacgggcccgtcattaccgaagtcgcgttgcttggcgaagaatatgccggtatgcgcccctcgatgaaagtcaaggaaggagatgccgtcaaaaaaggccaagtgctgtttgaagacaaaaagaatccgggcgtggtgtttactgcgccggtttcaggcaaaatcgccgcgattcaccgtggcgaaaagcgcgtacttcagtcggtcgtgattgccgttgaaggcaacgacgaaatcgagttcgaacgctacgcgcccgaaacgttggcaaacttaagcggcgaagaagtgcgccgcaatctgattcaatccggtttgtggactgcgctgcgtacccgtccgttcagcaaaatccctgccgtcgatgccgagccgttcgccatcttcgtcaatgcgatggacaccaatccgctggctgccgaccctacggtcattatcaaagaagccgccgaagatttcaaacaaggtttgctggtattgagccgcctaaccgagcgcaaaatccatgtttgtaaggcagtcggtgcggacgtgccgtctgaaaacgccgccaacatcgaaatacatgaatttggcggcccgcatcctgccggtttgagtggcacgcacattcatttcattgagcctgtcggtgcgaacaaaatcgtttggaccatcaattatcaagatgtaattgccatcggacgtttgttcgtaacaggtcgtttgaataccgagcgcgtggttgccttgggtggttctcaagtcaacaaaccacgcctcttgcgtaccgttttgggtgcgaaagtatcgcaaattactgcgggcgaattggttgacgcagacaaccgcgtgatttccggttcggtattgaacggcgcgattgcacaaggcgcgcacgattatttgggacgctaccacaatcagatttccgttatcgaagaaggccgcagcaaagagctgctcggctgggttgcgccgcagccggacaaatactccatcacgcgtacaaccctcggccatttcctgaaaaacaaactcttcaagttcaacacagccgtcaacggcggcgaccgcgccatggtgccgattggtacttacgagcgcgtgatgcccttggatatcctgcccaccctgcttttgcgcgatttaatcgtcggcgataccgacagcgcgcaggcattgggttgcttggaattggacgaagaagacctcgctttgtgcagcttcgtctgcccgggcaaatacgaatacggcccgctgttgcgcaaagtgctggaaaccattgagaaggaaggctga

SEQ ID NO: 38030 - DNA, 1503 bp, Neisseria meningitidis
atggcaaaagtactcatcgtacccgtatctgccggactggacgcctccgccgccgcacaagcctttgcaaaagcactggacgcacaaattttccaagccgttgacgcaaccgccgaaaccctgctcgcgcaaggcaaaagcgacgactggttcgacgcactggtcggcaaagttgccgcactcgatgccgccaacctcgtcatcgaaggcatcgcgcccgatgccgacaaaatctacctcgcaggcaaaaacgtcgaactggcattgtcccttgacgcggcagccgtcttcgccgtccgttccgacaacgccgatgccgacgaactggcaaatcggctgaaccttgccaaacagttcttcgccgccgcgccgggcgtattggaaggttttgtcgtggacggcgcggcagcctccgttgccgaagcggcagccgaaaaaaccggcctgaccttcttcggttcgagcgacgcgctgaaagacgtatccgtattggcaggccgcgaagcaaaacgcctgtcgccggcgcaattccgctacaacctgatcgacttcgcccgccaagccgacaaacgcatcgtcctgcctgagggcgcagaaccccgcaccgtccaagccgccgccatctgccacgaaaaaggcattgcccgctgcgtcctgcttgccaaacgcgaagaagtcgaagccgttgccaaagaacgcggcatcagcctgcccgactctttggaaatcatcgatcccgcctcattggtcgaacaatacgtcgagccgatgtgcgaactgcgcaaatccaaaggcctgacacccgaagacgcgcgcaagcaactgcaagacaccgtggtactcggtacgatgatgatggcgcaaaatgatgtggacggtttggtatccggtgcggttcacaccaccgccaacaccatccgccccgctttgcaactgattaaaaccgcaccgggcgcaagcctcgtgtccagcgtattctttatgctgctgcccaaccaagtcctcgtcttcggcgactgcgcggttaatccgaacccgaccgcgcaacagcttgccgacatcgccatccagtctgccgattccgcaaaagccttcggcatcgacccgaaagtggcgatgatttcctactccaccgtcaactccggcagcggccccgatgtcgataccgtcatcgaagcaaccaaacttgcccgggaaaaacgccccgacctcgccatcgacggcccgctgcaatatgatgcggcaaccgtgccgggcgtgggcaaatccaaagccccgggcagccaggtcgcaggacaggcaaccgttttggtcttccccgacctgaacaccggcaactgcacctataaagccgtccaacgcagcgccaacgtcttgagtgtcggcccgctgctgcaaggcctgcgcaaaccggtcaacgacctgtcgcgcggcgcgctggtggaagacatcgtgttcaccatcgccctgactgccgttcaggcaaaacaaatggaaggctga

SEQ ID NO: 38031 - DNA, 621 bp, Neisseria meningitidis
atgaaaccgcaattcatcactttggacggcatagacggtgccggcaaatccaccaaccttgccgtcatcaaggcatggtttgaacggagggggctgcccgtgctgttcacgcgcgaaccgggcggaacgccggtcggtgaggccttgcgcgaaatcctgctcaaccctgaaaccaaagccggtttgcgtgcggaaacactgatgatgttcgccgccagaatgcagcatattgaagacgtgatattgcccgcgctttcagacggcatacacgtcgtatccgatcgttttaccgatgcgaccttcgcctatcagggcggcgggcgggggatgccgtctgaagacattgaaattttggaacattgggtgcagggcggtttgcgccccgatttgaccctgctgttggatgtgccgctggaagtgtcgatggcgcgtatcgggcagacgcgcgagaaagaccgattcgagcaggaacaggcagatttcttcatgcgtgtgcgcagcgtttatctgaaccgtgccgccgcctgtcccgaacggtacgccattatcgacagtaaccgcagcttggatgaagtcagaaacagcatagaaaaagtgttggacggacatttcggctgttaa

SEQ ID NO: 38032 - DNA, 1545 bp, Neisseria meningitidis
atgtgcggcgtattaggtttggtcagtcatgaacccgtgaaccagcttctgtacgacggcttgcagatgttgcagcacagggggcaggatgcggcgggcattgcaacggcggaaggcggtaccttccatatgcacaaaggcaaaggcatggtgcgcgaagtgttccgcacacgcaatatgcgcgatttgaccggcaacgccggtatcgcccacgtccgttatcctactgcgggcaacgcgggcagcagcgcggaggcgcagcctttctacgtcagctcgccgttcggcatcgttttggcgcataacggcaacctcaccaacacggccgaactttatgaaaacgtgtgcaacaaacacctgcgccacgtcaacaccagctccgattccgaagtcttgctcaacgtattcgcgcacgaattgcgccgcgaagtctctaaaaacgccgacccgcaccggctcaatgccgacaatattttcaacgccgttgccgaagtccaccgcctggtgcacggcgcatacggtgtggttgccatgattgcgggctacggtatgcttgccttccgcgacccttacggcatccgcccgctggtattgggttcgcaaaccgacaacgaaggcaggaaatcctatgcagtcgcctccgaatccgtcgccttcaacgcgcttgcctacgatttggaacgcgacatccggccgggcgaagcggtatttgtcggctttgacggcacaatgattgcccgccaatgcagcgaccgtgccaaactcagcccctgcctttttgaatatgtttattttgcccgccccgactccgtaatcgacggcgtatccgtttaccagtcgcgcttggatatgggcgtgtccttggcggaaaaaatcaaacgcgagctgcccgtggacggcatcgacgttgtaatgcccatccccgacaccagccgccccagcgcgatggagcttgccgtccacctcgacaaaccctaccgcgagggcttgattaaaaaccgctatatcggccgcacctttattatgcccggccaggcgacgcgcaaaaaatccgtgcgccaaaaactcagcccgatggaaaccgagtttgcaggcaaaagcgtgttgctggtggacgactccatcgtgcgcggaacgaccagccgcgaaatcgtcgaaatggtacgcgcggcgggcgcgcgcaaagtctatatcgcctccgccgcccccgaagtgcgctatcccaacgtatacggcatcgatatgcccacgcgcgaagagttgattgccaatgggcgcagcgcggcggaaatcgccgccgaaatcggcgcagacggcatcgtgttccaaaatttgagcgatttggaagccgtcgtcaaagcactcaacccgaaaatcgaatccttcgattcgtcttgtttcaacggcatttatcagaccggcgacatcgatgatgcctacctcgaccgcctgtctgccgagaaatccggctgcggcggcctgaaaatccacccgagcaggatggaacacagcatcagcatcagcgatgcgggcgacgaagaataa

SEQ ID NO: 38033 - DNA, 732 bp, Neisseria meningitidis
gtgtcgcgcgaaatcaatgcgggcgggcatcatttcctctacggcggcatcagcggcggcggcgtgcattattgggataacaaagatttcagcgaacagtgcctgcgcctgtcgctcggctataaaaatcgttcggtaacgcgctcgttcggcatcgtgccgtttatcgggcaaaacctcttaggcggcagccgatacaatttcgtcggcggcttcaatgccgatttctcccgacgcttgagcgaacgctggcggctgacgctgaacgtgggcaatatgtggaagcgttatcaggaagaccgcaccgccgcccgatacgacagccatatgccgctggcgggcgcgacgctgatgtattccgcgccgaaagactggctgctttacggcggtgcggactggtcgcacgacttgacgaaggaggcggaacaggcttccatccgcaagggtttgcgtgtcggagcggtcaaaacgttcgacggcggcttgggtctgcgggcaaacctgcgctacacccgcaggacttttgatgcacccgggacccttgtgtactgcttcccgcgcaaagaccacgaatatcaggcaaacctgtcgttgtggcacgacaaaatctcttggaagggctttacgccgcaactcaatttccgctatctgaaaatcgacagcaatatgaaaagtttttacacacgcaaaaacatgcagattttcatgagcgtggaaaaggatttcaaataa

SEQ ID NO: 38034 - DNA, 360 bp, Neisseria meningitidis
atgaccgaccgtccgagcctgctgtggataaagcccggacaggctgaaatcatggaatattgcgaacctgaagaagcgtccgacccgtacgcaacatacaggtgtgccaacctgatggcggtgctgccgctgtttgtcgtgattttggttctgctcaatattgtttttccgcttccggcgcatcccttagcttggctggtgcctgcaggtttcatggttttggtcggcggctttcccttatcgctgccgcttgcggtgctgcttgtcctgacctgctgcattctggcgcgttgtccgccattatcccgtcttttgtgctacccttgcccgaatcatccgatgtctaaaaattctgcctga

SEQ ID NO: 38035 - DNA, 252 bp, Neisseria meningitidis
atgaaaaaatccctgtttgccgctgctttgttgtctttggttctggcagcctgcggcggtgaaaaagccgctgaagctcccgctgctgaagcacctgccgccgaagctcccgctactgaagcacctgccgccgaagctcccgctgctgaagcacctgccgccgaagctcctgctactgaagcacctgccgctgaagctgccgctaccgaagcacctgccgctgaagctcctgctgccgaagctgcaaaataa

SEQ ID NO: 38036 - DNA, 1110 bp, Neisseria meningitidis
atgttttcggacacagatatatccatgatggaaaacgccctccgacttgccgctttggggcgtttttccacttcgcccaatccgcgcgtcggctgcgttatcgcacacggcagccaaattgtcgggcaaggcttccacgtcaaagcgggcgaaccccatgccgaagtccacgccctgcgtcaggcgggcgaaatggcacaaggcgcgaccgcctttgttaccctcgaaccgtgcagccattacgggcgtaccccgccctgcgccgaagctctgctccgttccggcgtaacacgcgtcgttgccgccatgcgcgaccccaacccgctggttgccggcaaagggcttgccatgctcgaagcagcaggcatcaagacggaatgcggtttactcgaacatcaggcaagggaactcaaccgaggcttcctgtcgcgcatcgaacgccgccgccccttcgtccgcctcaaatgcgccgtttcgctggacggcaaaaccgccctttcagacggcagcagcttttggattaccggcgaagacgcgcgtgccgacgtacaggttttgcgtgccgaaagctgcgcggtgctgaccggcatcggcacggtgttggcggacaatccccggctcaacgtccgcgcttttccaactttgcgccaacccgcacgcatcgttttagacagccgcctgcgcctgcccttggacagccaccttctgaccgacggacaatctccaacctacatcgccaccttggaacgcgatgaagataaactccgcccctatcgggaacacgcacacatccgcatcctgatgccgtctgaaacggcagacggcaaaatcgacctgcaccacctgatgcgcctccttgccgacgaaggtttcggcgaaatcatggtcgaagcaggctccgaactcacatccgcatttttggcagaagatttggcggacgaaatcgttttataccgctcgcccaaaatcctcggcggcggcagcggtttattttgcctgcccgaaaaccgcgccgccctttccgcaccgcccttgtggacacctgtttcaagcgaaatcctcggacacgacatcaaaaccgtgttccgaaaaaacggcaacgccttttaa

SEQ ID NO: 38037 - DNA, 1254 bp, Neisseria meningitidis
atgtccgaacaacatatttcgacttggaaaagtaaaatcaacgcattgggaccggggattatgatggcttcggcggcggtcggcggttcgcacctgattgcctcgacgcaggcgggcgcgctttacggctggcagatcgcgctcatcatcatcctgaccaacctcttcaaatacccgtttttccgcttcagcgcgcattacacgctggacacgggcaagagcctgattgaaggttatgccgagaaaagccgcgtttatttgtgggtattcctgattttgtgcatcctctccgccacgattaacgcgggcgcggtcgccattgtaaccgccgccatcgtcaaaatggcgattccctcgctgatgtttgatgccggcacggttgccgccttgattatggcatcctgcctgattattttggtgagcggacgttaccgcgctttggatcgcgtttccaaaatcatcatcgttactttgagtatcgccacgcttgccgccgccggcatcgctatgtcgcgcggtatgcagatgcagtccgattttatcgagccgacaccgtggacgcttgccggtttgggcttcctgatcgcgctgatgggctggatgcccgcgccgattgaaatttccgccatcaattctttgtgggtaaccgaaaaacaacgcatcaatccttccgaataccgcgacgggatttttgatttcaacgtcggttatatcgccagtgcggttttggctttggttttccttgcactgggcgcgtttgtgcaatacggcaacggcgaagcagtgcagatggcgggcggcaaatatatcgggcaattgatcaatatgtacgccgttaccatcggcggctggtcgcgcccgctggtggcgtttatcgcgtttgcctgtatgtacggcacgacgattaccgttgtggacggctatgcccgtgccattgccgaacccgtgcgcctgctgcgcggaaaagacaaaacgggcaacgccgaattctttgcctggaatatttgggtggcgggcagcggtttggcggtgattttctggtttgacggcgtaatggcgaatctgctcaaatttgcgatgattgccgcttttgtgtccgcccctgtgtttgcctggctgaattaccgtttggtcaaaggtgatgaaaaacacaaactcacatcaggtatgaatgcccttgcattggcaggcttgatttatctgaccggttttaccgttttgttcttattgaatttggcgggaatgttcaaatga

SEQ ID NO: 38038 - DNA, 1176 bp, Neisseria meningitidis
atgctgaacaccgccctttccccgtggccctgcttcacccaagaagaagccgatgccgtttccaaagtcctgctgtccaacaaagtcaactactggacgggcaacgaatgccgcgaatttgaaaaagaatttgccgcctttgccggcacgcggtacgccgtcgccctttccaacggcacgctggcactcgatgtcgcgctcaaagcaatcggcataggcgcgggcaacgatgtgattgttacctcgcgcactttcttggcttccgcttcctgcattgtgaacgcgggcgcaaatcccgtgtttgctgatgtggatttgaacagccaaaacatcagcgcggaaaccgtcaaagccgcgctgaccccgaataccaaagcgattatcgtggttcaccttgccggtatgcctgccgaaatggacggcattatggctttggcaaaagaacatgatttgtgggtgattgaagactgcgcccaagcgcacggcgcaaaatacaaaggcaaatccgtcggctctatcggccacgttggagcttggtcgttctgccaagacaaaatcatgaccaccggcggcgaaggcggcatggtcaccaccaacgacaaagagctgtggagcaaaatgtggtcgtacaaagaccacggcaagagctatgatgccgtgtaccaccgcgaacacgcccccggcttccgctggctgcacgaaagattcggcacaaactggcgcatgatggaaatgcaggctgtcatcggccgcatccagctcaaacgtctgcccgaatggacggtgcgccgccaagaaaacgccgccaagctggcggaaagcttgggcaaattcaaaagcatccgcctgattgaagtcgccgactacatcgaacacgcgcaatataagttctacgccttcgtcaaacccgaacacctcaaagacggctggacgcgcgaccgcatcgtgaacgaactgaacgtgcgcaaagtcccctgctatcaaggcagctgctccgaagtctatttggaaaaagccttcgacaacacgccttggcgtccgaaagagcgtttgaaaaacgctgtcgagttgggcaacaccagcctgatgttcttggtacacccgacgctgaccgacgacgaaatcgcgttctgcaaaaaacacatcgaagccgtattggcagaagccacacaataa

SEQ ID NO: 38039 - DNA, 915 bp, Neisseria meningitidis
atgacttggcgcagcctgcttattcaaaacggcggcaaactatccttgcaacgccggcaactgctgattcaacaaaacggcgagtcccacaccgtaccattagaggacatcgccgttatcatcatcgaaaaccgcgaaaccctgattaccgctccacttctgtcagccttagccgaacatggcgcaaccttactgacatgtgacgagcagttcctgccctgcggacaatggctgccttatgcccaatatcaccgccaacttaaaatcctcaaactgcagctgaatataagcgaacccttaaaaaagcaattctggcaacatatcgtccgccaaaaaatcctgaatcaagcctttgtcgcagacgaaaccggcaatgatcttgcagccaaacggctgcgcactttggcatctgaagtccgctctggcgatacaggaaaccgcgaagcgtaagccgccgccctctacttccaagccctctttggcgaaaaatttacccgtaatgacaacaacgccgtcaatgccgcattgaactacacctacgccgtgctccgagccgcagttgcacgcgccctgaccttatacggttggttacctgcattaggcttgtttcatagaagtgaactcaatccatttaatctcgccgatgactttatcgaacccttacgcccattggccgacctgaccgtgatacatttgtacgaacaaggccgtctgaaaactgaactgacgctcggcatcaaacaacacctcatcaaaatcctctactatcaaaccagcatcgaacggcaacatttcagcaccttggctgccatcgacaaaatggtttcgtcatttcaagccggcgtaactgataaaaacgccaaacaactgaaactgcctgaaatcctaccattgaaagcataccaatatgagtga

SEQ ID NO: 38040 - DNA, 1649 bp, Neisseria meningitidis
atggttgcctatgttttcctgtttttgtttgtaacggcggcgttggtgctgattatcaggtcgcactaccgctggacgtattttttcgcatccgcgctgtttgtctttttggcgggcggtatgctgatgttgacggctcagtggcaacgtgccttgaatttcgcttcggtctggtttgtggtgctgatactgttccacaggctgaaaatccattattacaaacagccgctgttgatttccgactttttgctgattgccgactggcggaattgggaaacgctgttccattataaggaagcggttatcggtatggcggggctgctggctttggcggcatatgcggttttcggctggagcggtgcggattctttggatgtgccgtggcggtgggcaggcgcggttttgtttgcggcggcgttcgtgtcgatgcggcatttttccaaacatccgggcgcggtaaagacgtggctggattcgctgccggacgacgggcgcgacgtgttttgaacctgccgatgtcctgtcgggcggtgtttttccaagtacccgtgttcgagggcgacggggaagcgtttgccaggcagatgccgtctgaaacccggccgtgcggcatgtcggatgaaaaacccgatattgtcgttaccctgatggaatcgacgctcgatccgcactgtttcgactttgccgccgccaagattcccgatttgaaaatgttcggacggcaggaagataccgtattttcctcacctttgcgcgtgcatactttcggcggcgcaacgtggaagtccgaatttgcgtttttggcgggtgttccgtccacggatttcggcgcgttggcaagcggcgtgttttactcggtcgtaccgcatttgcagaccggttttgtccgcaacctgcgcgaacacggttatttttgcgtggcactctcgccatttaccaagggcaactacaatgccaaggcagcatatgaccatttcggctttaatctgatgttccagccgcaagatttgggctatcccgcgccgatgggcaaaaacctgtggcatatttccagtgaggaaatgatgcagtatgcgcggatgattttggaaaaacgccatcccgatttggaaaacgtgcggcagccgatgttcgtatatgtgctgaccatgaaggagcacgggccgtatcggacggataccgacaatgtgtttgatttggatgcgcccgatttgaatgcgaaaaccgtatccgcgcttaacgactacatcgggcgcattgccgatttggacaaagcggtggaaagtttcgaccgttatctgcacgaacgcggcaaaccctttgttttcggttatttcggcgatcatcaggtaccgtttgagggcgtgtccgtcaggaagaaatgggattacgcgcagccggattatgtaacgcagtttgccgtcaggagcaatattgccggcggattcgtacagcggcagaatttcctcgaccttgcctttgcaggcggcgtgctgatggaggcggctggtctggaagccaaagacggcttcatgcgtgcgaatatggcgatgcgcggtttgtgcggcggagggttggaagactgcccgaactgggagttggtcggaaattaccgcaactatctgtacgacgttttgaaaattgcccgt

SEQ ID NO: 38041 - DNA, 571 bp, Neisseria meningitidis
gtgaattataaaatatacgatggtgcaaagattattaaaaaagaaaatttatcaattggggattattctcaaattgatgattttgtattttttaattgtggagagaaaagtattttaggaagttttgttcatatatcatcatttaccagtattattggtggtggagaattttatatggatcatttttcaggattaagcgcagggtgtagaattattaccggtagcgatgattttatgggggggggggttaaccaatccaacagtcccatctaaatatactaatgttaaaaaatctagtgttagaattggaaaacatgcaattttaggaacaaatgtaacagtattaccaggcgttactattggtgatggggttgctgttggagcaggggctatagtgagaaaaaatcttgagccgtggactatttatgtcggggtagattgtaaaccactgaagcgcagatcacaagataaaatattggagttagagaaacatcttgtagcagaatttaatctagatttatgtcctataatcccatccccgacacgccccaacccaaaggaaacgcgatga

SEQ ID NO: 38042 - DNA, 3097 bp, Neisseria meningitidis
atgaacctcgaaaccaaacccatcgccgaaacgccgaatttcatcgtgctcgaccaatatgaaaaaatcgaacagtcgggcagctaccaatcggaaaaccagttggaagcggagttaatcgccgatttgcagaatcagggttacgaataccgcaaggatttgaacagccaaagcaggctgctggaaaacctgcgcgcgcagttgcagcggctgaacgatgtggcgttttcagacggcgaatgggcgcggtttttgacggaatatctggacaggccgtctgaaaacattaccgataaaacccgcaaaatccacgacgaccatatctatgatttcgcttttgatgacggccgtctgaaaaacatttatctgctggacaagaaaaaccttgcccgcaaccatgtgcagcttatcaaccagtttgagcagacgggcacgcatgcaaaccgctatgacgttaccgtgttggtaaacggcctgccgctggtgcagattgaattgaaaaagcgcggtgtggcggtgcgcgaggcattcaatcaggtgcaccgttacagcaaagagagcttcaacagcgaaaattcgctgttcaaattcctgcaaatcttcgtgatttccaacggcacggacacgcgctatttcgccaataccaccaagcgcgacaaaaacagcttcgatttcacgatgaattgggcgcggtcggacaatcatccgattaaggatttgaaagactttaccgccacgttcctgcaaaaaaagcgtattactgagcgttttgctgcattacagcgtgttcgatgcgaatgatacgctgctgattatgcggccgtaccagattgccgccgccgaacgcattctgtggaaaattaacagttcggcgcaggcgaagaattggagcaaaccggaaagcggcggctatgtttggcataccacgggcagcggcaaaacgctgaccagctttaaggcggcgcgtctggcgacggaatcggcgtttatcgacaaggttttcttcgtggtggacaggaaggatttggactaccagacgatgaaggaataccagcgtttttcgcccgacagcgtaaacggttcggaaagcacggcgggtttgaaacgcaatttggaaaaagacgacaacaaaatcatcgttaccaccatccaaaagctgaacaacctgatgaagagtgaggataatctgccggtttatcaccagcaggttgtctttattttcgacgaatgccaccgctcgcaattcggcgaagcgcaaaaaaatctgaaaaagaaatttaaaaaattctgccagttcggctttaccggtacgccgatttttcccgaaaacgctttgggcgcggaaaccacggcgggcgtgttcgggcgtgagttgcattcttatgtgattaccgatgccatccgcgatgaaaaagtattgaaattcaaagtggattacaacgatgtgcgcccgcagttcaaagccgtggaagcggaacaggatgagaagaaactgagtgctgccgaaaaccgccaagccctgctgcaccccgaacgcatccgcgaaatcacgcaatatatcctgaaccagttcaggcagaaaacgcaccgcctgaatgcgggcggtaaaggcttcaacgccatgtttgcggtcagcagcgtggatgcggcgaagtgctattacgaagcgttcaaaacacaacaggcaggcagcctgcacccgctgaaagtggccaccattttttcctttgcggccaacgaagagcagaacgccgtcggtgaaattgttgatgagacctttgaaccggaagcgatggacggcagcgcgaaagaatttttgcaggctgccatcaacgattacaacgcctgtttcaaaaccaatttcggcacggacagcaaagcctttcaaaactactaccgcgatttggcaaaacgggtgaaaaatcaggaagtggatttgctgattgtggtcggcatgtttttgacgggttttgacgcgccgacgctgaacacgctgttcgtcgataaaaacctgcgctatcacggcctgatgcaggcgttttcgcgcaccaaccgcatttacgatgccaccaaaaccttcggcaatattgtctgcttccgcgatttggagcaggcaaccattgatgcgattaccctgttcggcgacaaacacaccaaaaacgtggtgctggaaaaaagctacgaagaatacatgaacggctataccgacagccagaccggcgaagcgcggcgcggttatttggatgtggcaaaagagttgcgtgaacgtttccccgaacccgacgaaatcgaaacggaaaaagacaaaaaagattttgccaaactcttcggcgaatacctgcgggcggaaaacgtattgcagaactacgatgaatttgccgcgctgcgcgagttgcagagtgtggacgcggcggacgaagatgcgatgaaggcgtttcaagaaaaatactacttgagcgatgaagacgtgcaggaaatgcggcaagtgccgataccgtctgaaagggcggtgcaggactaccgttccgcctacaacgacatccgcgattggttgcgccgccaaaaagcaggcgaacagaaagaacagtcaaaaatcgattgggacgatgtggtttttgaggtggatttgctcaaatcacaggaaatcaatctggattacatcctgcaactggttttcgaacaccacaaaaaaatcaaaggcaaagcggagctggtggaagaaatccgccgcatcatccgcgccagcatcggccaccgcgccaaagagggtctgattgtggatttcatcaacgatacggatttggacaaagtacccgacgttcccgccatactggaaaccttctacacctacgcgcaagaggtgatgcggcacgaagcggcaggattgattgtcgccgaaggcctgaacgaaaccgccgccaaacgctatttgaccggctcgctcaaacgcggctatgccagcgaaaacggcacggaactgaccgaaaccctgccgaaaatgagtccgctcaacccgcaatatctgacgaagaaacaaagtgtttttcaaaagattgcggcgtttgtggagaagtttgccggaatagggaccgatatt

SEQ ID NO: 38043 - DNA, 366 bp, Neisseria meningitidis
atgttcaaacgacctgaagaaatcatcgtcctgatacttgccgtcctctggattgccggtacgtattttctcgccgccctgtttggagcggacgcttataccgtgttaaaaatcactgcccttaccctgctttggtctgccgcatcattcctcctttggcaaaaaaacctcagccggcatatctggccgctgctgctcggctgcctgactgcctgttggtggccgtatctgaatcaatcggtcgcacccggttctttaccttggtatgcatcatggacgttcaaaaccatcttagccctgattcccgtaaccgcaggttatctgtttaaatggaaacaataccggcagcgcaaaacaaagccgtaa

SEQ ID NO: 38044 - DNA, 192 bp, Neisseria meningitidis
ttgccgaaattcggggaatgccctctccccaaccctcccccacgggggagggggcaggttgcagcggattttgcggttgcaggcggtttgagaaagaatgcccgaaatatcaacagcgggaatttttcaggcagcctttatcgcaaggcaggtggaacaaacgccgcgaacgttttttcagacgacctttga

SEQ ID NO: 38045 - DNA, 294 bp, Neisseria meningitidis
ttgcacaaacaagtgcaacatattactacaaagctattttatttcaaaataactgatatatcttttttcatagattttaaatttcatatttttaatattttaggaattttattccaaagaaaaagaaacagattgataaaaacaatacccaccattcattcggacaaaaccgcacggaacatccgttttcccatttccacgacaatccggtacagaacaccccgctgccgattccgcctgcacatccggcaaaatttcatacgcaaggaaaatgttgaaaacaaaaagaactaa

SEQ ID NO: 38046 - DNA, 372 bp, Neisseria meningitidis
atgattatggaccaatactatatggagttaaagaataagttatctaacagaccaatcctactggataatactaatgattttctttttgttttagtaaatacagtgaaagctatgatagaaaatactgataaaagtcagctttcagagttagataaaattttagacggtgtcacaagtcaagaattgaaacttgcctatgatttttgtcaagggaaattcggtcaagcaggtttttcttatcgtaggcacccgaattatttttatttgtccagtttaattgcgacttttccagaatttgagttgtctaaagcagaccgagattacctcaaaggaatcataaattttgataactaccttttatatgagttagat

SEQ ID NO: 38047 - DNA, 186 bp, Neisseria meningitidis
gtgcggaacgcacgtatgcggttctcaaggtttgagctaagaggccgtctgaaaacagaaaaactgtttcagacgacctttcttttaaccagttgccacagcaaccggacaaaagcagcctacctccacatccatataggcaatacaggggagatattttgtaaattctacgaatattttacctgc

SEQ ID NO: 38048 - DNA, 225 bp, Neisseria meningitidis
atgaaagtgtatgtttttaaaattagtaatgaaaacggtaagttaaagatagaactccccgaaatcccaatgggtaagcaaattgacgaagttgatttgattgctgggctaaccacggaatttattgcaagtatgttacgtgatgcccaaaaagatcgtcgcaaattcgtaatcgacgcatcaaatcaattggctgcaatccagacatatcaaaaaatcttcaat

SEQ ID NO: 38049 - DNA, 222 bp, Neisseria meningitidis
ttgcagaaattctatgtgattgattttctttctttaaagtctatttttttaaataaatttgcgttaaaatatagtggattaaatttaaatcaggacaaggcgacgaagccgcagacagtacagatagtacggcaaggcgaggcaacgccgtactggtttaaatttaatccactatacagaaaatttatccaatggattgaccgtgaagaaaataaggtcgtc

SEQ ID NO: 38050 - DNA, 156 bp, Neisseria meningitidis
ttgtatgccggtcattatggcggaaataccgtttgggaggcagccgcatcgcgtggaatcggcacggcaggcgatgcgccgatgccttcgggcgtgaaggcggggcaatcggcagtttggaaaaaggcaatggaatctgtgggcagaagaagttaa

SEQ ID NO: 38051 - DNA, 192 bp, Neisseria meningitidis
ttgaggcaggcatttcagacggcattccttaaatgcgtgtacctgtggtgttccaaaaggtcgtctgaaagtgcagcttctgcgaagctaaagcgcagtatcaacgaagttaaaatttgcctgaaccttaaaggcagcctgcaccccaatcccctctccccgtgggagagggctaggacgaggctggcaaac

SEQ ID NO: 38052 - DNA, 180 bp, Neisseria meningitidis
atgtgtgaaatgagtttcggacgacgtaatacggattggcaggcttggggacaacaccgcaggcgtgcgacgaagtttatggtgaagcgaaaccgcgagcaggaagtcgccgaatatcaggcgcagtttgaagataaggacggcaaaggtcgtctgaaaacggaaggaaacaaagatgaa

SEQ ID NO: 38053 - DNA, 294 bp, Neisseria meningitidis
atgacagctaaaggacaaatgttgcaagatcccttcctgaacgccctgcgtaaagagcatgttccggtttcgatttacttagttaacggtatcaaattgcaaggtcaggttgagtctttcgatcaatacgttgttctcctgagaaacacttccgtcacccaaatggtttacaaacacgccatttccaccatcgtaccggcacgctccgtcaacctacaacatgaaaacagaccccaagccgcaccgacttcgaccctcgtccaagtggaaaccgtccagcagcctgccgaataa

SEQ ID NO: 38054 - DNA, 264 bp, Neisseria meningitidis
ttgaaacggcaaaccgtcaatcaagcaaccgcgtgcgtgcgtaccgcacacaccctacacgttgattttgaagttccgtgtaattcacaggtagggtgtgtggcgcagccacgcacgcggtgttgggtatgcaggctacggcttgctgctgcagaaactcctgaagaaaaagccaaagacgccgctgaagaggctaaagaagaagcaaaagacgcagcggaagatgccaaagaagctgctgaagacgctaaagaagaagctaaa

SEQ ID NO: 38055 - DNA, 204 bp, Neisseria meningitidis
atgaatattattggtaaattgaaagaagctgcttcctattttcttacaaaattgattggagaaaatcctagtaatgagcaggtaaaccgcgcacttatacagatgccaaatgttcgtccgatacacacctatccacgcccaaatttaagaaactcaggcgtggcagccgcgaaacgtgcggcgcgcaaacgcaagaatcgtcat

SEQ ID NO: 38056 - DNA, 1000 bp, Neisseria meningitidis
atgcacacaccacttacctatattgaccttttctcaggagcaggaggcctatccttgggttttgaacaagccggattccaacaattgctttctgttgaaatggagtctgattattgtcagacttaccgtaccaacttcccccatcatcaattactgcaaaaagatttaaccacactaaccgaacaagatttaatcaattgtcttaacggacaagcagttgatttgattattggaggaccaccttgtcaaggttttagtatggcaggaaagattggacggacatttacagatgacccacgcaaccatttatttaaagagtttgtccgaatagttaaaattgtccaaccatatttttttgttatggaaaatgtagcgcgactctatacacacaattcaggtaaaacacgtattgagattattcaagcatttcagaatatcggttattcggtggaatgtaagatactgagtgcagccgatttcggtgttcctcagatacgtagccgagtgatatttatcgggaggagggataaaggcaaaatttcctttcccgaacctttgcagatttcccatcagactgttggatcagcaataggacattttccaaaactggctgctggcgaaagcaatccacacgttgcaaatcatgaagctatgaatcattcggcacaaatgttagaaaaaatggcatttgttaaaaatggaggtaaccgtaacgatattcctgaaccattacgtccgaaaacaggtgatatccgtaaatacatccgttacaacagcaacaaaaccagccgtttgtattacaggagatatgcgcaaagtttttcactatgaacagaatcgggcgttaaccgttcgtgaattagctgccttacaatctttccctgataattttattttttgcggcagcaaaattgcccagcagcagcaggttggtaacgccgtaccgcctttattggcaaaagctattgctgaaagtattttaaaaatgagtgaaaatgaa

SEQ ID NO: 38057 - DNA, 4475 bp, Neisseria meningitidis
atgcgcttcacacacaccaccccattttgttccgtattgtccaccctcggtctttttgccgtttcccctgcttactcatccattgtccgcaacgatgtcgattaccaatattttcgcgactttgccgaaaataaaggcgcgttcgccgtaggtgcaagcaatatttccatccaagacaagcaaggcaaaatattaggcagggttctcaacggcatccccatgcccgacttccgagtcagcaaccggcaaaccgccatcgccaccctgattcacccccaatacgtcaacagtgtcaaacacaacgtcggctacggttccatacaattcggcaacgacacccaaaatccagaagaacaagcctatacctaccgcctcgtatcacgcaacccgcacccggactacgactaccaccttccccgcctcaacaaactggttaccgaaatctcacctgccgcactcagcagcgtacccttgcttggaaacggccagccaaaggccaatgcctacctcgataccgaccgcttcccatactttgtacgactcggctcaggcacgcaacaagtccgcaaagcagacggcacgcgtacacgaaccgccccggcataccaatacctgaccggcggcacgccgctgaaagtattggggttccaaaaccacggcttactcgtcggcggcagcctgaccgaccaaccccttaacacctacgcaatcgccggagacagcggttcccccctgtttgccttcgacaagcatgaaaaccgctgggtgcttgcgggcgtactcagcacctacgccggcttcgataacttcttcaacaaatacatcgtcacgcaacccgaattcatccgttccaccatccgccaatacgaaacccggctggatgtcgggctgaccaccaacgaactcatatggcgcgacaacggtaatggcgacagcaccctgcaagggctcaacgaacgcatcaccctgcccattgcaaacccttcgcttgccccacaaaacgacagcaggcacatgccgtctgaagatgccggcaaaacgctcatcctatccagcaggttcgacaacaaaacactgatgctggcagacaatatcaaccaaggcgcaggcgcattgcagttcgacagcaacttcaccgtcgtcggtaaaaaccacacatggcaaggtgcaggcgttatcgtagccgacggcaaacgcgtcttctggcaagtcagcaaccccaaaggcgaccggctctccaaactgggcgcaggcacgcttatcgccaacggacaaggcatcaaccagggcgacatcagcatcggggaaggcactgtcgtactcgcccaaaaagctgcttcagacggcagcaaacaagcattcaaccaagtcggcatcaccagcggcaggggcacggccgtcctcgccgacagccagcaaatcaaacccgaaaacctctatttcggcttcaggggcggacggctcgacctcaacggcaacaaccttgcctttacccatatccgccatgcggacggcggcgcgcaaatcgtcaatcacaaccctgaccaagccgcgacactgacgctgaccggcaaccccgtcctcagtcccgagcatgtcgagtgggtgcaatggggcaaccgtccgcaaggcaacgcggcggtttacgaatacatcaacccgcaccgcaaccgtcggaccgactacttcatactcaaacccggcggcaacccgcgcgaatttttcccgttaaatatggaaaactcaacaagctggcaatttatcggcaacaacaggcaacaggccgccaaacaagtcgcccaagccgaaaatgcccgccccgacctaattaccttcggcggatacttgggtgagaacgcgcaaacgggcaaagccgcaccgagttacagcaaaaccaatatcgaatgggtgaatggtccaaacaccccacacaagccctcgccctatacgaatacgccaacccgcacaggggcaggcgtaccgacgattaccgcctcaaagaaggcggcaaccccggcgtctacttcccatggaatgcctacagcacccaagactgggaatttctcggacatgaccggcgaagcagccatagaaaaaacccgccatatcgcaaatgccgccgtatacggccggcccgaataccgttacaacggcgcactcaacctgcactatcgtcccaaacgcaccgacagcacgctgttgctcaacggcggcatgaaccttaacggggaagtcttgattgagggcggcaatatgattgtgtcaggcaggcccgtaccccatgcctacgaccaccaggccaaacgcgaacccgttcttgaaaacgaatggaccgacggcagcttcaaggctgcacggttcaccctgcgaaaccatgcccgactgacggcagggcgcaataccgcgcatctggacggcgacataaccgcatacaatctgtccggcatcgacctcggctttatccaaggcaaaacaccggaatgctaccgctcctaccatagcggcagcacccactgcacacccaacgccgttttaaaagccgaaaactatcgtgcactacctgcaacgcaagtacgcggcgacattacccttaacgaccgttcagagctccgcctgggcaaagcacacctgtacggcagcatccgtgccggcaaagacaccgcagtccgcatggaagcagacagcaactggacactttcccagtccagccacaccggcgcactgacgcttgacggcgcacaaattaccctgaaccccgatttcgccaataatacacacaacaaccgcttcaacacactgaccgtcaacggcacacttgacgggttcggcacattccgattcctgaccggcatcgtccgaaaacaaaatgcccccccctcaaactggaaagggacagccgcggcgcattccaaatccacgtcaaaaacaccggacaagaacctcaaacaaccgaatcgcttgcacttgtgagcctcaatccgaaacacagccaccaagcccgattcaccctccaaaacggctatgccgatttgggtgcctaccgctacatcctccgcaaaaacaacaacggatacagcctgtacaacccgctcaaagaggccgaacttcaaattgaagccacgcgtgcggaacatgagcgcaaccaacaggcatacaaccaattacaggcaaccgacatcagcagacaggttcaacatgactctgacgcgaccaggcaggcactacaggcctggcagaacagtcaaaccgaacttgcccgcatcgacagccaagtccaatatctgtccgcccaattgaaacagacagacccgctgaccggcattctgacgcgtgcccaaaacctgtgtgccgcacaaggatacagtgtcgatatctgccgtcaggttgccaaagccgccgacacgaacgacctgacactcttcgaaaccgaactggatacgtatatagaacgtgtagaaatggccgaatccgaacttgacaaagcacggcaaggcggcgatgcgcaagccgtcgaaacagcccggcacgcctacctgaacgcactcaaccgtctgtcccgacaaatccacagtttgaaaaccggcgttgccggcatccgtatgccgaacctggccgaactgatcagccggtcggccaacaccgccgtttccgaacaggccgcctacaataccggccggcaacaggcgggacgccgcatcgaccgccaccttaccgatccgcagcagcaaaacatctggctggaaaccggtacgcaacaaaccgactaccatagcggcacacaccgtccctaccaacaaactaccaactatgcacatatcagcatccaaaccggcatcaccgaccgtctcagtgtcggtacaattttaaccgatgagcgcacaaacaaccgttttgatgaaggcgtatccgcccgaaaccgcagcaacggcgcacatctgttcgtcaaaggggaaaacggcgcactctttgccgcggcagatttaggctacagcaacagccgtacccgatttaccgattatgacggggctgccgtccgccgccacgcatgggatgcaggcatcaacaccggcatcaaaatcgataccggcatcaacctcagaccctatgccggcatccgtataaaccgcagcaacggcaaccggtacgtactcgacggcgcagagataaacagcccggcgcaaatccaaaccacatggcatgccggcatccgtctcgataaaaccgtcgaactgggtcaagccaagctgacccccgccttcagcagcgattactacgatacccgccaaaacagcggttccgccctcagcgtcaacgaccgtaccttactgcagcaagccgcccacggcacactgcataccctgcaaatcgacgccggatacaaaggctggaacgccaaacttcatgccgcttacggcaaagacagcaacaccgcccgccacaaacaagcaggaatcaaaataggctacaactggtaa

SEQ ID NO: 38058 - DNA, 198 bp, Neisseria meningitidis
atgtcctatgattgatcgaaacgacttgtaatcggcttagcatcaagtgccctattcgagttatccgaatcggataatatatttagaatggaaggggcagaaacctataggcaatatcagagagaaaaacaaaaccatcccctaaaaaaggcgttgtctttccatttattaaaaaacttctgtcaatcaatgaaataa

SEQ ID NO: 38059 - DNA, 123 bp, Neisseria meningitidis
atgagacctttgcaaaattccccaaaattcccaccaagacatttaggggattttggggaattttgcaaaggtctcggacagtattttgaacgcagtgcgcgtaaatccgtatggaaaccatga

SEQ ID NO: 38060 - DNA, 816 bp, Neisseria meningitidis
atggcagacatcctaccatccgacaagcggcggcaaccgccaaaaacgaaaggaagtacgatgaacataatcgaacaagaaatgaaacactccagtctgagaaaagtagatgccgaaatcgccaaaatcattgcagacgcgcacaaaatcaacgccgaatccgtaaaaatagcccaagaatcccgatggtatcccatgatggcggccaccgggctggttaccgccatcgccgccgtgttggcactgatattcaaatttgcctgaccacaagccccgcgaggggctttatcccccgaacaacccgaacaaaatgaacagagccgcactattcaaccgctaccccgaatggattatcgggcaagacggcgcaagccgtttcattacccattgccgctatccccgcctgattgccaaaatccacaggcagacagacagcgaatgcccgggcgggcattaccgccattccgaaaacggcatcaccctttacgattttatttttttcgacggaaaaccggcagacgaagcccgatttgccgccgtccttaccgaaacctgccgccgggcagtcaaaaaaatatgcgaaacaaaataaaccgcaacgacatggaactcggctacacgccttacaaccttcgcaccctgcgcaaccgctgcaaactgacacaggccgagttggcgcaaatcgtcggggtgaagcactacatacaggtaggccgctgggaagccgaacccgataccgaaacgcggcgggccgatatgccgctggaaaaatggcggcagttcctcgattggacagaaaaaacaaacgccgtctga

SEQ ID NO: 38061 - DNA, 207 bp, Neisseria meningitidis
gtgggatgcagggtgtgcttcagcccgctgcatcaaaaatttttggagaatcggcgggagtcggcggttttggtttcggcggggacggtggaaatgggtaacattgacggaatcgacggaagcggtgggcttcagcccaccgcttgtatattggaatcaccgtatcatagcgccacccgcgcccacccaaggcacacaaccgttgcg

SEQ ID NO: 38062 - DNA, 120 bp, Neisseria meningitidis
atgaacaaggcaatgccgtctgaagggctttcagacggcattttgcgctattttgtgaaggtagggatgacggttcgggtattcctgacagggtggattttcaaggtgttgtatagggtg

SEQ ID NO: 38063 - DNA, 270 bp, Neisseria meningitidis
ttgtactgtctgcggcttcgccgccttgtcctgatttttgttaatccactatatgctgatgccggagacgtatattgcgtctataacatcagactgaagcagtacactgcctgccaggttacccgagttgaagaacacggtggcaaaaaaacacatgcgaccctgctggctttggactggcagggcaacaaaccgcttggggcggaggagctggcggatttgaaaccactttacaaagacttaaagaataatattggaaatattgtatga

SEQ ID NO: 38064 - DNA, 852 bp, Neisseria meningitidis
atgaccttactcggaataaagctcaaacagacccagcagctcaaccagcggctgcaacaatctttgcgcgtattgcagatgtcgggtatcgaacttgaacgcgaggtcgaaaactggctgtcggacaatcccctgctcgaacgcaaagacacggatgaattttccgatgctaggttttcccattacaccgcgcctgcccgtcaaatcggcggagacgaaggcgaagatatgctgtccaacatcgccggtgagcaggatttcaagcaatacctgcacgcgcaagtatgcgaacacccgctttccgaccaagaagcctcctgtgtccaaatccttatcgatttccttgacgagcagggttatctgaccgacagcatcgaagacatcctcgaccatacgcccttagagtggatgttggatgaagcaatgctgaaacaagccctgactgcattgcaaaaattcgacccggcaggcgtggccgccgccgatttgaacgaatcgctgatactgcagatagaaagattgggcgaatgtgctgccaaacccgccgccctgcatatcgtccgaaacgccctcgacagcattgacggcaaccgcagccaaaccctcgcacgaataaaaaaacacctgccccaaaccgacagcggcacactcgaagccgcactcgacctcattgcttcgctcaatccctttcccgccgccggttttgcctcgtccacacccacgccgtattctgacgaggcactcgccaacctgctggctttccgcggcatggaggtttctcgccgcaccattgccaaatacagagaatcccttgagattccggcagcacacaaacgcaaaaccgcagaataa

SEQ ID NO: 38065 - DNA, 2112 bp, Neisseria meningitidis
atgaaaatatcatttcatttagctttattacccacactgattattgcttccttccctgttgctgccgccgatacgcaggacaatggtgaacattacaccgccacgctacctaccgtttccgtggtcggacagtccgacaccagcgtactcaaaggctacatcaactacgacgaagccgccgttacccgcaacggacagctcatcaaagaaacgccgcaaaccatcgatacgctcaatatccagaaaaacaaaaattacggtacgaacgatttgagttccatcctcgaaggcaatgccggcatcgacgctgcctacgatatgcgcggtgaaagcattttcctgcgcggttttcaagccgacgcatccgatatttaccgcgacggcgtgcgcgaaagcggacaagtgcgccgcagtactgccaacatcgagcgcgtggaaatcctgaaaggcccgtcttccgtgctttacggccgcaccaacggcggcggcgtcatcaacatggtcagcaaatacgccaacttcaaacaaagccgcaacatcggtgcggtttacggttcgtgggcaaaccgcagcctgaatatggacatcaacgaagtgctgaacaaaaacgtcgccatccgcctcaccggcgaagtcgggcgcgccaattcgttccgcagcggcatagacagcaaaaacgtcatggtttcgcccagcattaccgtcaaactcgacaacggcttgaagtggacggggcaatacacctacgacaatgtggagcgcacgcccgaccgcagcccaaccaagtctgtgtacgaccgcttcggattgccttaccgcatgggttttgcccacccgaacgattttgtgcaagacaagctgcaagtttggcgttccgaccttgaatacgccttcaacgacaaatggcgtgcccaatggtagctcgcccaccgcacggcggcgcaggattttgaccatttctatgcaggcagcgaaaacggcggccgaatcaaacgcaactacgcctggcagcagaccgacaacaaaaccctgtcgtccaatttcacgctaaacggcgactacaccatcggccgttttgaaaaccacctgaccgtaggcatggattacagccgcgaacaccgcaacccgaccttaggttacagccgcgcctttactgcttccatcgatccatacgaccgagcaagctggccggcttcgggcagattgcagcccgtcctcactcaaaaccgacacaaggccgattcctacggcatcttcgtgcaaaacatcttctccgccacgcccgatttgaaattcgtcctcggcggccgttacgacaaatacacctttaattccgaaaacaaactcaccggcagcagccgccaatacagcggacactcgttcagccccaacatcggcgcagtgtggaacgtaacgcccgcccacacgctctacgcctcgtataacaaaggcttcgcgccttatggcggacgcggcggctatttgagtatcgatacgttgtcttccgccgtgttcaacgccgaccccgagtacacccgccaatacgaaaccggcgttaaaagcagttggctggacgaccgcctcagcaccacattgtccgcctaccaaatcgaacgcttcaatatccgctaccgccccgatccaaaaaacaacccttatatttatgcggttagcggcaaacaccgttcgcgcggcgtggaattgtccgccatcgggcaaatcatccctaaaaaactctatctgcgcggttcgttgggcgtgatgcaggcgaaagtcgttgaagacaaagaaaatcccgaccgagtgggcatccatttgaataacaccagcaacgttaccggcaacctgtttttccgttataccccgaccgaaaacctctacggcgaaatcggcgtaaccggtacaggcaaacgctacggttacaactcaagaaataaagaagtgactacgcttccaggctttgcccgagttgatgccatgcttggctggaaccataaaaatgttaacattacctttgccgcagccaatctgctcaatcaaaaatattggcgttcggatgccatgcccggcgcgccgcgcacttatacggcgcgggttaattacagtttctaa

SEQ ID NO: 38066 - DNA, 363 bp, Neisseria meningitidis
atgaagctgccgcgcaaccgcttcagcctgctttccgcattgtggtttgccggcagcatctattcgctgctcttcaaagctgccgacaccgcgccgccgccgtttccgcatttcgacaaagcagcacaccttgccctgtttttcgcacaaatctggcttttgaccaaagcattcaaaaccggaaaacttcccatcccctaccgcagcctgatggtctttgccctctgtttcgccctcttcagcgaatgcgcgcaggcatggtttaccgcaacgagaaccggcagtttgggcgatgttcttgccgatatggcaggtacggttctcgcactctttgccgcccgcgccgccgaccgcccggactga

SEQ ID NO: 38067 - DNA, 270 bp, Neisseria meningitidis
atgtttaccacaaacgatttacgccatttcctagaaggtttggccatcctattctcaatcggctattgggacaccatgctgctgttgctttggtttctcgtccgctttgcctacaaaaaaccccggcaaaatcctttcaggcagcctgaccgccgccgctatcctgatgctgtttgtttggattattcccaaacaattctgcccgagcaaagaagaaatacaggcacaagaagagtgggacagaaaatacaaagaagccgaagccgtgtt

SEQ ID NO: 38068 - DNA, 300 bp, Neisseria meningitidis
atgacttgggtcggaggctcaggtaatgcgcaacaaagctcatattattgcgaaatttgcgaatctgcagggcttaacgatacgggaaatcctgataaatctttaggattgccaaacaatacgttcagtaatccgcctggttggggagctacaatcggagctttagcaggtagccgcatagggatgcctgaatttggtacgtttgcgagccatgccattgaaaatttcgactggtcatggtatcgacgttatagggaaattgccgaaacgattgaacgagaatattcaggcggtttgcct

SEQ ID NO: 38069 - DNA, 222 bp, Neisseria meningitidis
atgggcggcaaagtgcagcacaataaaggcaaaatacgcgacaatgctttaaaagccttagtgaaatccgatttgttccggcacaaggtggaacggaaaaggaaaggcaaaggcagctacaacaggcaggaagcgaaaaaatggcgggacggttttgatactgtcccgccatttttatgtcttaaacatggaagctttcgccgcagccgcaggagtctttga

SEQ ID NO: 38070 - DNA, 198 bp, Neisseria meningitidis
atgaccgctatgccgtctgaaccgcctttcagacggcatttcacacatcaaaacagaaaaaccgcgcccaaaatcatcatcacaagacacaacggcaaaccggatacaaaacccaacaccgccgccaaaatgccgtctgaagccgtcggcgcaaccatccttatctggggcataactttccttaaccatcccttttga

SEQ ID NO: 38071 - DNA, 204 bp, Neisseria meningitidis
atgccgtctgaagcatgtttggttttcagacggcatttccttcgcttaaaacagcgtatcggcaaccccgccctgcctgtccacggcaatctgcatctgaaaaccatctgtatcccaaaccacacccccatccctgtttccgtcatttgcaccctgtccgtattgggcaatcatcggtttttcgcttacaatagccgaatctga

SEQ ID NO: 38072 - DNA, 198 bp, Neisseria meningitidis
atgccgtctgaaaaccgcagcgcgggggtttgtggtgcattatatgccgtattgcaggacaaggcacagggcagggcggcggggtgcatcgtagcaactgtatttttgcccgacggggtgaaaaatacagttgctacacccactgataatgaaaaaagagagcaatgccgtctgaaccgcgtgttgcggcgagcataa

SEQ ID NO: 38073 - DNA, 168 bp, Neisseria meningitidis
gtgccggaacaggcacgcgcccgcccgattcaaaccgcgatgacgctttgccgccggttcggggcaggatggcggcacacgcgccgtctgccgcgtttcatttcacaccgctcttccgaaacccgaaacccgcccggtccgacgtgcggtatgaaacgcttaagctga

SEQ ID NO: 38074 - DNA, 1074 bp, Neisseria meningitidis
atgaaaatcgttttgaccacatctatggcaggcttgggcggcacggaaaccgccaccgtccgcctcggcaggctactcaggcagcacggacacgacatcatgcttgcctcttcggacggaccgttgctcaaagaggcgcaagccttgggcatacgttggcaacccgtcgatttctatcgcggcggccttttcggctacctcaaaggtatgattgcctacgcccgaatgctgcggcgcgaacaacccgacatcatcgactgccaaatggcgcgcgtcgtacccgcctgcgccattgccgccaaaatcgtttcgccgaaaaccaaaatcatctaccactcgcacggtttggacgcggcaacctaccccaaaatcgccaaactcttcgacaagctgggcgtgtacatcatcggtaactgcaaacacgaacgcgaaaaactcatccgccacggtttccccgccgaccggattgtctacgcctacaacgcactccccccccccccggaatttcctttctggaaaaccgtcaaaggctgcgtcatgctcggcacgctgtcgcgtctggacaccgtccgcgccgtgcatctgatgctggacattttcaaaaaaatggtcgaccgcgatatgcccgtacgcctgaacgtggcgggcataggcgaagaaatggacaacctcaaagcccaagccaaacgtttgggtattgaagacaaagtcaccttcctcggcggcgtgcgcgatttgaccgcctacttcaaagacgtggatattttggtgaacacgccccactgcatcggcgaccacggcgcaggtgtcggcaacaatatccttgaagccggtctctacgacacacccgtcgtgacctacaacatgggcggcatttccgaaatggtcattaccggcgaaaccggatactgcttccccttcggcgaagacgaagcgtttatcgaagccgtcgatacgctcgttaagcagcccgaattgcgcgaaaaaatgggcaaagccctgcacaaacacgtcgaaaccttatgctccgacgacgaaatctaccgcaccacaatggctgcttacgatatgtga

SEQ ID NO: 38075 - DNA, 2307 bp, Neisseria meningitidis
atgaaaccattacaaatgctccctatcgccgcgctggtcggcagtattttcggcaatccggtcttggcagcggatgaagctgcaattgaaaccacacccgttaaggcagagataaaagcagtgcgcgttaaaggtaagcacaatgcatctaccactgtggaacgagtaaaggctaaaaacattcaagagcaaatgattcgggatacacgcgatttggtgcgttattcatcagatgtcggtgtatccgatgatggtcgccgtatgaaaggctttgccatgcgcggggtggaagacaatcgtgtcggtatcagtatcgacggcgtggcattgcccagttcggaagaaaattcactttatgcacgttacggcaacttcaataattcccgtttaagcatcgataccgaattggttaagggtgtggatattacgaaaggtgcggattcatttgaaagcggcagcggctctttgggtggtaatgtgaactaccgcacgcttgatgcacgggatattgttttgccggaacaaaatttcggtgcacttcttcgcagtggttatgcaagtaaaaacagagagtgggcgaataccgcaggtttcggctatgcgggcaatgtttttgatgccgtggttttgtattcccgccgacgcgggcacgaaatgaaaagcgggggggatgtcgttgattttgtagggtttggcgaattggataagcaggatcaggcagagcgtggctcggcacgcattcatccagatccatccaaacacaataatcacagttatttggtgaaattaggctggcaaccggttgatgcacaccgttttggcttttctgttaatgggcaaaataacagcaattacacttatgaaaaaacttactccctgacaagttattggcgggaagcggacgacgtacagaaacgcagcaacattaatctgaaccacgaatggacgcccgactcttccatcctttccttgctgcgcacggacttggactatcagaagacccgcaatggggcgataaactataaaggcgatatggttcgtaccggagattggcgcacaggttatcagtatcacaacggctttatggctgatagagacgagcggaatatggataccaaatacaagcgcattaccttccgtttggacagccagcctttttcactgtggaaaggtgaacacagattatcttttaagacttttgccagtcgtcgcgactttgaaaatgtaaatgatgatttagattttaattcaacaggcaatataactggccgtaaacactacactattatgcgtcctatgaagacggatcaaatcggtttttcattgcaggataaaatcgcttttggcgacaagttatctgtaaatgcaggcgtgcgctacgaccatgagaaggtaaaaccgcaggctttcaagccagatacgccttgtctgagtacctgtgttaatgacggtaatccgtccgcaagaagttttaatacatggaacggcgttttaggtttggactacctctttaacgatacttggcgtgcagcttaccaaatcaatacggggcatcgcgtgccgacagcatcggaaatgtattttacttataccagcccttacggtaattggattgctaacccatcgttgaaagcagagcgcagtctaaaccaaactctgtcactgcgtggaaagaatgacaaaggattgctggattttagcctgtatcagacccgttaccgtaatttcttatttgaggaagaaaaaacgtatcaggtgccgaatgagtattataatgaacatagttgctattataatcctaaatattgtaaccctacgcttaccgaaatcggccaacaaatggtcaatattgataaagccagggtgaggggagttgaatttaaaggtgagttgaacctacatcaagtgatgtctgtgccggaaggttttaaagtatccggcgcattgggttatagtaaaggcaaattgtccggtgaacgcggcagtttgttgtccatccagccgctgaagttggtgcttggattcgattatgagtctcctgatgagcgttggggtattttctcccgtgtcagctatatgggcaggaaaaaagccaaagatgcccaagtaattgaacaaaagagctattgcacaagctataaactcgatccttggacaggtaaggaaacagatgattgtgctgttgccttgcagtatcgtgacgataaaatcgacttccgttggttgaataaagcggcaactgttgtggatgtattcggctactacaaaccggtaaaacgtatgacttttacgggcgggcgtttataa

SEQ ID NO: 38076 - DNA, 786 bp, Neisseria meningitidis
atgaatccgtttttgaatacagcctttaaagccgcccgccgtgccggtcagatgatgatacgcgccgcgggcaatctcgatgccgtcaaaaccgacagcaaagccttcaacgattttgtttccgatgttgaccgcaattccgaaatcatcctggttgaggctttgaaagaagcctatccgcaccacaaaatcacttgtgaagaaagcggctcccacggcaaagccgcagccgagtacgaatggattatcgatccgctcgacggcacgaccaatttccttcacggtcatccccaatacgccatctctatggcgctgctgcacaaaggcgtgttgcaagaagctttggtttacgcccccgaacgcaacgacgtatatatggcttcgcgcggcaaaggcgcgttgctcaacgaccgccgcatccgcgtttccaaccgcatcgaattgaaccgctgcctgatcggtaccggcttccctgttgtcgatcaaagcatgatggacaagtatctggtgattttgaaagatttcttggccaaaaccgccggcggccgtcgtgaaggcgcggcttctttggatttgtgtgctgtagcaacaggtcgttttgacggctttttcgagtttaacctcaaaccgtgggacattgccgcaggtgcattgattgttcaggaagcgggcggtatcgtaaccgatatgtcgggtgaagacggctggctggaaagcggcgatattgtggctgccaatcccaaagtgctggcgcaaatgttgaaaatcatttccgcacacgtttaa

SEQ ID NO: 38077 - DNA, 549 bp, Neisseria meningitidis
ttaaactggctgctgaccggcaaaggcttaccgtatcttgataaagccaggctggaaaacgctggagcattctctgtaagcagaaattctgatggaattactgacactatgggcaaccctgtcgacttgtcagagtttgtatttgtgccgcgctacaacgtagccgcagcagcagggtatggcgcaccggtcttcggcgaagagcctttgttctgcttggctttccggaaatattggattgacaactatgtgaccaaacagccggaaaaactgtctgtaattaccgttaaaggcgattcaatggagggcgtgctcaatcatggggattccattctcatcaatcacgccaaaaccgacccgcgtgacggcctatatgtcttgcgtataggcaatgacctctttgtcaaacgtgtgcaacgcataccgggcaaactgcttgtaacgtctgaaaatccacgttacgcaccgtttgaaatagattttagcaatgcccaagacgacatcgccatcataggccgtgttgagtggtatggccggagtattgattaa

SEQ ID NO: 38078 - DNA, 414 bp, Neisseria meningitidis
ttgacagaagaaatgatgaaaaagcagcggcatatcctgtgtgtcggctgcctgtatattatattgaaggtcaacgtatttcccaataccggctggatggaagcatcgaaagggatgcagggcatgtcgttcagtaccttcggatacgcggatgctccgggctatacattcagccgcattggccatactttaattttcctacttggaaagaccacagggacacgtacaactgtttccgatagttcgcataatgtatattatgttaaattatatatttgtgcaaataactccaaggcattaagctgttgtttgatgctttgccagtttgggagaaagttgtccatatgcgccataaaacgggcgttgcgatggcgttcgagcaaatgggtcagttcgtggacgacgacgtattaa

SEQ ID NO: 38079 - DNA, 246 bp, Neisseria meningitidis
atgctcaaatccatcgaactcaattcccacatccgcaaccgccttgcagcatatctgaaaggcaggggtatggattttcagacggcgatgcgggaggaaaaaggcaacaaagaaatcgcctccatcgtccacagcggtctgcccactctggtccgcaaactgtattccgaacaaaaaatgcagaagtttttttgggaaaagcgggatttgattgccgactacatcagccgccggatgcagggatag

SEQ ID NO: 38080 - DNA, 1422 bp, Neisseria meningitidis
atgctgtttgcagcagcaatatcgttgctgcaaatccccattagtcatgcgaacggtttggatgcccgtttacgcgatgatatgcaggcaaaacactacgaaccgggtggtaaataccatctgtttggtaatgctcgcggcagtgttaaaaatcgggtttacgccgtccaaacatttgatgcaactgcggtcagtcctgtactgcctattacacacgaacggacagggtttgaaggcattatcggttatgaaacccatttttcaggacacggatatgaagtacacagtccgttcgatcatcatgattcaaaaagcacttctgatttcagcggcggtgtagacggtggttttactgtttaccaacttcatcgaacagggtcggaaattcatccggaggatggatatgacgggccgcaaggcagcgattatccgccccccggaggagcaagggatatatacagctattatgtcaaaggaacttcaacaaaaacaaagactaatattgtccctcaagccccattttcagaccgttggctaaaagaaaatgccggtgccgcctctggttttttcagccgtgcggatgaagcaggaaaactgatatgggaaagcgaccccaataaaaattggtgggctaaccgtatggatgatattcgcggcatcgtccaaggtgcggttaatccttttttaatgggttttcaaggagtagggattggggcaattacagacagtgcggtaaacccggtaacctatgcggcagcacggaaaactttacagggtattcacaatttaggaaatttaagtccggaagcacaacttgcggctgcaaccgcattacaagacagtgcttttgcggtaaaagacagtatcaactctgccagacaatgggctgatgcccatccgaatataactgcaacagcccaaactgccctttccgcagcagaggccgcaggtacggtttggagaggtaaaaaagtagaacttaacccgaccaaatgggattgggttaaaaataccggctataaaaaacctgctgcccgccatatgcagactgtagatggggagatggcaggggggaatagaccgcctaaatctataacgtccaacagcaaagcagatgcttccacacaaccgtctttacaagcgcaactaattggagaacaaattagtagtgggcatgcttataacaagcatgtcataagacaacaagaatttacggatttaaatatcaattcaccagcagattttgctcggcatattgaaaatattgttagccatccaacaaatatgaaagagttacctcgcggtagaactgcgtattgggatgataaaacagggacaatagttatccgagataaaaattctgacgatggaggtacagcatttagaccaacatcaggtaaaaaatattatgatgatttatag

SEQ ID NO: 38081 - DNA, 345 bp, Neisseria meningitidis
ttgtttgtatgctttgaaaaatgtttgtttccggattttgccattcccatccggttttgcgctgtacgatgtgttttagcgcggacttgctcaaaatcggatgtggttccggtatttggggctttgattagggatgcggactttcaatatatttttctcagctacaacaacgaaggcttgatgtctgtcgggcaggtaagggagatttttgagcgtttcggcaaatataatttggttcaaacggaatatcggcgttttaaggcagataagacagaaaaccgtaatcataaggcaaattcgatattcgaatatctgcatgagacctttgcaaaaatagtctgttaa

SEQ ID NO: 38082 - DNA, 306 bp, Neisseria meningitidis
ttgaccccttgggcggatgcatatgcagatttgcgcggcaaaaccaaagtgatgacgacccagatgtgtgcttcccgcgatgtcagcaaaagcgccaaaggttggagtgtcggtatcggtctgaatgtaggcaaacagttgaccgacagcgtcggtctcgagtttgatccatactaccgtcacaaaacaatctgcaaaccccgtgagattgttttggacggcgacaaaaccaaaatgggccgctccaaatccaacgagtacggcttccgcgtaaccgcaacgttctatagtcaattaaaatcaaag

SEQ ID NO: 38083 - DNA, 267 bp, Neisseria meningitidis
atgaaagaatacaaagtcgtcatttatcaggaaagcctgttgtccagcctgtttttcggcgcggcaaaggtcaaccccgtcaatttcagcgcgttcctcaacaaacaaatcccccgaaggctggcgggtcgtaacgatggaaaaagatttgcgccgtatgctgctgtttttcaaacgcgaggcctacgtcgtcattttggagcgggatcgtgtttaagctcggcgtttatgcctgtctcggactgtttgccggctgggtgctgctgc

SEQ ID NO: 38084 - DNA, 261 bp, Neisseria meningitidis
atgccctctccccagccctcccccacgggggagggagaaggttgcagcagattttgcggttgcaggcgatttgaaaggcaacttagatttgcagctgttgtttcaggtcatctgaaaaataaaaagcagcctgcacaacctgttttccttgcagaacccttaatcccaaccgccaccacgtcctctctcccatgggagagagtcagagagagggcaacaaactgtaaggcttacacaaacagtaacccgacaacagaatga

SEQ ID NO: 38085 - DNA, 237 bp, Neisseria meningitidis
gtgcggacgtggttggttttttggttgcagcgtttgaaatacccgttgttgctttggattgcggatatgttgctgtaccggttgttgggcggcgcggaaatcgaatgcggccgttgccctgtgccgccgatgacggattggcagcattttttgccggcgatgggaacggtgtcggcttgggtggcggtgatttgggcatatctgattattgaaagtgaaaaaaacggaagatattga

SEQ ID NO: 38086 - DNA, 324 bp, Neisseria meningitidis
atgtccgcgctgctgccggctgcctgccaacacgtttcggacaggcatggcaaattccgcttccaaattctgcattgccaaaggcggcagacgggaagtaaaaaaagacgaaagcggcggcggatatgccctgtgccatttgccggacagcaggattgtcgaggagtgggaatatttccgttcacaacattgatactgcgcgatatacggcaaatattgtgggaagtttccgcttttgcgtataatgcgtcctacctgacaaattttgtcaactttatcaaaaggaataagcgatggcttccatccacgaccaaattaaagaag

SEQ ID NO: 38087 - DNA, 162 bp, Neisseria meningitidis
atgaacacaaaccaacctgccgtttacgacccgttgacacgcgcgctgcactggctgaccgttgccggcttcatcggcattctgaccaccattgtcctgtggacgatttatagtggattaacaaaaatcaggacaaggcgacgaagccgcagacagtacaaa

SEQ ID NO: 38088 - DNA, 1359 bp, Neisseria meningitidis
atgtcttccccttcaaataccaatcgtcaaacctgatccagccgattaacctatatcctgaccattgccggcgcgactgtcggtttcggcgcgacgtggcgtttcccgtatttggtcggtgaaaacggtggtggcgcgtatgtgtttttattctgtatcgcgatgctggttatcggcatcccgatgattttggtggaaaatgtcatcggacggcgcaaaggcgtgaacgcgctggatgcgttcggcggcccgatgaacggcaaacccattgccaaaatttggaaactggtcggctggatggggctcggcgcgttcggcatcatggcttattacatggtactcggcggctgggtaatcagctatatcgttaatattattggaggaaatttgaatatttccagccccgtcgacggtgtggttacaaaaggcttctttgccgaacacataaacagcccttgggaaattgcgttttatacgctgctttttgtcgccgtgaaccaatggattttggccaaaggcgttatcggcggcattgaaaaagcggcaaaatagctgatgccgctgctgtttttgttcctaatcgcgatggtcgtccgcaacgttacccttccgggcgcaatggaaggggttgctttctatctgaaacctgatttcagcaagattaccgccgaactgttcgtcttcgttttggggcaggtattttttgccctgagcctgggtttcggcgtgatgattaccttgtccagctatttggataaaaacgaaaatctggttcagacggcagttatcacggcaattaccaataccatcatcgccatacttgcgggctttatgattttcccgtcgctcttcagcttcggcgttgcccccgattccggcccgactttggtgttccaaagcttgccgattgtgttctcacatatgtgggcgagatctgtgttcgccgtgattttcttctcgctgctcctgattgccgcattgacgacttcgctgaccatttatgaagtgttgattacgaccattcaggaaaaaaccaaaatccgccgtaccgccgcgattacgattgtattagccgccatcttcattttcggcaacatcccgtccattctgagctatggttcgtggaaagacgtcgtgttcggcaaaaatattttcgatgccttcgactacatcagcggcaacatcttgtttatgctgaccgcgctcggtttcgcgctgtttgtcggttttgtgatgaaggacgaagcgaaggaagaattgctttacaaaggcaaccatacgacggtcaatatttggtttgcttatgtgaaatatcttgtgccgttggtgattttgctgatttttgtcagcaacctgttc

SEQ ID NO: 38089 - DNA, 1011 bp, Neisseria meningitidis
atgattttctccatcatcgtccctatttacaatgtggaaaaatacctccgctgctgcgtggattccgtgcttgccgaaaattttgccgattatgaaatgattttggtcgatgacggttcgccggacggctgcgggaagatttgcgacgaatatgcaggcaaatatccgcatataaaagtgattcatcaagaaaacggcgggctgtcggatgcccgcaacgccggtatccgggcggcaaaaggcgattacctaatctttttggacagcgacgactattgggccgacaccagtcgttcaaaaaacgcgcggggggggggtctctttgatttacaacaacttgcagacaaaaaggttgatttgatcctgcatccctcgtccttcaattaccgcgacatccccaaaggggcggacttttcggataatgattttgtccgccattttgaaacgctggtggaggggcggtactatatcgccaacgcgtggacaaaaatcgtcaggcgggaaataatcatcaaaaacaatctgtttttcccaaaaggatacattcacgaggatttcccgtacagtttgcaattggcgcgttttatcaagacttttgccttttacgataaccctttttaccagtaccgcgttctcggcggctctatcagccacaacatcaaatacaaaaatttcagcgatgtgctgacgcatctcgaccggggtgtggattttttagtcgaaaacaaaaattcccccatctacggcggtttgcaaaaatttgtcttcgacaatatcggctatctgaggtctatattggtaaggctttatttttccaaaaacattatcctcatctaccggaaatatttttcatttaaagaaaaatgcagaaagatattcggcgcgaaggcaatccgtccggtttttatcgggaagaccgcattcatcataggattgccgatattgcgcctgctcgtaccgcctatgctgtacccggcaatcaaggccgtttatcagaaatttttttcggaa

SEQ ID NO: 38090 - DNA, 402 bp, Neisseria meningitidis
atggcaaaccgatttcggcagcgcaaatccgcataccgccgccttagcggcaagccgttgttttcagacggcattgcgggcaatccttgccgcgggcgaaaaaccttgtcctataatttatcccgcttcaaaatcagcatacggtcggaaatgcaaaaaatatctttcaatttgttgaaacctgcaaccccgaaaatagggaaacgccgccccggtttgaacggtgcgccgcatattccgatgccctccccccgataccttccggcaagcccagaaatgcccggcaacaatatccatccggcaaaaatccgaaacaacacacccggtggcaggcagagtcaaaccgccccgcaaagcatccgccatcagaaaaacaaaccgcctccgagggcttcatcctaa

SEQ ID NO: 38091 - DNA, 657 bp, Neisseria meningitidis
atgataaaaaatctttataaattgataaattatgcggctttgattggtttcgccccaaatatagtttttgcttggcctatgtttgttgaccccccttcttaccaaaacatccatgtacggagttggaaagcacggcgagattccggcatagtaaaacaagatttggatttttcttgcggcgcggcttcgattgccacgttactgaataatttttatggcagacattattctgaagcggaaatcttagacaaaatggataaaacccaaatgcgtgcttcttttgatgatatgcaacgcataatgcccgaactgggttttgaagcacaaggttatgctttgccatttgaacagttggtacaactaaaaattcctgtaattgtgtatttaaaataccgtaaaaacaaccatttttcggtattgaacggtattaacggagaaactgttttgctggctgatccatcgctggggcacgtctcaatgagcaaatcacaattcttgagcgcatggaaaacacgtgatggcgaaatggaaggaaaaattttagccatcgtgccaaaaaatactgattttgttagaaatcagatgttttttaataagaatcccgttcgtcaaacacgttttacggtagaacaaatccaaatgcggcaaaaacgataa

SEQ ID NO: 38092 - DNA, 1137 bp, Neisseria meningitidis
atggatttaagtatcgtagttcccatttataatgtcgaaagttatttggaagcgtgtttaagttccatagaacctatattaagtaatgaaaatgtcgaacttatccttgtgaatgacgggtcaaaagacggaagtgaagatatatgttataaatatatagataaaattcaaacaacaaacaacaaacaacaaacaacaaacaacaaacaacaaacaacaaacaacaaacaacaaacaacaaacaacaaacaacaaacaacaaacaacaaacaacaaacaacaaacaacaaacaacaaacaacaaacaacaaacaacaaacaacaaacaacaaacaccggacaccaaatatcaaatatatatatcaggataaccaaggattgtcagaggcgagaaataccggaataaaaaattcaaacggaaaatatatagtctttattgattcggatgattttattaattgtcaggtcttgctggattttcttagtaaagatgatattgatatgccggatgtggtttttttaaatgcggttaaatatgataagggaagtgtttcatattttggcgaagattatcagcctgaaaaaatactcaatcaatccaaagtcgaagttttgaaaggattatgccgatttagaaaatttccgggttcggcgtggaataagattataaaaagagaattgatcatcaaagaaaaactattttttgaaaaggggatttattctgaagatatcgaatggtcaatgaggttatttaatgcggcaacaacttttttttatttggacggttgttattactattatcggcagggaagaaaagattctattacgggaactgtttcggaaaaaagtataaagtcattattatatattttggagaaaaatgcggaaatggaatttgatagggatatatcaagttatctttattcctttctttcctacgaatatctcgttttgctttttatcatgacgagtaaaaatatagagtgtgatgctgatataaaaagaagggcgtatcatttaaggtttatgctgttaaagtccaataaattgatatataagctgatattcccgataatcacattattcggggtcgatattacaggcaggattttaaaagtaatcagagggaatgtttaa

SEQ ID NO: 38093 - DNA, 516 bp, Neisseria meningitidis
atgccgtctgaagccgttcagacggcatttttaaaagacaagaacaccatgaccgatacggatacccaagccgaccgcttcgaacagatgatgtggcaggcggtagacaaactttttgaacagcatgacggcaaactcgaaagcatggacggacgtgaacaggagctggttttgatttggcgggcggaagccgacatcggcaacggcggcatactgcaatttgtctgcaattggggttttcccgccgccgaaaagacttgttccgttctgaaaaaatgcgcgatacacagcgcaatgctgatccatcgggcggcagacgcattgagaaaagaaatccgccacctccaatcggaaggtaaaaacctgaaagaaatgtgggatataacaaaacatctcgacaacaaaaccgcctcactgccgaacagtctggatgaacaatattggcaagaccccgacaaactgtatctgccgggatggcaatactattccggcaaccctgttcagacgctgttttaa

SEQ ID NO: 38094 - DNA, 3090 bp, Neisseria meningitidis
atgaatcaaaatcatttttcacttaaaattctgaccgttatgctgttatcggcttacggtggttcttttgcagacggtgttgtgcctgtttcagacggcaataccgtcagtctggatacggtcaatgtacgcggctctcatgctctgtcgggcaagaccgagaagacccgttcttatacgatagatcggatgtccaccgccacaggtatgaggattgcgggcaaggatacgccgcagtcggtcagcgtcatcacgcgcagccgccttgacgataaggcggtgcatacgcttgaagaggcaatgaaaaacacgacgggtgtcaacgttgtgcgcgattcaggcttgcagacgcggtttttgtcacgcggtttctatattgatcagattggtgaagacggtattaccgtcaatgttgcaggccgttcgggatatacggcgaaaatcgacgtgtctccgagtaccgatttggcggtttatgaccatattgaagttgtacggggtgcaacggggttgacccaatccaattcagagccgggtggaaccgtcaatttgatccgtaagcgacctaccgcttctttcaaacataccggagagctgaccgccgaccatcgcggcagccggcgtgcagtgttggatgtttcaggcagcctgaataaggcgaataccttacgcggaaggttggtgggtgcggaagagtataaaaaatcgtttaaagaccgcgtttggggcaggaaacatatggtttacggcattgccgaagccgatgcgggcgacagcagtgtgcttactttgggcggcatgtatcagaagagtagggaggttcctgatttttcgggcattattttgtcctgtgaaaatcagaaaactgccccgttcagttcaacgcctgcctgcaaccggcctttgcaactgccgcgcaacacttatttgggggaggattggtcgcggttgagtgctgacaaatacaaccttttctcaggtttcaaacatgtgtttgacaacggttggcagctcaatgccgaagtgtcttataccaagaatgaatccgatgcgaaggtggggcagttttttctgaaaaacgaacatgcggcgggtttgtcgggtgaggatgcggtaggctttttgactgaaaaaaacgaagtcatcccgttcgagccgaaagataaggcattggagaaactgaaagcatatcgtgatgaaaccgccaaggaataccgggagcgcaaagacgattttgttaaaaaccgtttcgataatactgctttcgaacagtatcgcagccgccgtgccgcagaacgcaaagccggttttgacgagtgtatgagtgccccttttgcgctggactttatctgtcaaggttcttggggggatccgggcgttgatgccgacaaggcggaatttgtcgataaagcccttgcgaaggagggcatctttaataatgcggcgcaacgttttccaaacagcctgtatgactcttcctttaatcgtaaggctaccgccaaccgacgatacagttatatgccgttgcggcataccaaagacgaccgccaatggggaatcaaacttgacctgaccggcacatatgggctgttcgggcgggaacacgatttctttgtcggctatgcctacggcgatgaaaagatacgttccgaatatctggaaatctacgaacgccgccacagagtacgtccgaatacgggggcaacgcacggcgtgtatgcgggaagttgtcaggaggagccggacggcgatttgtcgtctcctttggtcagggggcataaagaacccgattggaaggcgtacgatgaaaaaggcaaccgtaccgtttatgccgaagaatgcaggaacgccaagaaaataaaaaccgagcccaagctcgatgccgaaggcaaacaggtatattactatgacgaatacagcggcagccggacaccggtatatgtcgatgtatatgagctggacgaaaaaggcaacaagattcaggagaccaatcccgacggctcgcctgcctttaccggtttttccggtacggtgccggtttggaaaaccgtcaaagtggccgacgatcatgttcctgcgctgtataactacgccaaatacctcaacaccaacaaaacccattcgctgactgccggcacgcgtttcaacgtaaccggccgactgcatcttttgggcgggctgcactacacgcgctatgaaacctcgcaaaccaaagatatgcctgtccgctatgggcagccggcaagcgattttcagacggcatcgagcattaaggcggatcaggaccattatacggccaagatgcaaggtcataaattgacgccctatgcaggcattacctatgatttgacaccgcaacagagtatttacggaagttataccaaaatcttcaaacagcaggataatgtcgatgtcagtgccaaaaccgttttaccgcctttggtcggcacaaactatgaggtaggctggaaaggcgcgttcttgcaaggacggctgaatgcttcgttcgcattgttttacctcgaacagaaaaaccgcacggtcgtcgattttggctatgttcccggagcaggcggcaagcaggggtcgttccaaaccgttgccaaaccgataggcaaagtggtcagcaggggtgcggaattcgagttgtcgggtgagttgaacgaagattggaaagtctttgcgggttacacctacaacaagagccgctacaaaaacgccgccgaagtcaacgccgaacgcctcgccaaaaacacaggcgcagacccgtacaacttcagcaatttcacacccgtgcacatattccgtttcggaacgagcttccatataccgaatacggggctgaccgtcggcggcggcgtgtccgcacaaagcggcacaagcagcctgtacaacatccgtcagggcggctacgggctgatagacggtttcgtccgttacgaattgggcaaacacgccaaattgagcctcatcggtacgaacttaaacggacgcacttattttgagaacaactacaaccgtacgcgcggcgcaaacaacttctatggagagccgcgcactgtcagcatgaaactggattggcagttttaa

SEQ ID NO: 38095 - DNA, 1164 bp, Neisseria meningitidis
atgaacatcaccattgttgccccctactgttcgctgccgtccgaaccgtatttcaaccgcttttggtatctggcagaacgattgtcgcaatcgcacgacgtgttgctgattaccagccgtttccgccactacgacaaatccttcagacggcatgaagatgctgccgccacttcaaacggcaggctgcgcgtcaagctgctggacgaacctggctaccgaaaaaacgtctccctcgcccgcgtcgccagccaccgcgtattcgtccgcaatttggcacgctggctgcacagcccgcaggcggcggaacaggacatcgtctattctgcctatccgctgatggcgaccaacctgctgttgggcaaacacaaagcgcgtttgggctacaaactgattgtcgatgtgcaggacgtatggccggagtctttctcctcggtcgtaccatttttgaaaaaagtaccgcacaagctgctgccctttgcttcacgcgccaaccgtgcctaccgctgcgccgacgcgctggttgccgtatcgcagacttatctcgaccgcgccaaagaagccaatccgaacgtacccggcgaagccgtctatatcggtacggattttgccgccatcgcccccccccgcgtccgctccaaaaccacccgccttttctacttgggaacgctcagttacagctacgacgtggaaaccgtgtgcaaaggtgttcggaaacttttagacgacggcgaaaacgtcgaattgcacattatgggcggaggacccgatttggagaaactcaaacaatatgaaaatcgcgccatcaagttttacggttatttaccctattctgaaatgatgtcgattgccaaaggctgcgacattgccgtcaacgccatccatagccacgccatgcagtcggttaccaacaaactctccgactatatggctttgcaaaaaccgattctgaacagccagaccaatgccgaagtccttagcctcttgaacctgctgccgcacgaaaactaccgttccggcgacgtggacagcttcgttcaagccgccaaagatattttgaaacgcaaaaacgaccccgttcagtccgatgaaatcgtccgccgcttcaggcgcgacatttcctatcggaaaatcgtcaacctgattgaaagattggcaaatgagtaa

SEQ ID NO: 38096 - DNA, 1293 bp, Neisseria meningitidis
atgcagttttcagcattcggcgaaaaattcacgcaacacagcggcatcctccaactgatggacgacctcggcgacgcgctcaaaagcgacaaacccgtcaacatgctcggcggcggcaatccggcgcgcattccggaaatcgatcgggcgttcgccgacatattctccaagctggcggcggaacacgccgtcgagaacatcggcaactactccaacccccaaggcgatgccgcgctgattgacgcgctgaccgccttcctcaaccgcgaatacggctggaacctgaccgccggcaatatcgcgctgaccaacggttcgcaaaacgcgtttttctatttgttcaacctcttcggcggcaaattcaagctttcagacggcacatccgcagaaaaagccatcctgctgccgctcgcgcccgaatacatcggctatgccgacgtacatatcgaaggacggcacttcgtttccgtcaaacccaaaatcgaaaacgtcgaacacgaaggcgaaaccggcttcttcaaataccgcgtggactttgacgcactggaaaacctgcccgagctgaaagaaggcaaaatcggcgcaatctgttgttcgcgcccgaccaacccgaccggcaatgtgctgaccgacggcgaaatggcgcgtttggacgctttggcgcaaaaacacggcattccgctgattatcgacaacgcctacggaatgccgttccccaacatcatttacagcgacgttacgctgaattggcacgaaaacatcatcctctgcttcagcctttccaaagtcggcttaccgggcgtgcgcaccggcatcatcgtcgccgcgcccgaagtcgtcaaagccgtcagcagcctgaacgcgattgtaaaccttgcccccacgcgcttcggcgcggccatcgccgccccgctactggaaagcggcgagatgaaacggcttgccgaccaagtcatccggccgttttaccgcaatcaggcgcaaaccgccgtctcgctgctcaagcgggagctgggcgcgtacccgatgaaaatccacaaacccgaaggcgcgattttcctgtggctctggtttgaaaacctgcccgtttcttcgcaaaccctgtacgaaatgctcaaagccgaaggcacgctgattattccgggcgagcatttcttcgtcggcatcgacacgcaggattacccgcacgcaggcgagtgcatccgcatgagcatcgcgcaggacgctcaaacgctggaaaaaggcattgccgccatcggtaaaaccgtccgaaaactgtacgacaacgtttaa

SEQ ID NO: 38097 - DNA, 1296 bp, Neisseria meningitidis
atgcccgcgcctgatttgggatttgccttaagtctgccgccaaaaaaggcaatcgagtggctggaaagtaaaaaggttacggcggagagctaccgcaatctgacagcctccgaaattgccaaagtctatacgattgcccgcatgaccgacttggatatgctcaacgacatcaaaacttcgatggttgaatcggcaaaaagtggacagtcgtttgacgattggcgaaaaggtatcttgaatctgctcagcaacaagggctggctgcatccgaacgggcataacggtaaggatatcatcgacccagccaccggcgaggtattcggttcgccgcggaggttggagacgatttaccgtaccaacatgcaaactgcctacaacgccggtcaatatcaaggatatatggcaaatattgatgcacgaccttattggatgtatgacgcggtaggcgacagccgcacccgtccggcgcattcggcaatagacgggctggtgtaccgctacgacgacccgttttgggcaacgttttacccgcccaacggctacaactgccgctgctcggtcatcgcgctgtcggagcgggatgtggaacgccaggggcggattgttgggcaaagcacggcggacaatctggtcgagacccataaaatctacaacaaaaaaggcgacagctacccgacgactgcctacaaagccccggacggcagcctctacacagctgacaaaggcttcggctacaacgccgggcgaatgaactaccgccccgatttagacaagtacgaccgtgcgttggcgcatcaatttgccaaagcggaaatgggtggtgcggattttaaaaccagctttaaacagcttgaaaaagagttttatgaagtcaagcaacgtttggatattgatggcaagcccgataaagagcagaaaatcaaaatccgaaatgcgctatcaagacagcttaaatttgctgcgggtgtattgagcaaggaaatgcaagaactggcaggtatgactcgagcgacggtgtggctgtctgatgatacattggtcaaacaggtggacagccgtgaggggcagaatttcgatgactcctactatgcttttttgccggatatgctgcaaaaccctgaacatgtcatccgcgacaatcgtgaattgattttcacagctcgctataaaggctcggcattgtgggcagttttaaaatatattaaggaggtggatgagatttatctacagtcgtaccgaatcagtaacgacaaagagattgccaaatttatggcgaagaagaaagtattgaaatag

SEQ ID NO: 38098 - DNA, 516 bp, Neisseria meningitidis
atgaaacgcgccaaaaaataccctttcttaacgttgcagcggcaacgtttccatttgaactttgaaaacgcctcttccgccgccggcatccccgccgaacgtgatttctaccgctgggcatggtctgccttgaaaaatgaataccgccgcgccgacatcagcctgattcttctggacgaagaagaagcccgagcctacaaccgcgactaccgcggcaaagattacgccaccaatgtattgagtttcgcgctcaacgaaggcgaaaccctgcccggtcaagtttcggaaaaactgtacggcgatttgattatctgcccgcaagtcgttttaaaagaagccgccgaacaaggcaaaacgcccgaacggcattttgcccacttaaccatacacggcgttttgcacctgatgggctacgaccacatcgaagacgatgaagccgaaataatggaagccgaagaaatccgcctgatgcgggcggcaggcttccccaacccctaccaagaggacggacattaa

SEQ ID NO: 38099 - DNA, 2118 bp, Neisseria meningitidis
atgggcaaagccaacgcctttaccgcgccgattaccgtcgtcaattacgacgaacaagccctaaacaacaccgaagcgcgtactttggtggatgccgtagcgaaaaaagacgcttccgtttggcagttcggcggcgaaagcaacacgctgaccggactgtatttcagaggttatcagcttgactcgcgccaattcagcgtcaacggtttggcaggtatgtacggcacgcaaggcacggccagcgtgcaagttggatcggcacaactgattaaaggcgcatccactgccgtaaacggcatggaccctgaaggtgcggtatccggttccgtcaatatcgaaaccaaaaaagccgccgatgaaggcaaccgcaaaatcggtttgggctggttcagtaacaaccgcgcccaaggtacgttcgacttgggccaacgtttcggcgaaaacaaagcattcggcgtgcgcgccaacggcaaactgcgccacggcgacaccccgcgccacggttacagcgaagacaacaaagaatttgcggtaaatgccgattatcgcggcgaaacactgcgcgtagcgttcgattccatctacgcaaaacgcaaaaccaacggcggccgcgcgcgtatgcaggatattcaaaacgccggcggacgcttgtttggcgcgcccgatggtaaaaccaacctgctgccttcttggaactggcaaaataccgccggccaaaccaatatgcttacgtttgaatgggatgcgtttgataatgcacagattacaggcggtatcggctacaacaaggcacgctattacggcacgctgatttccccgaccgtatgtttgaatgctaccagcacttgtaccgatatgcaaaacacaaacgccagcggcaaagtaacggcacgcaactatgactacaataccggtactgcgcgcctgaccgaccaatatttccgcacattgagtatgaacctgaccgcacgcggcgaatttgaaaccggcccggtaacacataactggagtatggctttcgaccgcgttatccgccagcggaaaaccataaacggcagcgggaacggcaacagcaagatagaagtgaaggcaaacgaaaatattgcgaatcaattggcatcgtttacagccgactatcccaattcttgggagaactctgccaacttggatgccaatatcaaagtcaacagcctggctttgtccgacaccttgggcttcgtggataacaaataccgcctgactttgggcggacgtttccaaacagtcgaatataccgacaaaaaatcacagagcggcgatgccaaacgtttcagcccgatgctgatggcggcgtgggtgccgcaacctgatttggttgtgtacggcaactatatggaagacttggagcctgccgacatcaaaaccgatgattccggcgaaacgacaatggcgaaaccgcgtgtcagccgccagtttgaagtgggcgtgcgtaaaaactggggcaatttcgtaaccacgttaaacgcgttccaaatcaaacgcccggactggcgcggtcatacaactaccaagacaacaaaaggggtaacaacaacgctgacctatggcaacaattccgatttcgcccgctataaggcgcaaggcggcgtagccggcgacgagcaaggtatggaacgcaatcgcggtatcgagttcaatgcctatgctaacctgttaaacaaaaccctgcgtccgactttgggcctgatgtatctgcaatcgaccgtgaaagagtatccaaattcacgcgatatgctggttaacggcgtacaagtcgccaatccgcgcgtaattgccaaagcaggtttggaatgggatacaccgtttgccaaaggattgactttaaacggtaatgtttcgtatttcggcaagtcttaccaagacacgcaaaaacaatacgccttcccgtcctataccttgattgacgtaggcgcgcgctacaaaaccaagctcggcaaaaatactttgaccgtcagcagctcggtggaaaacctgttcaacaaaaactattggcaggtacagcgcggccaatacgaccgcagcttcgccgtcgtcggtatgccgcgcacttactggctgaaggcggaattggatttctga

SEQ ID NO: 38100 - DNA, 351 bp, Neisseria meningitidis
gtgattacattgcgcatcgtgtgggcggttgccaaccgcgccaagcgtccgcaaagcgacagcaaggctgcggcggcaggccacggcattctgtatctgctcatgcttgctgttcccgttatcggcatgatccgccaatacggcagcggccgcggcccgttgaaagtgttcggcgttgaagtgatgcaaggttcgccggaaaaaatcgagtggatggcaaacttgggcaacacgttccacggcaatttgggcttgctgctgtttgccgccgtcgccggacacgtcgccatggtcgtcgcccaccgtgttcagggtagagatgttctgtgccgcatgacgggtcgtgtccgc

SEQ ID NO: 38101 - DNA, 996 bp, Neisseria meningitidis
atgagccatgaaacagaaaatttttgtcctttataccggcggcaccatcggcatgacgcaagcagcgaaggcctgcgccccgataccgcgctggtcgggcaggcactcgcgccgttttcaaacggcatggatttcgattggcacgtttgtgggacgctgattgattcttccgccgtccaactgcaaaactggtgcgcttggctggacatcattgccaccgcgctgccgcagtacgacggcgttttggtgctgcacggtacggacacgctcgcctataccgccaatctgttcgccctcgcgctgcagggtttggacaagccaatcgtcctgaccggttcccaatggccgtacaacgccgtgggcagcgacgcgccgcgcaatctggcgactgccgttgccgcattcccactcggattgaagcagacgcttattgcctttgacggcaaactttatcccgccgtcggcagcagcaaagtcagcaccgaaaccgccgccggtttcgacaatccgcatttcggcgcactggcggagtgggacgaaacccagggctggcacaatgtccgcatcccgaatcaggacacggcagatgtttcagacggcctcaaaatccgttatcccgacccgcaggcaaaaatcgccgtccgcacgcttatccccggctttgccgtccaagaacttgccgacggactcggacagcttcccgcccacgcccttatcctgcaaagttacggacacggcaacacgcccgcagacgaaggctttatccgcgctgtccgagacttcacgcggcaaggaaaattgttgctcaacatcagccaagtccgacaaggcagaactgccgccgtttacgcgcaaggcaatgcgttccgcaactcgggcatcatcaacggcggcaaatgcaacctcgaaaccgccaccgcgctgatgaccctcgccgtatcgcaaggctggggcgcggaagatgtagaaaaagagttggcaagactgaagttatag

SEQ ID NO: 38102 - DNA, 612 bp, Neisseria meningitidis
atgaacttcacccgactgctcaaccaagtcttaagcacggttcaaaaaggcaacaccttctccgacagcccgctcaattcattcggcggaggcgcgctggttgccggtgtcgcctccatgctgctgaacggtaaaaaccgcaaaaccatcaccaaaatcggttcgaccgccgctttgggctacctcgcctaccggggctatcagatgtggcagcaaaacaaagggcgggcaaccgtaacacaaagcgatttccaacctgccggagaaaccgaagaaacatacagccgcaccgtattgcgcaccatgatagccgccgccgcttcagacggcatgatagacgaagccgaacgccggactatcgaacaggaaagcggcacagaccccgaaactgctgcatggctcgccgccgaataccgcctgcccgcaagcatcgaagacatcgccgccgccgtcggcaacgatgaggcgttggcggcggaggcctatctggcggcaagactggtatgtgccgatttgtcgcggaaagaaaccgtcttcctcgcccgcctgtcgcaggctttggaactggatgacaatctggtggaaaacttggaaaggcaattggggttttga

SEQ ID NO: 38103 - DNA, 1527 bp, Neisseria meningitidis
atgacactgaaagcaagcaagcaagcaagcaagcaagcaagcaagcaagcaagcaagcaagcaagcaagcaagcaagcaagcaagcaagcaagcggtcgggttgtaatacatcacagactagtctcaacaacatcttcaataaaaaattacacgtcaaaatcgaaaacaaatcccacgtcgccggacaggtgttggaactgaccaagatgacgctgaaagattccctttgggaaccgcgccgccattccgacatccatatgctggaaacttccgataatgcccgcatccgcctgaacacgaaagatgaaaaactgaccgtccataaagcgtatcagggcggcgcggatttcctgttcggctacgacgtgcgggagtcggacaaacccgccctgacctttgaagacaaagtcagcggaaaatccggcgtggttttggaacgccggccggaaaatctgaaaacgctcgacgggcgcaaactgattgcggcggaaaaggcagactctaattcgtttgcgtttaaacaaaattaccggcagggactgtacgaattattgctcaagcaatgcgaaggcggattttgcttgggcgtgcagcgtttggctatccccgaggcggaagcggttttatatgcccaacaggcttatgcggcaaatactttgttcgggctgcgtgccgccgacaggggcgacgacgtgtatgccgccgatccgtcccgtcaaaaattgtggctgcgcttcatcggcggccggtcgcatcaaaatatacggggcggcgcggctgcggacgggcggcgcaaaggcgtgcaaatcggcggcgaggtgtttgtacggcaaaatgaaggcagccgactggcaatcggcgtgatgggcggcagggccggccagcacgcatcagtcaacggcaaaggcggtgcggcaggcagttatttgtatggttatggcgggggtgtttatgctgcgtggcatcagttgcgcgataaacaaacgggtgcgtatttggacggctggttgcaataccaacgtttcaaacaccgcatcaatgatgaaaaccgtgcggaacgctacaaaaccaaaggttggacggcttctgtcgaaggcggctacaacgcgcttgtggcggaaggcattgtcggaaaaggcaataatgtgcggttttacctacaaccgcaggcgcagtttacctacttgggcgtaaacggcggctttaccgacagcgaggggacggcggtcggactgctcggcagcggtcagtggcaaagccgcgccggcattcgggcaaaaacccgttttgctttgcgtaatggtgtcaatcttcagccttttgccgcttttaatgttttgcacaggtcaaaatctttcggcgtggaaatggacggcgaaaaacagacgctggcaggcaggacggcactcgaagggcggttcggcattgaagccggttggaaaggccatatgtccgcacgcatcggatacggcaaaaggacggacggcgacaaagaagccgcattgtcgctcaaatggctgttttga

SEQ ID NO: 38104 - DNA, 1371 bp, Neisseria meningitidis
atgccgcaaaacactttaaacatcgttatcctcgccgccggcaaaggcacgcgcatgtattccaaaatgcccaaagtgctgcaccgcatcggcggcaagcccatgctcgggcgcgttatcgacaccgccgccgcgctgaatccgcaaaacatctgcgtcgtcatcgggcacggcaaagaccaagttttaaacgctgtcaaacgcgatgtcgtttgggttgaacaaaccgaacagctcggtaccggccacgccgtcaaaaccgccctgccccaccttgccgccgaaggccgcacgctggtgttgtacggcgacgttcctttaattgacgttgaaaccctcgaaaccctgctcgaagccgcaggcaacgaagtcgggctgttgaccgacgtgcccgccgacccgtcaggtttggggcgcatcatccgcgacggcagcggcagcgtaaccgccattgtcgaagaaaaagacgccgacgccgcccaaaaagccgtgaaagaaatcaataccggcattttggttctgcccaacgccaaactggaaaactggctgaacagcctctccagcaacaatgctcaaggcgaatattatttaaccgacctcattgccaaagccgttgccgacggtattaaagttcatcccgtccaagtccgcgcctcccacctcgccgccggcgtgaacaacaaacgccagctcgccgaactcgaacgcatcttccaaaccgaacaggcgcaagaattgctcaaagcaggcgtaaccctgcgcgatccggcacgtttcgatttacgaggccgtctgaaacacggacaggatgtcgtaattgatgtgaactgtatctttgaaggcgaagtcgaactcggcgacaacgtcgaaatcggcgcaaactgcgtcatcaaaaacgccaaaatcggcgcaaacagcaaaatcgcccccttctcccacctcgaaagctgcgaagtcggcgaaaacaaccgaatcggcccctatgcccgcctgcgtccgcaagccaaactagccgccgacgtacacgtcggcaacttcgtcgaaatcaaaaacgccgccatcggcaaaggcaccaaagccaaccacctcacctacattggtgatgccgaagtcggcagcaaaaccaacttcggcgcaggtacgattattgccaactacgacggtgtgcacaaacacaaaaccgttatcggcgacgaagtccgcatcggttcaaactgcgtcctagtcgcccccgttaccctcggcaacaaagtaaccacaggcgcaggcagcacgattacccgcaatatcgaagacaacaaactcgccctcgcccgcgcccgccaaaccgtcatcgaaggctggatgcggcctgaaaaagacaagcaataa

SEQ ID NO: 38105 - DNA, 510 bp, Neisseria meningitidis
atgaatccgtttgaaacccaaagcgttacctttgccgaaccgattgaaatgctgtatgcctgccacggcaaagtacgccgtttttgcggccaagtcgcgatgctgtcggactacatcgccgaaaacggctgcaatcagcttgttttgcaaaccatccgccaaatcgcccagtatttcaacgttgccgcgccgctgcaccatgaagacgaagaagaaaacttcttcccgctgctgctgcaatatgcgccgcaagcccaagaaagcgtggacgagcttttgcgccaacatatcgggctgcacgacaactgggcggctgtttccgccgaatttgccaaactcgaagcagacaacgcttatgtccccgatgaggaagcgttcaaacgttttgtggcgggatatgatgttcatttggcgattgaagagccgctgtttgatatgggcaacacctttatcccaaaagaaaaactgaccgaaatcggcgaaattatggcggcgcgccggcgcaaataa

SEQ ID NO: 38106 - DNA, 1110 bp, Neisseria meningitidis
atgttttcggacacagatatatccatgatggaaaacgccctccgacttgccgctttggggcgtttttccacttcgcccaatccgcgcgtcggctgcgttatcgcacacggcagccaaattgtcgggcaaggcttccacgtcaaagcgggcgaaccgcacgccgaagtccacgccctgcatcaggcgggggaaatggcaaaaggcgcgaccgcctttgttaccctcgaaccgtgcagccattacgggcgtaccccgccctgtgccgaagctctgctccgttccggcgtaacacgcgtcgttgccgccatgcgcgaccccaacccgctggttgccggcaaagggcttgccatgctcgaagcagcaggcatcaagacggaatgcggtttactcgaacatcaggcaagggaactcaaccgaggcttcctgtcgcgcatcgaacgccgccgccccttcgtccgcctcaaatgcgccgtttcgctggacggcaaaaccgccctttcagacggcagcagcttttggattaccggcgaagacgcgcgtgccgacgtacaggttttgcgtgccgaaagctgcgcggtgctgaccggcatcggcacggtgttggcggacaatccccggctcaacgtccgcgcttttccaactttgcgccaacccgcacgcatcgttttagacagccgcctgcgcctgcccttggacagccaccttctgaccgacggacaatctccaacctacatcgccaccttggaacgcgatgaagataaactccgcccctatcgggaacacgcacacatccgcatcctgatgccgtctgaaacggcagacggcaaaatcgacctgcaccacctgatgcgcctccttgccgacgaaggtttcggcgaaatcatggtcgaagcaggctccgaactcacatccgcatttttggcagaaaatctggcagacgaaatcgtcctgtaccgttcgcccaaaatcctcggcagcggcaaagacctgttttccctgctcgaaaaccgcgccgccctttccgcaccgcccttgtggacacccgtttcaagcgaaatcctcggacacgacatcaaaaccgtgttccgaaaaaacggcaacgccttttaa

SEQ ID NO: 38107 - DNA, 513 bp, Neisseria meningitidis
atgtttgaacaagaagacgaatgggtcagcaaaacccaaatgaaaaagcagatgaacggtttgcaggatttgggtatggagctgaccaagctctcaagcgacacgttgaaaaaaatcggcttggacgaagatttgtacgaagccatcgttacctataaaaaaatcacatccaacggcgcgctcaagcggcaggcgcaatttatcggcagactgatgcgcgataccgatcccgcgcccatcgaggcatttcttgccaagctgcgcggcgacgatgcggcgcacaacgcctttttgcaacgtgtggagcggacgcggatggagctgctggcggacgacggcgcgctgacgcagtttatgtccgattttccaaacgccgatgcgggcaagctgaggacgctcatccgcaataccaaaaaagaacaggaacagaacaaaccgccgaaaaatttccgcgccctgtttcaagagttgaaaaccgttatggaaagccaaggcggaacaggggaagcctag

SEQ ID NO: 38108 - DNA, 1095 bp, Neisseria meningitidis
atgaaaaccaatctgctcaactacgaccttcaagggctgacccgacattttgccgatatgggcgaaaaacccttccgtgccaaacaggttatgcgttggatgcaccaatccggcgcgcaaaattttaacgaaatgaccgatttggcaaaatcgttgcgccataaactgaacgaacaggcaggcatcgaaattcccaagctgatgatgtctcaaaaatcttcagacggcactcgaaaatggcttttggatgtcggtacgggcaacggggtggaaaccgtcttcatccccgaatcggatcgcggcacgctctgcatttcctcacaagtcggctgcgctttggaatgtacattttgttcgaccggccggcagggcttcaaccgcaatttgactgctgccgaaatcatcgggcaattgtggtgggcaaacaaagcgatgggtgttacaccgaaaaacgaacgcgtaatttccaatgtagtgatgatgggtatgggcgagccgatggcgaacttcgacaatgtcgttaccgccttaagcatcatgctggacgaccacggctacggtttgagccgccgccgcgtaaccgtttccacttcgggtatggttccccaaatggacaggttgcgcgatgtcatgccggtggctttggcggtttccctccacgcttccaatgacgaagtccgcaaccaaatcgtaccgttgaacaaaaaatatcccttgaaagaattgatggctgcatgccaacgctatctagtcaaagcacccagggatttcatcactttcgaatacgtcatgttggacggaataaacgataaggcgcaacatgcgcgcgaactgatcgaactggtcaaagatgttccctgcaagttcaatctgattccgttcaatccctttccaaactctggatacgaacgctccagcaatgagaacatccgtgtgttccgcgatattttgcagcaggcaggatttgtcgttaccgtacgaaaaacgcgcggcgacgacatcgatgccgcctgcggacagttggcggggcaggttcaggataaaacgcgccgccaacaaaaatggcagcagattttaatcggacaacaggggtaa

SEQ ID NO: 38109 - DNA, 975 bp, Neisseria meningitidis
atgccgtctgaaaaaaatatcggttttatggcaggaagcagccgtccgttgtgggttgcctttgcgctgttgctggtttcctgcatcctgtttatgacgctcaacgtcaaaggcgattgggactttgtactgcacctgcgtctgaccaaacttgccgcgctgctgatggtcgcctatgcggtcggcgtgtccacgcaactcttccaaacgctgaccaacaatccgattctgaccccttcaattttgggtttcgattcgctgtatgtgtttttgcagaccttgctggtgtttacgttcggcggcgtgggctatgcttccctgccgttgacgggcaaattcggctttgaacttgccgttatgatgggcggctcgctgctgctgttttacacgctcatccgtcagggcggacgcgatttgccgcgtatgattttaatcggcgtgattttcgggattttgttccgcagcctgtcgtcgctgctttcgcgcatgatcgaccccgaagaatttacggcggcgcaggcgaatatgtttgccggattcaataccgtccacagcgagcttttgggcataggcgcgctgattctgctcgtcagcgcggcggtcgtttggcgcgaacgctaccgcttggacgtacaccttttggggcgcgaccaagccgtcaatttgggcatcagctacacgcgcaacaccttgtggatactgctttggattgccgcattggtggcgacggcgaccgccgtggtcggcccggtaagctttttcgggcttctcgccgcctcgcttgccaaccacttttccccgtccgtgcgccattccgtccgcctgccgatgacggtttgtatcggcggtatcctcttggtcggcggacagaccgtattcgaacacttcttgggcatgaaggcggtattaagcgtggtggtcgaatttgcgggcggactcgttttcctctatctcgttttaagacacaaaaaatga

SEQ ID NO: 38110 - DNA, 3012 bp, Neisseria meningitidis
ttggcttctctggagaatgccatccgccgcgatatagccgttaagattgcaggcggtaaggcaaaccgagagtattacgaagagcttgcgcgccagcgcggtatcgatattgcacggcttaatccgctactgtcccaattggacaggcataatacgcagaccaatcgcgctacgcagtctgtcaagcagttcaataacgcattgcggcaaaccccggcacaaattaccgacatcgttacccagcttgcaggcgggcaaagcccgtttctgatcatgattcaacagggtgggcagttgcgtgatatgtatggcggcttcggtggtatgcttaagggactggccacggtcatttcccctatgcgccttgctgtcgcggggttgggcggcggcattgcggcattgggttatgcgatgtatcagggggcagaggaatcgtgcgaataccgtaaagccttgatacttgccggagatgcagcagggattactgcagacaggatgcaggaaatcgctgtttcggtcggggcagcgacgggcggctatgctgatgcgcgtgctgcaattacggccttggtctcaagcggcaaggttgcaacggacaattacgaacagttcgcccggagtattaccctccagtcgcaggcaacggggcaaagtattgacgatttggttgagaaatatactgaaatcgccaaagacccgctgaaagctgtggtatccctatcagccacctaccggacaatgactgccgatgtttaccagcaggtcaaggctttgcaggcacaaggtcgggaacaggacgcggttgcattggtgcagcggaaattctccgaagagtcggaggatatggcaaaacgcgtactgggtaatcttgggttgattgagcgggcgtggaaggatattaaagaaagtgcgtcggaggcatgggatgctgttaaatccataggtagggacaagaccaagctggatgaaattgccgcgctagattcgtttatttcccaaatcgaaaccagcaagaaacatccggttacacaattgttttggggtgaagagggtgagcgtaagctgcaggaagcctatgcgcggcgtgcccggttgcgtgccgaaatcgacaaggaggcagccgctgctgaaactttgcggcagaaacagaagcagaaccaaaatcgaactgaaggtatagccgaattggaggctgtttcggaacgttatgccactcgagagcagcaacggcagcgcgaactgcttaaaaacgacaaagcacggaaaaaggcgttggacggcatcactgacgcgaaaaagcggcaagaaatcattaataagcacgcggcaaatgccaagctgattaatgaaagttttgccgagaaaaaacacgaacgacagaaagaaaaaacggataaaacaagctaccccactgtttcgaacggcttgaggattaaaccgggagccgaagcgggcggcaaagcgctaggcggaacatatgccttcgcgcatgccatgcagcagatgctgggagaccgtctgttccgtttcggcgccttccgagatcgataccacattgggaaaaacagcctgcataacagtggattggcatttgatgccactccttctcccggtatggggatgaagcagaaacaggaagttgtcgcccaaatgacccgttatcttgagtcgttggggtttaaaaacgggcaggattttaaccttaaactggaacttgccggacagcgcaataaaaacggtacggtagcaaccggcgaccactggcatttcaactggcgttctcgagaggcggctgcgcgatttgccggcggtgttgagggccaggtgaaaaatatggcgcacctcgggttgtttaagggagtggagaaagaacctctttccggctacgaaaaatggcacgaggattttaaccgtcgggcggcggaggcgggagcgaagcgggtgctggaaattttaaacggcaaccgcgccatcggcgaacagttgaagttgttgtccgacccgactttcggcgattggacgctgaagcagcaggccgatgcccgcgagctggcggagaaggccgatgcgcaggatagtttgacggccgcctccaaaaaatattccgacatagtgaagcaaatgaccgacgattcgaaagaaaagttggatgacaggctgtttgaaatttcgcttatcggcaaaacccgtgaagaaatcgagaaactgacgctggcgagactgtgggacagacagatagcgaaagcccgtgaagaaggtgcgccgttggaaagtatcgatttattggagcgcggcaaggcggaagggatgagcaatctttctcaaatgcagaaggcgcgtgcagacagcgacaatgattggcgcggcggtatcgagtccggcttgaaaagctacatcgattcattcggaacgatgaggcaggcgatggaaaatgccaccgtacaaaccttcgacaaaatgggggatgcgctggcagactttgttgccacaggcaaacttgattttcgaagcctgactgtttccattttgcaggatttgtcaaaaatgctgattaaaatggcgattgtcaatgcaatgaagtcggcgttgggttatgccgacggcggtattgtcggtggaggaagtacgcagttcgacgcgttgttttccggcggcggctataccggctacggcgggaagtatgagcctgccggcattgttcacaagggcgaagtcgtattttcccagcgggacgtacgtaatcacggcggcgttgcggctgtcgagcggctgcggttgaatggttatgccggtggcggcgcagtaggactgccgtccgttttgaccggagtccgttcggccggggctggaagcatgcaggtcaacatcactataaatcgggacggtagcaccgaatcggacagcagtgccgatacggagatggcgaagcatcttgccgctgccataccgggcatggtggaacagtggtatgtcaagaatgtgtaccgtgaaaacggtacttaccataaatag

SEQ ID NO: 38111 - DNA, 2016 bp, Neisseria meningitidis
atgatgaaactcaatccccaacagctcgaagccgtccgctacctcggcggcccactgctcgtccttgccggtgcaggcagcggcaaaaccggcgtgattactcaaaaaattaagcatttgattgtcaatgtcggctatctgccgcataccgtcgccgcgattacctttaccaacaaagccgctgcggaaatgcaggagcgcgtcgccaaaatgctgcccaaatcgcaaacgcgcgggctgacaatttgcacgttccattctttgggcatgaagattctgcgcgaagaggcgaaccatatcggttacaaaaaaaacttctccatcctcgattccaccgacagcgccaaaatcatcggcgaactcttaggcggtacgggcaaagaagctgtattcaaggcgcaacatcaaatctccctgtggaaaaacgatctgaaaacgcctgaagatgtcgttcagacggcatcgaacatttgggaacaacaaaccgcacgcgtgtatgcgagctatcaggaaaccttacaaagctatcaggcagtggacttcgacgacttaatccgcctgcctgccgtgctgttgcagcaaaacagcgaggtgcgcaacaaatggcagcggcggctgcgttatctgctggttgacgaatgccaagatacgaatacctgccaatttacgttgatgaaacttctgaccggcgcggaaggtatgtttaccgccgtcggcgacgacgaccagtccatctacgcatggcgcggcgcgaacatggaaaacctgcgcaaaatgcaggaaaactatccgcagatgaaggtcatcaaactggagcaaaactaccgctccaccgcgcggattctcaaaatcgccaacaaagtcatcgagaacaaccccaagctgttcaccaaaaaactttggtcgaaattgggcgaaggcgagcccgtcaaaatcgttgcctgccaaaacgagcagcacgaagccgactgggtcgtcagccaaatcgtcaaacaaaaactcatcggcggcgacaaaacccaatatgccgatttcgccgtgttgtaccggggaaagcatcaggcgaggattttcgaggaagcattgcgcggcgcgcgcatcccctaccgtctctccggcggacaaagctttttcgacaaagccgaaatcaaagacgtgttgtcttatgtgcggctgcttgccaaccccaacgacgatcccgcctttctgcgtgccgttaccacgcccaaacgcggcatcggcgatgtaacgctgggcaagctcaacacttacgcgcacgaacacgaatgcagcctgtatgaagccgcgcaaaacgaagaagccctcgccacgctgaacaataccaaccgccaacacctgcaagcctttatggatatgttcggcagttaccgtgccaaagccgaaaccggcgaagcgggcgagttcatcaacagcctgctcgaagaaatcgactatgaaaaccacctgcttgccagtgaagaaggcaaagctggcgaaatcaaatggcgcaacgtcggcgatttggtatcatggtttgcgcgaaaaggcggggaagacggcaaaaacatcatcgaactcgcccaaaccgtcgccttgatgacgcttttggaaggaaaagacgaagaagaaaccgatgccgtctcgctatccacgctacacgccgccaaaggtttggagtatccgtatgttttccttgtcggttgcgaagaaggcgttttgccgcacaacgacagcatcgaagaaggcaacgtcgaagaagaacgccgcctgatgtacgtcggcatcacccgcgccaaacgccaactcacactgacccactgcgtcaaacgcaaaaaacaaggcacatggcagttccccgaacccagccgattcatagacgaaatgccgcaggaagatttgaaaatcctgggtcgcaaaggcggcgagccgattgtcagcaaagaagaaggcagacgcaaccttgccgatataatcggaaggctcgacagcatgaaaaaaggcaatccgtcggattaa

SEQ ID NO: 38112 - DNA, 294 bp, Neisseria meningitidis
atgaaaaccaacgacaagctcaataggcagattgacgtgttgcagaaacagtcggcagccatccacaacgaagcctatatcgaaatgaacacgctgctttaccgccaccgcgaagtggtttccgtccacaaccgcaaggcggattatgcggaaaagggcaaagagcggattgcgctgttcccgcgcggcttgaacggcatcaccaagctgcctgccgccgtcctgttgcccgatcgtcccgattgttttgatatgaaggcagtttggcaaatgtttaatagaataccgaggtag

SEQ ID NO: 38113 - DNA, 699 bp, Neisseria meningitidis
atgagttttgaaatttaccgttacaacccggatgttgatgccaagccttatatgcagcgttacgagttggaattggaaccgaccgacgtgaaacttttggatgctttggtacgcctgaaagcacaagacgataccttgtctttccgccgctcgtgccgcgaaggcatttgcggatcggacggtatgaacatcaacggcaaaaacggcttggcgtgtttgaccgatctgcgtggcttgaaacagccagttaaaatccgtcctctgccaggtctgcctgttatccgcgacctgattgtggatatgacccagttcttcaaacaataccattccgtcaaaccttatgttgtcaacgataatccgattgatgcggacaaagagcgtctgcaaactcaggaagagcgtaaagagttggacggtttgtacgagtgtattttgtgcgcctgctgttcgactgcctgcccgtcattttggtggaaccctgataaattcgttggtccgtccggtttgctgaatgcttaccgtttcattgcggacagccgtgataccatcactaatgagcgtttggataatctgaacgacccataccgtttgttccgttgccacaccattatgaactgcgtagacgtatgtcctaaacacttgaatccgacccgagccatcggtaagattaaagagattatgttgaaacgggccgtttaa

SEQ ID NO: 38114 - DNA, 792 bp, Neisseria meningitidis
ttgcaccgtttgcagaaagtcgtgcgccatatcgcgcaaaccgaaattatgccgcgttttttgaatacgccgtcttgccgcaaggaagacggttcgatgttgagcgaggcggacattgccgcgcagacggcttttgccgccgcgttgccgcttttaatcgacagtccgatgttgggcgaggaaatgtcgcggcaggaacagtcggctttgtgggaacaatattcgggggaaaaggggctgtggattgtcgatccgatagacgggacgaacaattttgtcaacgggctgccgcattttgccgtgtcggtggcgtttgtccgcaacgggcgcgccgaattgggtgtgatttacaatccggtcagcggcgaatgtttttatgccgaacgggggcagggtgcgtttcttaatggaacccgcctgcctttgcgtctcgtggataaaaaactcaatgaggcgattgcgggcgtggaaatcaaatatttgcgttcgggcaaactttccagccgtatgagtacgctcgcgccttttggaacgatacggagtatgggcagcagtacgttggattggtgttatctggcgtgcgggcgttatgatgtttatgttcacggtgggcagaagctgtgggactatgctgcgggtgcgttgattttcgaggaggcgggcggcaggctgacgactttggaaggcgacgggttttggagtggtgaacacgtgttcaaacgctcggtcgttgccgcgctcgaaccgaagctgtttgaacgctgggtcgggtggatacgggaaaaccaatag

SEQ ID NO: 38115 - DNA, 180 bp, Neisseria meningitidis
atgccgtctgaacgcacgttttgccgttcagacggcatttttatttccttttcctgcctgccgccctttgaaaatcccttacgcgccgccctgtttgaaacaaagcaaacgcccgccgcgaaccggacaatcttgatacgcagccaaagcaagtccggcggtaagttgttaaacatataa

SEQ ID NO: 38116 - DNA, 1860 bp, Neisseria meningitidis
atgccagaataccgctccaaaacctccacccacggccgcaatatggcgggcgcacgtgcattgtggcgcgccaccggcgtgatggaaaccgacttcggcaagcccatcatcgccgttgccaactccttcacccaattcgtgcccggccatgtccacctgcacaatatgggccagctggttgcccgcgaaatcgaaaaagccggcgcaatcgccaaagaattcaacaccatcgccatcgacgacggcatcgctatgggacacagcggcatgctgtactccctgcccagccgcgatttgattgccgactccatcgaatatatggtcaacgcccactgcgccgacgcgctggtgtgcatttccaactgcgacaaaatcaccccgggcatgctgattgccgcgatgcgcctgaacatccccaccatcttcgtctccggcggcccgatggaagcgggcaaagttatcggcgtggcaaacatccaacccgaacgccgtttggacttgattgacgcgatgatcgaatcggcggacgacaatgtcagcaaccggcaagtcgaggaagtcgaacaaaacgcctgcccgacctgcggctcgtgttcgggtatgtttacggcaaactcgatgaactgcctgaccgaagcactcggtctgtccctacccggcaacggttcgtatttggcgacccacgtcggccgcaaagaactgttcctcgaagccggccgtatgattgtcgaaatcaccaaacgctattacgagcaaaacgatgaaaccgtgttaccgcgcagcattgccaccaaaaaagcgtttgaaaacgctatgacgatggatattgcgatgggcggcagcaccaataccattttgcacctgttggccgttgccaacgaagccggtgtcgatttcaaaatggccgacattgaccgcttaagccgcgttgtgccctgcatctgcaaaaccgcacccaacaaccacgactactatatggaagacgtgcaccgcgccggcggcattttcgccatcctgaaagaattggacaaagcgggcaagctgcacaccgacgtgcacactatccacgcaccgacgctgaaagacgcgattgaaaaatgggacataaccaaccctgaaaacacccgcgccatcgaacgcttcaaagccgcgcccggcggcgtacgcaccacccaagcgttctcgcaaaaccgtatgtggaaaaccctcgacctcgaccgcgaaaaaggctgtatccgcgacgtggcacacgcctactcgcaagacggcggtttggcggtcttgttcggcaacatcgccgagcgcggctgcgtggtaaaaaccgcaggcgtggacgagagcatcctcaaattcaccggccgcgcccgcgtgtttgaaagccaagaagacgcagtagaaggcattttgggcaaccaaatcgtcgccggcgacatcgtcatcatccgctacgaaggcccgaaaggcggcccgggcatgcaggaaatgctgtatccgacttcctacctgaaatctaaaggcctcggcaaagcctgcgctctcttaaccgacggacgcttctccggcggcacatcaggtttgtccatcggacacgcctcgcccgaagcggcggaaggtggcgcgatcggtttggtacacgaaggcgataccgtcgaaatcgacatccccaaccgcagcatccaccttgccatttccgatgaagagcttgccgcccgccgtgccgaaatggaagcgcgcggcagcaaagcgtggaaaccggaaaaccgcgaccgctacgtctccgcagccctgcgtgcttacggcgcgatggcgacttccgccgacaaaggcgcggtgcgcgacgtagcgcaaatcgaaagataa

SEQ ID NO: 38117 - DNA, 4890 bp, Neisseria meningitidis
atgaatgagggtgaagttgttttaacaccagaacaaatccaaaccttacgtggttatgcttcccgtggcgatacctatggcggttggcgttatttggctaatttgggcgaccgttatgcggataatgctgctgcaattgtcggtaaggatacaaacttaaatggtttgaatttatggatgaaaaaaggggtggaaaacctatgggatgatacggtcggtaaaaagacccgtttagagaaatttgatcgggttgcattgcaacatttcagccaatatgtagatctaattaataaaaataatggtagattacctaacactagtgaaattgagagaagttactataaagccgttacctatcatggcgtttcttctagtgcagctattgatttagttattaatcgttcacttccggatatggcggatggttattgggcattaggtttggggatagaagccgaacgtatccacaatgagcaagcagtaaataatccgaacggtagcgaaagggataatagaaagcagttaatatctgctttagataaaggatttgatggatcttttaaagagaagcattttacttttttacaatctgtgatgatggatctaacaaagttaggtgttgaatatacaatagatggttggcaaaaaattggaggttggggtaatgggataatcaatgatttatataaaagtgttgtaaaaagagagtggactggaatatttgagatcgttaataataacatcaagcaaggaaatgaagcttttaaaaatgaaatcaatagcttggttcatgatatgaaagctgctggcaaggaatttggagatgacttaaatacacagtggaataatctcactcaggctgccgaaataatctataatgacatagtagacaatactagtcaaggaatagaaaaaggtgtcaaagccattaaagaattgtctgaaaaaatgaaaaatgctgcttccgatttggctgacggttcagcagagaaagctaaacaagtagtggaagatttggctcaagccgccaaagaagcatacgaaaatgccaaatccacagccgagaaggctgctcaagcagctcgagaattttttaagggcttgcccagttttaaagatctggccgaaaaatttagagatctgttcccaaatccggaaggctggatcgatgatggtcaccaatgtttcgctccttgggttaaagaaactaaaaaacgcaatggcaaatatcatgtctacgacccccttgccctagatttggacggcgacggcatagaaaccgttgccaccaaaggcttttcaggcagcctatttgaccacaaccgcgatggcatccgcaccgccaccggttgggtttctgccgatgacggtctgcttgtgcgcgatttgaacggcaacggcatcatcgacaacggtgcggaactcttcggcgacaacaccaaactggcagacggctcttttgccaaacacggctacgcggctttggccgaattggattcaaacggcgacaacatcatcaacgcggcagacgccgcattccaaaccctgcgtgtatggcaggatctcaaccaggacggcatttcccaagctaatgaattgcgtacccttgaagaattgggtattcaatctttggatctcgcctataaagatgtaaataaaaatctcggtaacggtaacactttggctcagcaaggcagctataccaaaacagacggtacaaccgcaaaaatgggggatttacttttagcagccgacaatctgcacagccgttttaaagataaagtggaactcactgccgaacaggcaaaagccgccaatcttgcgggcattggtcgtctgcgcgatttgcgcgaagctgccgcattgtccggcgatttggccaatatgctgaaagcttattctgccgccgaaactaaagaagcacagttggcattgttagataatttgattcacaaatgggcggaaaccgattcgaactggggcaaaaaatcgccaatgcgactttcaaccgattggacgcaaacggctaatgaaggtattgcactgacaccatcccaagtagcacaactaaaaaagaacgctttagtttccctttctgataaagctaaagcagctattgacgccgcccgcgaccgcattgccgtgcttgatgcctacacggggcaggattccagcacgctctattacatgagcgaggaagatgcgcttaatatcgtcaaagtaaccaacgatacatacgaccatctcgccaaaaacatctaccaaaacctgttgttccaaacccgtttgcagccatatttgaatcaaatcagtttcaaaatggaaaatgatacgttcactttggattttagtggtcttgttcaagcatttaaccatgtcaaagaaactaatccgcaaaaagcttttgtggatttggccgagatgcttgcatatggcgaacttcgttcttggtatgaaggccgaagactaatggccgattatgtggaggaggcaaaaaaagcaggtaaatttgaagattaccagaaagtgttgggtcaggagaccgttgcattattagctaaaacatcgggtacgcaagcagatgatatcctgcaaaatgtaggctttggtcataataaaaatgtttctttatatggtaatgacggcaacgacactctaatcggcggtgccggtaatgattacttggagggcggcagcggttcggatacttatgtcttcggcaaaggcttcggtcaggatacggtctataattacgactacgctaccggacgcaaagacatcatccgctttaccgacggtattacagccgatatgctgacttttacccgagagggcaaccatcttcttatcaaggcaaaagacggcagtggacaagtgactgttcagtcctatttccagaacgatggctcaggtgcttaccgtatcgatgagattcatttcgataacggcaaagtactggatgttgccactgtcaaaaaactggtacagcaatccaccgacggttcggacagattgtatgcctaccaatccggaaataccttaaatggcggattgggcgatgactatctgtacggtgccgacggggatgacctgctgaatggtgatgcaggcaacgacagtatctacagtggcaatggcaatgatacgctcgatggaggagaaggcaacgacgccctgtacggctataatggtaacgatgtactgaatggtgccgaaggcaatgatcatttgaacggcgaagacggtaacgacactctaatcggcggtgcaggcaatgattacttggagggcggcagcggttcggatacttatgtcttcggcaaaggcttcggtcaggatacggtctataattacgactacgctaccggacgcaaagacatcatccgctttaccgacggtattacagccgatatgctgacttttacccgagagggcaaccatcttcttatcaaggcaaaagacggcagtggacaagtgactgttcagtcctatttccagaacgatggctcaggtgcttaccgtatcgatgagattcatttcgataacggcaaagtactggatgttgccactgtcaaaaaactggtacagcaatccaccgacggttcggacagattgtatgcctaccaatccggaagtaccttaaatggcggattgggcgatgactatctgtacggtgccgacggggatgacctgctgaatggtgatgcaggcaacgacagtatctacagtggcaatggcaatgatacgctcgatggaggagaaggcaacgacgccctgtacggctataatggtaacgatgtactgaatggtggcgaaggcaatgatcatttgaacggcgaagacggtaacgacactctgatcggcggtgcaggcaatgattacttggagggcggcagcggttcggatacttatgtcttcggcaaaggcttcggtcaggatacggtctataattacgactacgctaccggacgcaaagacatcatccgctttaccgacggtattacagccgatatgctgacttttacccgagagggcaaccatcttcttatcaaggcaaaagacggcagtggacaagtgactgttcagtcctatttccagaacgatggctcaggtgcttaccgtatcgatgagattcatttcgataacggcaaagtactggatgttgccactgtcaaaaaactggtacagcaatccaccgacggttcggacagattgtatgcctaccaatccggaagtaccttaaatggcggattgggcgatgactatctgtacggtgccgacggggatgacctgctgaatggtgatgcaggcaacgacagtatctacagtggcaatggcaatgatacgctcgatggaggagaaggcaacgacgccctgtacggctataatggtaacgatgtactgaatggtggcgaaggcaatgatcatttgaacggcgaagacggtaacgacactctaatcggcggtgccggtaatgattacttggagggcggcagcggttcggatacttatgtcttcggcgaaggcttcggtcaggatacggtctataattaccatgtggataaaaactctgacactatgcactttaaaggatttaaagcagcagatgttcattttatccgttccggaagtgatttggtgcttagcgcttctgaacaagacaacgtacgtatttccggattcttctatggtgaaaaccatcgtgtagatacatttgtctttgatgatgcagctatcagtaatccagattttgccaagtatattaatgctggcaataatttggtacagtctatgtctgtgttcggttctaatactgctgcgacaggaggaaatgtggatgccaatatacaatccgtacagcagccgttattggtaacgccatctgcataa

SEQ ID NO: 38118 - DNA, 300 bp, Neisseria meningitidis
atgaagaaaatgttcgtgctgttctgtatgctgttctcctgcgccttctcccttgcggcggtaaacatcaatgcggcttcgcagcaggagttggaggcgctgccgggcataggccctgcgaaggcgaaggccattgcggaataccgtgcgcaaaacggtgcgttcaagtctgtggacgatttgaccaaggtaaagggcatcggccctgcggtgctggcgaagctgaaggatcaggcttctgtcggcgcgcccgcaccaaaaggcccggcaaaaccggctctgcccgcagctaaaaaatag

SEQ ID NO: 38119 - DNA, 873 bp, Neisseria meningitidis
gtgaaaggactcgactattgccgccaaaaagcagaagaaagccgctccagttttttgtcgggcttccgtttcctgactcaggaaaaacgagatgcggtaacggttttatatgctttttgccgcgaattggacgatgtggttgacgaatgttccaaccccgatgttgcacaggcgacattgaactggtggcgcggcgatttggacaaggtattcggcggcgcgatgccggaacaccccgtcaatcaggccttgcggcaggttaaggaaaccttcaagctgccgaaatatgaactggaagccttaatcgacgggatgcagatggatttggttcaagcccgttacggcagttttgaagaattgaaactgtattgccactgcgtcgcaggcgtggtcggctgcctgattgcgcggattttggggttttcagacgaccaaacgctggaatacgccgacaagatgggacttgcgctgcaactgaccaacatcatccgcgatgtcggcgaagacgcgcgcaggggacggatttacctgccgatggaggaaatgcggcggtttgacgtacccgcaagcgtgattttgcaatgcagcccgacgggcaattttgccgaattgatggcgttccaaatcaaacgcgcccgcgaaacctaccgcgaagccgtatcgctgctgcctgatgccgataaaaaagcccaaaaagtcggactggtcatggcggcggtttattacgcgcttttaaacgaaatcgaccgagacggcgcgcaaaacgtcctcaaatacaaaatcgccctcccttcgccgcgcaaaaaacgcattgccctgaaaacctggttattcggattcaaaccgcgccccggcacgccggaacgggcataa

SEQ ID NO: 38120 - DNA, 2664 bp, Neisseria meningitidis; identical to SEQ ID NO: 36267

SEQ ID NO: 38121 - DNA, 1011 bp, Neisseria meningitidis
atgagcaaaaaacgagttctgaccggcgtaaccaccaccggcatcccgcatctgggcaactacgtcggtgctatccgccccgccgtccgcgcggcgcaaaaccctgataccgaatccttcctcttcctcgccgattaccacggtatcatcaaatgccacgagccggagatgattcaccaatccacccaagccgttgccgccacttggcttgcctgcggactcgaccccgagcgcaccaccttctaccgccaaagcgacattcccgaagtgatggaattgaactggattctgacctgcatcaccgccaagggtttgatgaaccgcgcccacgcctacaaagccgccgtgcaggcaaatgcggaaaacgggcaggaagaccccgatttcggcgtggaaatgggtttgttcagttatccgattctgatgactgccgatattctgatgttcaacgccaacgaagtccccgtcgggcgcgaccaaatccaacacgtcgaaatggcgcgcgacatcgccggccgcttcaatcaccgcttccgagaactcttcaccctgcccgaagtgaaaatcgacgaaaacgtcgaactcttggtcggtttggacggacgcaaaatgtccaaatcctacggcaacaccattccgctttgggaaaacgacaaaaaaacccaaaaatcggtcaacaaaatcatcaccaatatgaaagagccgggcgagccgaaacagcccgacgaaagcccattgtttgaaatctacaaagccttctccacgccgtctgaaacggtggaatttacgaaaatgcttgccgacggcctggcttggggcgaggcaaaaaaacttttggcggcgaaaatcaacgccgaactcgccgaaccgcgcgaacgctacaacgagctgaccgccgacccttcgcaaatcgaagagattttacaggcaggtgcgcaaaaagcgcgtaaagaagcacgcgaattgttggacaaagtacgcgatgcggtcggcatccgcccgttgaaataa

SEQ ID NO: 38122 - DNA, 1104 bp, Neisseria meningitidis
atgttgattttacaagccgaacgcgacagcctgctcaagccgctgcaagccgttaccggcatcgtcgaacgccgccataccctgcccatcctgtccaacgtcctgattgagggaaaaggcggtcagaccaaactcttggcaaccgatttggaaatccaaatcgacactgcgggtcccgagggcggcgcggacgacttccgcatcaccaccaatgccaagaaatttcaggacattttacgggcactgcctgccggtgcgctggtgtcgctggattgggacgacagccgtctgacgctgaaggcgggcaaatcgcgttttgccctgcagaccctgcctgccgccgattttccgatgatgaatgtcggcgaggacatcagcgcgactttctcgctggagcaggagcgtttcaaaaccatgctgtcgcaagtgcagtacagcatggcggtgcaggacatccgctattatctcaacggtctgctgatgcaggttgagggcagccagttgcgccttgtggcgaccgacggacaccgccttgcctatgcagcctgcgcgattgatgcggatttgccgcgcgccgaagtgattttgccgcgcaaaacggtgctggaactgttcaaactgttgaacaaccccgacgatccgattcaaatcgagctgctggacaaacaggtgcgtttccaatgcaacggcacgaccatcgtcagcaaggtcatcgacggcaaattccccgatttcaaccgcgtgattcctttggacaacgacaagattttcgttttgtcccgtgccgaacttttgggcgcgctggaacgtgtgtccattcttgccaacgaaaaattccgtggcgcgcgcctgttcctgcaatccggcctgttgagcgtcgtgtgcagcaacaacgagcaggaagaagcgcgcgaagaaatcgagattgcctatcagggcggcgaactcgaagtcggtttcaatatcggctatctgatggacgtgttgcgcaacatccattccgacgatatgcagcttgccttcggcgatgccaaccgctcgacgctgtttaccgtgccgaacaatccgaatttcaaatatatcgtgatgccgatgcgaatttga

SEQ ID NO: 38123 - DNA, 477 bp, Neisseria meningitidis; identical to SEQ ID NO: 37049

SEQ ID NO: 38124 - DNA, 924 bp, Neisseria meningitidis
atgctgcaaagaactttggcgaaatccatcagcgttaccggagtcggcctgcattccggcgaacgggtcgcactgaccctgcaccccgcgcctgaaaacagcgggatttccttccgccgtaccgatttggacggcgagatgggcgaacaaatcaagctgaccccttatttgatcaacgatacccgcctttcctccaccatcgttaccgacaaaggcgtgcgcgtcggcacgatcgaacacattatgtccgcgctgtccgcctacggtatcgacaacgcgctgattgagctgaacgcacccgaaatcccgattatggacggctccagcctgccgtttatttaccttttgcaagatgcgggcgtggtcgatcaaaaggcgcaaaagcgttttttgaaaatcctcaagcctgtcgaaatcaaagaagcgggcaaatgggtgcgctttacgccgtatgacggctttaaggtaacgctgaccatcgaattcgaccatccggctttcaaccgcagctcgcccacttttgaaatcgatttcgccggcaaatcctacatcgacgaaatcgcgcgcgcgcgcaccttcggctttatgcacgaagtggaaatgatgcgcacccacaatctgggtttgggcggcaatttgaacaacgccatcgtgattgacgacacggatgtcctgaatcctgaaggcttgcgctatcccgatgagtttgtgcgccacaaaatccttgatgccatcggtgatttgtatatcgtcggacatccgattgtcggcgcgtttgaaggctacaaatcgggacacgccatcaacaacgcactcttgcgcgcggttttggcagacgaaacggcttacgaccgggtggaatttgccgacagcgatgatttgcccgacgcatttcacgagctgaacatcagaaattgtggataa

SEQ ID NO: 38125 - DNA, 672 bp, Neisseria meningitidis
atgacgacacaagacgaactcaagcgcatcgccgccgaaaaagcagtcgaattcgtacccgaaaacgaatacatcggcatcggtaccggctcgaccatcaactttttcatcgaagccttgggtaagagcggcaaaaaaatcaaaggcgcggtatctacttccaaaaaatccagtgaactgcttgcccaatatgatattcccgtcgtttccctgaacgaagtatcggggttggcggtctatattgacggtgcggatgaagtgaaccacgccctgcaaatgattaaaggcggcggcggcgcacacctcaacgaaaaaatcgtcgccagcgcatcagaaaaattcgtctgcattgcggacgaaagcaaatatgtttcacgtttgggcaaattccctctgcccgtggaagtcgtcgaaagcgcgcgttcccttgtttcgcgcaaactgctcgctatgggcggacagcctgaattgcgtatcggctacaccactttttacggcaaccaaatcgtcgatgtccacggcttgaatatcgacaaaccgctgatgatggaagacgaaatcaacaaaatcaccggcgtactcgaaaacggaatattcgcccgcgatgccgccgatgtgttgattttggggacggaagagggtgcgaaagtcatctatccctgccaagggtaa

SEQ ID NO: 38126 - DNA, 258 bp, Neisseria meningitidis
atgcagaccgttaccatgtacacaggtccgttttgcccctactgcacgatggcgaaaaggctgctgcacgcggcaggtgtcggacatatcgacgaaatccgtgtcgatgcaagtcccgaagcctttgccgaaatgcagcagctttccggacagcgcagcgtgccgcagattttcatcggcgaaacgcacgtcggcggatttaccgacctctaccgcctccagcaggaaggcgggctggacggactgctgaacccttaa

SEQ ID NO: 38127 - DNA, 681 bp, Neisseria meningitidis
atgattttccaaacagtctggttttcagatatggtactgtcggtttcgtggattgtccttatcctgatactggcagcttccgcgccgtcggcattccgctcgcttgcccgctaccgttctgcccttcccctgtgtaccgtaattttttccgcagcatggtgtctgaacgcctctgccggcggcggacagcttgcccagatgaactaccacctgctcgccgtcaatctggttgcactgatggtgggcacttccgccgccttttggcttgccgcgctgctgatgctgccctactgcctgctgtttgccggttctgccggcgcatatccgccgaacgctttagtgctgattctgcccgcgcttgccgtcaaccgcctgtcgcgtatgctggtcaaccgcctgccgcccaatattttcatctttattttcgtcaacggctttctcgcttccgccgccggcattctgttgaccgggctggtgctgaccggtattttggatgctgcaaacgcttttccgtccgaaatattgtggacgaccgccctgcccgtctttattctgctggcgtgggcggaagccttcctcagcggcatttcaactgccatatttgttgcactgaagccccattggatcaacactttcgacgacaaccgctatcttaagtccgaccgcggcatatggcggtag

SEQ ID NO: 38128 - DNA, 1260 bp, Neisseria meningitidis
atgagtatggcacttgcccaaaaacttgccgccgacagcattgcggcggttgccgaaggacgcaaccttcaggacgtgttggcgcaaatccgcaccgcgcatcccgaccttacggcacaggaaaacggcgcgttgcaggacatcgcctacggctgccagcgttatttgggcagtttgaaacatatgctcgcgcagatgctgaaaaagccgattgacaacccgcagctcgaaagcctgcttttggcggcgttgtaccaactgcattacacgcgcaacgcgccgcacgccgtggtcaacgaagcggtggaaagcatagccaaaatcggacgcgggcagtaccgttcgtttgccaacgcgattttgcgccgctttttgcgcgaacgcgacaagcttgcggcttcctgtaaaaaagacgatgtggcgaaacacaacctgccgctgtggtgggtggcttacctgaaaaaccattatccgaaacactggcacaacatcaccgccgcgctacaatcccatccgccgatgacgttgcgcgtcaaccgccgacacggcaatgccgaaagctatttggaaaaactggctgcggaaggtattccggccagggcgttggacgaatatgcggttacgttggaagaagccgtgccggtaaaccgtctgcccggtttttcagacggcattgtttcggtacaggacttcggtgcgcagcaggcggcgtatcttcttaacccgaaagacggcgaacggattttggacgcgtgcgccgcgccgggcggcaagacggggcatatcttggaactggcggattgccgcgttaccgccttggacatcgatgcaggccgtctgaagcgtgtggaggacaatatcgcccgtttgggctttcagacggcatcggcggcgtgtgccgatgcgcgggatttggcggcgtggtatgatggaaagcctttcgacgcaatccttgccgacgtgccatgcaccgcttccggcgtggcgcggcgcaatcccgacgtgaaatggctgcgccgtccgaccgacgcgctcaaaaccgcccgccagcaggaagccctgctggacgcactttggcagacgctgaaacagggcggcagaatgctgcttgccacctgttccgtgttcgtcgaagaaaacgacgggcaattgcaaaaattcctcaaccgccatgccgatgccgaaccgatcgaatcgcgggtgcttttaccgaacaaacaccaagatggcttttattacgcgcttattcaaaagcattaa

SEQ ID NO: 38129 - DNA, 642 bp, Neisseria meningitidis
atgaccgatttccgccaagatttccttaaattctccctcgcccaaaatgtcttaaaattcggcgaattcaccaccaaggcaggacggcagtcgccttatttcttcaatgctggcctctttaacgacggcttgtccacgctgcaactggcaaaattttacgcacaatccatcattgaaagcggcatccaattcgatatgctgttcggccccgcctacaaaggcattattttggcggcggcaaccgcgatgatgctggcggaaaaaggcgtaaacgtcccgtttgcctacaaccgcaaagaagccaaagaccacggcgaaggcggcgtgttggtcggcgcgccgcttaaagggcgcgtgctgattatcgacgatgtgatttccgccggcacatccgtacgcgaatcgatcaagctgattgaagcggagggtgcaacccccgccggtgtcgccatcgcgctcgaccgcatggaaaaaggcacgggtgaattgagcgcggttcaggaagtggaaaaacaatacggcctgcccgtcgcccccatcgccagcctgaacgatttgtttattctgttgcaaaacaaccccgaattcggacagttcctcgaacccgtccgagcctaccgtcggcagtacggcgtagaataa

SEQ ID NO: 38130 - DNA, 729 bp, Neisseria meningitidis
atgatcaaattcaaaaacgtacacaaacatttcaaagacctgcacgtcatcaacggcgtgaacttggaaatcaaaaaaggcgaagtggtcgtcgtctgcggaccttcgggcagcggcaaatccacactcatccgcaccgtcaaccagcttgaaagcatcgaaagcggcgagatttgggtggacggtgtcaacgttgccgacccaaaaaccgatttgaacaaaatccgcgaagaagtcggctttgtgtttcaaagtttcaacctctacccccacctgaccgtattggaaaacatcaccctcgcaccgatgaaggttaaaggtcaaaatgcggaacaggcggagaaaaaagcgatggaacttttggaacgcgtcggactggcgcacaaaaaagacgcttttccgtcccaactttccggcggccagcagcagcgcgtggcgattgcacgcggtttggcgatggaaccgcgcgtaatgttgtttgacgaaccgacctccgcactcgaccccgaaatggtcggcgaagtgttgaaagtgatgaaagacttggcagaaagcggcatgaccatgatgtgcgtaacccacgaaatggggtttgcccgcgaagttgccgaccgcgtgattttcgtcgataaagggcaaatcctcgaagacgaaacgcccgaagcgtttttcaccaacccgaaacacgaacgcgccaagcagttcctgcaacaggtcatgacccactga

SEQ ID NO: 38131 - DNA, 1422 bp, Neisseria meningitidis
atgcgccacctacccctgttttcactaatgcttttccccgcatcggtttacgccgcagatttggacggcgcaaacctaaacctgctgtggagcctgccctttgccctgattttgctgtctatcgcattgggtcccttgtttttttcgcatacctggcatcaccattacggcaaaatcaccgccttttggacattgctcttcctcatcccgttcagtttggtttttggcgcgtccgccggtatccataccgtcgcacacgcactcgttgaagaatacatccccttcatcctgctgctgcttgccctgtacaccatttcaggcggcattttggtttggggcgacttgaacggcacacccaagctcaacaccgccctgcttgccgtcggtacggcacttgcctctatcatgggaacgaccggcgcagcaatgctgatgattcgtccgctgctgaaagccaaccaaaaccgtacccgccgcgtgcacatcgtcatcttcttcattttcctggttgcaaacatcggcggcggtctgacccctttgggcgaccccccactcttcctcggcttcctcaaaggcgtagatttcatgtggacggtcaaacatatgttcgcccccgtcctgatcagcaccgctgtcctgttgaccgccttctatttcatcgacaaccgtttcttcaaacaggaaagcattgcacaagatacgccggcacaacaggaaaaacccgaaaaaatcgccatcttcggcaaatggaacttcctcctgctttcgggcgtggtcggcgcggttctaatgtccggcctttggaaacccgaacacccgggatttgaaatcctcggcagccgttacgccctgcaaaacctcgtccgcgatgtcatcctgattgcattgaccgccgtatctatggcaatcacgcccaaacaagtccgcgcaggcaacgaattcaactttgaacccatcgccgaagtgggcaaactcttcctcggcatcttcatcaccatctttcccgtcctgagcattctgaaagcaggcgaggcaggcgcgctgggcggggtggtatcgctggttcacgatacggcaggtcatccgattaatacgatgtatttttggatgagcggcatattgtcggcattcttggataacgcgcccacttatctcgtttttttcaatatggcgggcggcgatgcccaagccttgatgacgggtaccctgtttcattcgctgctggcggtttctatgggttcggtattcatgggcgcactgacctacatcggcaacgcaccgaacttcatggtcaaggccattgccgaacagcgcggcgtaccgatgccgactttcttcggctatatgatgtggtcggtcgccttcctgacacccgtcttcatcgtacatacccttatctttttcgttttcaaactgctgtaa

SEQ ID NO: 38132 - DNA, 276 bp, Neisseria meningitidis
atgaatgagggtgaagttgttttaacaccagaacaaatccaaaccttgcgtggttatgctttccgtggcgatacctatggcggttggcgttatttggttaatttgggtgaccgttatgcggatgatgctgctgcaattgtcggtaaggatgcaaacttaaatggtttgaatttatggatgaaaaaaggtgtggaaaacctatgggatgatacggtcggtaaaaagacccgtttaatgtgtatttccgttttttggattgtggttttcaatttgtag

SEQ ID NO: 38133 - DNA, 426 bp, Neisseria meningitidis; identical to SEQ ID NO: 36185

SEQ ID NO: 38134 - DNA, 648 bp, Neisseria meningitidis
atggcttctaaatcatctaaaaccaacttggatctcaacaaccttcacctgctcaaccttcctgccaggctttttatcgccctgctggccgttgccgccgtgctggggctcggttatgccggattgttcaaaagccagatggaatcccttgaggaatacgaagcaaaagaaaccgaactgaaaaacacctacaaacagaaaagtatcgacgcggccagcctgaacaacctgagggacgaacttgcctcaatccgctctgccttcgatatcatgttgaaacagctgccgacagatgcagaaattcccaatctggttcaagagcttcatcaggcaggttcgagcaacggcctgcgcttggacagcgttatgccccaacctcccgtagatgacggccccatcaaaagattaccctattccatttccattaccggaaattacgaacagatcagccaatttacccgcgatgtcggcagcctctcccgaatcattacccttgagtcgctgaaaatcgcccaatctccggaaaacggcggcaatcctgacggcaagagcagcatcctgaacctcagtgccattgccaccacctaccaagcaaaatccgtagaagagcttgccgcagaagcggcacaaaatgccgagcaaaaataa

SEQ ID NO: 38135 - DNA, 855 bp, Neisseria meningitidis
atgttttaccaaatccttgccctgattatctggagcagctcgtttattgccgccaaatatgtctatggcggcatcgatcccgcattgatggtcggcgtgcgcctgctgattgctgcgctgcctgcactgcccgcctgccgccgtcatgtcggcaagattccgcgtgaggaatggaagccgttgctgattgtgtcgttcgtcaactatgtgctgaccctgctgcttcagtttgtcgggttgaaatacacttccgccgccagcgcatcggtcattgtcggactcgagccgctgctgatggtgtttgtcggacactttttcttcaacgacaaagcgcgtgcctaccactggatatgcggcgcggcggcatttgccggtgtcgcgctgctgatggcgggcggtgcggaagagggcggcgaagtcggctggttcggctgcctgctggtgttgttggcgggcgcgggcttttgtgccgctatgcgtccgacgcaaaggctgattgcacgcatcggcgcaccggcattcacatctgtttccattgccgccgcatcgttgatgtgcctgccgttttcgcttgctttggcgcaaagttataccgtggactggagcgtcggaatggtattgtcgctgctgtatttgggcgtggggtgcggctggtacgcctattggctgtggaacaaggggatgagccgtgttcctgccaacgtgtcgggactgttgatttcgctcgaacccgtcgtcggcgtgctgctggcggttttgattttgggcgaacacctgtcgcccgtgtccgccttgggcgtgtttgtcgtcatcgccgccaccttggttgccggccggctgtcgcatcaaaaataa

SEQ ID NO: 38136 - DNA, 1857 bp, Neisseria meningitidis
atgttgaacaaaatattttcctggttcgagtcccgaatcgacccttatcccgaagccgccccgaaaacgccagaaaaaggcttgtggcggtttgtctggagcagcatggccggcgtgcggaaatggatagccgccctggctgcgctgaccgccggcatcggcattatggaagccctgatttttcaatttatgggcaaaatcgtggagtggctcggcaaatacgcgcccgccgaactgtttgccgaaaaaggttgggaactggcggcaatggcggcgatgatggtgttttcggtcgtgtgggcgtttgccgcgtccaacgtgcgcctgcaaacccttcagggcgtgttccctatgcgcctgcgctggaacttccaccgcctgatgctgaaccaaagcctcggtttttatcaggacgaatttgccggacgcgtgtccgccaaagtcatgcagaccgcgctggcgttgcgcgacgcggtgatgacggttgccgatatggtcgtttatgtgtcggtgtatttcattacctccggcgtgattctcgcctcgctcgactcatggctgctgctgccctttatcggttggattgtcggtttcgcttcggtgatgcgcctgctgattcccaaattggggcaaaccgccgcatggcaggcggatgcccgctcgctgatgaccggccgcattaccgatgcctattccaatatcgccaccgtcaaactcttctcccacggcgcgcgtgaagccgcctatgccaagcagtcgatggaagaatttatggttacggtgcgcgcccaaatgcggctggcgacgctgctgcattcgtgcagcttcatcgtcaacacctccctgaccctctccaccgccgcactgggcatctggctctggcacaacgggcaggtcggcgtgggcgcggttgctacagccaccgccatggcgttgcgcgtcaacggtttgtcgcaatacattatgtgggaatccgcgcagctgtttgaaaacatcggcaccgtcggcgacggtatggcaaccctgtccaaaccgcacaccatcctcgacaagccgaacgccctgccgttgaaagtgtcgcaaggcgaaatcaagttcgaacacgtcgatttttgctacgaagcaggcaaaccgctgctcaacggcttcaacctcaccatccgcccgggcgaaaaagtcggcttgatcggacgcagcggcgcgggcaaatccaccatcgtcaacctgcttttgcgcttctacgaaccgcaaagcggcacggtttcgatcgacgggcaggacataagcggcgttacccaagaatctttacgcgcccaaatcggtttggtcacgcaagatacctcgctgctgcaccgttccgtgcgcgacaacattatttacggccgccccgacgcgaccgatgccgaaatggtttctgccgccgaacgcgccgaagccgccggcttcatccccgacctttccgatgccaaagggcggcgcggctacgacgcacacgtcggcgaacgcggcgtgaaactctccggcgggcaacgccagcgcatcgccatcgcccgcgtgatgctcaaagacgcaccgattcttcttttggacgaagccaccagcgcgctcgattccgaagtcgaagccgccatccaagaaagcctcgacaaaatgatggacggcaaaaccgtcatcgccatcgcccaccgcctctccaccatcgccgcaatggacaggctcgtcgtcctcgacaaaggccgcatcatcgaagaaggcacacacgccgaactcctcgaaaaacgcgggctttacgccaaactctgggcgcaccagagcggcggcttcctcaacgaacacgtcgagtggcagcacgactga

SEQ ID NO: 38137 - DNA, 837 bp, Neisseria meningitidis
atgcaaatcatacataccattcaagaactgcgcgcctggcgtaaaaatgcgggaacggtggcatttgtgccgaccatgggcaatctgcacgaagggcatcttgccctcgttcgcgaagccaaaaaacgcgccgacaacgttgttgtcagcatattcgtcaaccgcctgcaattcggtcagggcgaggatttcgacaaatatccgcgtactttgcaacaggatgcggacaagctggaagccgagggtgttgccgttgttttcgcgcccgatgagaaagaactctatccgaacgtggagcaacggtataacgtcgaaccgcccaacctgcaaaatgagttgtgcggcaagtttcgtccgggacatttccgcggggtggcaacggtagtgtccaagctgttcaatattgtcgcgccggatgttgcctgtttcggcaaaaaagactatcagcagcttgccgtgattaaaggtttgaccgaggatttgaattttgatgttgaaatagtgcctgtcgatacggggcgcacggaagacggtttggcactctccagccgcaaccagtatttgagtgcggcggaacgcgacgaagcaccgcgcctgtaccgcgaattaaaggctgttgccgaatccttggtgcagggcagtttggattatgcaggtttggaaaaacgtgccgtccaatccctgacagaatacggctgggtggtcgattatgtcgaaatccgccgcgccgatacgctcgaagtggcgcgggcgggagataagaaactggtggtcttggccgccgcctgtctggggacgacgcgcctgattgacaatttggaaataaaactcccttaa

SEQ ID NO: 38138 - DNA, 816 bp, Neisseria meningitidis
gtggcaaaaattattgtagtaacttcaggtaagggcggtgtcggtaaaacgactaccagtgccagtattgcgacaggtttggcattacgcggatataaaactgcggtaattgattttgatgtgggtttgcgtaacctcgacctcattatgggttgcgagcgtcgtgtcgtttatgacctgatcaatgtcattcagggggaggcgacgctcaaccaagctttgattaaagataaaaattgtgaaaacctgtttattttgccggcttcccagactcgggataaagacgctttgacacgcgagggcgtagaaaaagtgatgcaggagctgtccggcaagaaaatgggctttgagtatattatttgcgactctcctgccggtattgagcagggtgcattgatggcgttgtattttgctgatgaagccattgtaacgaccaatcctgaggtttccagtgtgcgtgactccgacaggattttgggaattttgcaaagcaaatcccataaggcagagcaaggcggttcggttaaagaacatctgttgattacgcgttattctcccgaacgtgtggcaaaaggcgaaatgctgtctgtacaggatatttgcgatattctgcatattcctttgctgggtgtgattcctgaatcccaaaacgtcttgcaggcatccaattccggagaaccggtcatccatcaggacagcgtggcggcttccgaggcatataaggacgttattgcccgtcttttgggcgagaaccgtgaaatgcgtttcttggaagctgagaaaaaaagcttcttcaaacgtctgtttggaggataa

SEQ ID NO: 38139 - DNA, 276 bp, Neisseria meningitidis
atgaccgaacaagaaaacaaaacatccctcatcgaatttccctgcaccttcccattaaaagtaatgggggcggttcatcccgagttcgagcaggcggtattggacaccgtccgcctccacgcccccgacacgcaggcgcaccacatcaccacgcgtccgagcagcaaaggcaactataccggcgccaccgttcaggtaaaggttgaaaaccaagaacaattggacaacatctaccgcgcgctgacttcgcacgaactggtcaaagtggtactttga

SEQ ID NO: 38140 - DNA, 1113 bp, Neisseria meningitidis
  misc_feature 1094, 1095, 1096, 1097, 1098: 'n' is a, c, g or t
ttgggtacggtcggcggcggtacggctgccgtgttgcgggacaacgcggaggaaatttcccgtcgcttggggcgcgaaatccgtatttctgccgtgtgcgatttgagtgaagaaaaagcccgacaaacctgcccgtccgcagcctttgtcaaagatccgttcgaactggtcgcacgtgaagacgtcgatgtcgtcgtcgaattgttcggcggtaccggcattgccaaagatgcggtgttgaaagccattgaaaacggcaaacacatcgttaccgccaacaaaaaactgctcgccgaatacggcaacgaaatcttcccgctggcggaaaaacaaaacgtcatcgtccaatttgaagcggcagtagcgggcggtatcccaatcatcaaagccctgcgcgaaggtttggcggcaaacaggattaaatccatcgccggcattattaacggcaccagcaacttcatcctctccgaaatgcgcgaaaaaggcagcgcgtttgccgatgtactgaaagaagcgcaggcattgggttatgccgaagccgatccgaccttcgacatcgaaggcaacgatgcgggccataaaatcaccatcatgagcgcactggcattcggcacgccgatgaacttttccgcctgctacctcgaaggcatcagcaaactcgacagccgcgacatcaaatacgccgaagaacttggctatcgcatcaaactgttgggcattacccgcaaaaccggcaaaggcatcgagctgcgcgtccaccctaccctgattcccgaaagccgcctcttggcaaacgtcaacggcgtgatgaacgccgtgcgcgtcaacgccgatatggttggcgaaaccttatattacggcgcgggcgcgggcgcattgccgaccgcttccgccgtggttgccgatatcatcgacatcgcccgcctggttgaagccgataccgcccaccgcgtaccgcatctggcgttccaacccgcgcaagtccaagcgcaaaccatcctgcctatggacgaaattaccagcagctactacctgcgcgtccaagccaaagacgaaccgggcacgctggggcaaatcgccgcgctgtggcacannnnncacacacttaattaa

SEQ ID NO: 38141 - DNA, 150 bp, Neisseria meningitidis
atgtcgggtgcgacggggttggattattccgcagtcgcagcagttatggaatgcggcaatatcaagtcgaagaaacggaaagcactgttggagaaagtccgcctgatggagcttgaagtgttgtcaatgtgggcaggcgaacatgaataa

SEQ ID NO: 38142 - DNA, 930 bp, Neisseria meningitidis
ttgggcaaaactcgctaccgttttattaaatccgttatctacgaacatatgaagaatggtgcgtcgttagtctataaccatattaacaacgagccgttttcagaccatatcgcccgtcaagtcgcccgctttgccggcgcacatactattgttagtggatatcttgcttttggcagcgacgaatcttataaaaaccattgggacacccgcgatgtgtatgccatccagcttttcggcaagaaacgttggcaacttactgcccctgatttccctatgccattgtatatgcaacagactaaagatactgatatttccattcctgaacatatcgatatggatattatccttgaagcaggtgatgtcctctacatcccgcgcggttggtggcacagacctatcccgctcggctgtgaaaccttccacctcgctgtcggtacctttccacccaacggctataattacctcgagtggctaatgaagaaattccccacgatagaaagtctgcgccacagtttctcagactgggagcaagataggacgcgtatcaacgatactgccgcacaaattgctgccatgattgccgaccccgtcaattacgaagccttcagtgaagacttcctcggcaaagaacgcaccgataccgcttttcatctcgaacagttcgcgaatcccaacgctactccgctttcagacgacgtcaggttgagactaaatgccaataatttggatacgttggaaaagggatatttgattgggaatgggatgaagataagcgtagatgaattggggaaaaaagttttagaacacatcggtaagaatgaaccgttattgttgaaaaatctactggttaacttcaatcagggaaaacatgaagaagttaggaagttgatttatcagttgatagagttagattttctggaacttttgtga

SEQ ID NO: 38143 - DNA, 630 bp, Neisseria meningitidis
ttggaacgcggggcggcggctttgagtgatgccgaacttttggcaatcctgctgcgcgtcggcacgcgcggaatgagtgcggttgatttggcgcgttatttgctgcaggagttcggcagtttggggaggctgatgagcgcggaggtcggcaaactgtcggcatacaaagggatggggacggcaagtttcacacagtttgccgtggtcagggaaatcgggcggcggatattggcggaagaattgcaggagagcatcgtcctgtccgatccggatacggtggccgattatttacgctttcatttggggcaggaaaaagtcgaagtcagcgtcgcgctgctgctgaaccgccaaaaccaactgattgcggtcagagagctgtcgcgcggtacggttgcggaaaacacgatttacatccgcgaaatcgtcaaactggcattggacgaatatgccgacagcctgattatcgcgcacaaccatccgggcggctcgcccgaaccttcgcaggaagacatcatgttcacaaggcggctggcacaggcaatgtcgctggtcgatgtgtcgctgctcgaccattttatcgttacctcgcaaagcgtccgttcgttcagacagctcgggttgatgccctga

SEQ ID NO: 38144 - DNA, 252 bp, Neisseria meningitidis; identical to SEQ ID NO: 37103

SEQ ID NO: 38145 - DNA, 1578 bp, Neisseria meningitidis
atgaataaatttttcaaacgcctgtttgacattgtcgcctccgcttcaggactgattatcctgtcgcctgtgtttttgattttggtgtacctcatccgcaaaaacctaggctcgcccgtgttcttcatccaagagcggccgggcaaggatggcaagccgtttaaaatgattaaattccgctccatgcgcgacgcgcttgattcagacggcattccgctgcccgacagcgagcggctcacacccttcggcaaaaaactgcgtgccgctagtttggacgaactgcctgaattatggaatgtcttaaaaggcgacatgagcctggtcggcccgcgcccgctgctgatgcaatatctgccgctgtacgacaacttccaaaaccgccgccacgaaatgagaccgggcattaccggctgggcgcaggtcaacgggcgcaacgcgctttcgtgggacgaaaaattcgcctgcgatgtttggtatatcgaccattacagtttttggctggatatgaaaatcctgtttttgacagtcaaaaaagtcttgatcaaagaaggcatttcggcggaaggggaagccactatgccttatttcactggaaatcaaactaatgaaaaaaataatatactgattctgtcggcaggtcgccgtgtcgaattggtgcaggacttccaaaccgaagccgcacgtttttcagacggcatcagcgtttttgccactgacctcaacccccgcatgtcttctgcctgccatgtttcggacggttcatttgaagtgccgccgattagtgccgattcatatatcgacagcattttcaatctggcggtacgcgaaaatatcggtttaatcatcccaaccatagacaccgaactgcaaaagctggcagacgagcgcgaacgctttgaagcggcaagtgtccacatcgtcgtttccgattcggacttcatcgcacaatgccgcgacaaacggaaaaccgccaccttgtttgcccgctacggcatacgctcacccgaaatttacgaccgcaagaagttggttttcccttgcttcgccaagccttatgacggcagccgcgccatcggtgcaaaacggattgacacacctgccgacctgacaccggaagtcttggcagacaccaaattaatgttctgtcagtttatcgacatcgaaaataaattttccgagtttaccgtcgatatgtattacgaccgtcaatgccgtctgaaatgcgccatcccgcgaaaacgcttggaagtgcgctccggcgaaatcagcaaaggcgttacctgcaaaaacagcctctaccaaacgctgctggaaaaaatggcggtattgcagggcgcgcgcggctgtatcacggcgcagttcttctacaacgaagaaaccggcgaattctacggcgtggaaatcaacccccgcttcggcggtggcttcccgctgacgtatgccgcaggcggcaattatccgagccggttgatgcgcgaatacctcggcgacgaagaaatcccgttttcagacgactgggaaaacaacctcattatgttgcgctacgatgccaaggtcttggttcatgaaaacgattaa

SEQ ID NO: 38146 - DNA, 1257 bp, Neisseria meningitidis
atgaacgccgcacaactcgaccataccgccaaagttttggctgaaatgctgactttcaaacagccttccgatgccgtcctctccgcctacttccgcgaacataaaaagctcggccgccaagaccgccacgaaatcgccgaaaccgcctttgccgcgctgcgccactatcaaaaaatcagcactgccctgcgccgtcctcacgcgcagccacgcaaagccgcactcgccgcactggttctcggcagaagcaccaacatcagccaaatcaaagacctgcttgatgaagaagaaacagagttcctcggcaatttgaaagcccgcaaaaccgagttttcagacggtctgaataccgccgcagaattgccgcaatggctggtcgaacaactgcaacagcattggaacgaagaagaaatcctcgccttcggacgcagcatcaaccaagccgcgccgctcgacatccgcgtcaacactttgaaaggcaaacgcgataaagtgctgccgctgttgcaagccgaaagtgccgatgcagaggcaacgccttattcgccttggggcatccgcctgaaaaacaaaatcgcgcttaacaaacacgaactgtttttagacggcacactggaagtccaagacgaaggcagccagctgcttgctttattggtgggcgcaaaacgcggcgaaatcattgtcgatttctgtgccggtgccggcggcaaaaccttggctgtcggtgcgcaaatggccaataaaggcagaatctacgccttcgacatcgccgaaaaacgccttgccaacctcaaaccgcgtatgacccgcgccggactgaccaatatccaccccgaacgcatcagcagcgaacacgacagccgtatcgcccgactggcaggcaaagccgaccgtgtgttggtggacgcgccctgctccggtttgggtactttacgccgcaatcccgacctcaaataccgccaatctgccgagaccgtggccaaccttttggaacagcaacacagcatcctcgatgctgcctccaaactggtaaaaccgcaaggccgcttggtttacgccacttgcagcatcctgcccgaagaaaacgagctgcaagtcgaacgtttcctgtccgaacatcccgaatttgaacccgtcaactgcgccgaacttctgcaaagcctgaaaatcgatttggataccggcaaatacctgcgcctcgattcggcaaaacaccaaaccgacggcttcttcgccgccgtattgcaacgcaaataa

SEQ ID NO: 38147 - DNA, 723 bp, Neisseria meningitidis
atggacaaagatttgtatgccgtattgggcgtgtcgccgcaggcgggagcggacgaaatcaaacgcgcctaccgcaagctggcgatgaaatatcatcccgaccgcaatccgggcaatccgaaggcggaagaaaagttcaaagaaatccaacgggcttacgatacgctttccgacctgtcgaaacggatgcaatacgacgcgtccttcagacggcatgaggaacgcgggcggcaggaagaggcattccgccgcgaacaggcgcgcagggagcagttttaccgcgaacagatgcgccgcgaacaggcgttcagacaggcgtttgaacggcaggcatcacgttcgtgccatacttacgaaccgtccggcggcggaagcgggcgcaactatgtcctcgccgcctacatcctgttcggtttgggtgcaatcatgctgttcatgcccatagtcggcgtgattttcgcctatatgcccatagtcggcgtgattctcgcctatatgaaacggaacagtttggacagcattgtctatgccgcacataccgaatacctgattaaaaccttttggcgcacattttggctttatattttgggcgcgctgactgcccttttgggtatcggcgtgctgattattattgcaacgaacgtctggtatttctaccgcatcatcgccggctttatccgcttcaacggcggcagggcggttgcacccgagaaatggatatag

SEQ ID NO: 38148 - DNA, 324 bp, Neisseria meningitidis
gtgagggcggcgaggacggcagtgtttaacgagccgctgaacgtgtttaccaatcctgccgatttcggtgaaaccgtgatgattggcggtaaagaggtaaacgcgatatttgaccgtgaatttataacggatagcgggtttggcgttgccgttgccaatgccgacccgcaaatcatcgttactgaagacgacctgccggaagacgtgaagtcggtggttgttaccgtgcgtggcaaacgttatgcggtggcggaaaccgattttgacggctgcggaatggttgttgtgcaattgagggcgatacatgacaagccgacttactga

SEQ ID NO: 38149 - DNA, 1170 bp, Neisseria meningitidis
atggacaacgaattgtggattatcctgctgccgattatccttttgcccgtcttcttcgcgatgggctggtttgccgcccgcgtggatatgaaaaccgtattgaagcaggcaaaaagcatcccttcgggattttataaaagcttggacgctttggtcgaccgcaacagcgggcgcgcggcaagggagttggcggaagtcgtcgacggccggccgcaatcgtatgatttgaacctcaccctcggcaaactttaccgccagcgtggcgaaaacgacaaagccatcaacatacaccggacaatgctcgattctcccgatacggtcggcgaaaagcgcgcgcgcgtcctgtttgaattggcgcaaaactaccaaagtgcggggttggtcgatcgtgccgaacagatttttttggggctgcaagacggtaaaatggcgcgtgaagccagacagcacctgctcaatatctaccaacaggacagggattgggaaaaagcggttgaaaccgcccggctgctcagccatgacgatcagacctatcagtttgaaatcgcccagttttattgcgaacttgcccaagccgcgctgttcaagtccaatttcgatgtcgcgcgtttcaatgtcggcaaggcactcgaagccaacaaaaaatgcacccgcgccaacatgattttgggcgacatcgaacaccgacaaggcaatttccctgccgccgtcgaagcctatgccgccatcgagcagcaaaaccatgcatacttgagcatggtcggcgagaagctttacgaagcctatgccgcgcagggaaaacctgaagaaggcttgaaccgtctgacaggatatatgcagacgtttcccgaacttgacctgatcaatgtcgtgtacgagaaatccctgctgcttaagtgcgagaaagaagccgcgcaaaccgccgtcgagcttgtccgccgcaagcccgaccttaacggcgtgtaccgcctgctcggtttgaaactcagcgatatgaatccggcttggaaagccgatgccgacatgatgcgttcggttatcggacggcagctacagcgcagcgtgatgtaccgttgccgcaactgccacttcaaatcccaagtctttttctggcactgccccgcctgcaacaaatggcagacgtttaccccgaataaaatcgaagtttaa

SEQ ID NO: 38150 - DNA, 1020 bp, Neisseria meningitidis
atgaaaaaaattctcgttaccggcggcaccggttttatcggctcgcataccgttgtttctttgctgaaaagcggccatcaagtcgtgattttggataacctatgcaattccagcatcaatatcctgccacgcttgaaaacgattaccggccaagagattccgttttatcaaggcgatatccgcgatcgtgagattttgcgccgtatttttgcggaaaaccgcattgattcggtgattcattttgccggcttgaaagcggtgggtgaaagtgtggccgagccgatgaaatattatgataataatgtttccggcagcttggtgttggcggaagaaatggcgcgtgcgggcgtgtttagcattgtgttcagttcttcggcgacggtttatggcgatccgggcaaagtgccttataccgaggatatgccactgggcgataccaccagcccttacggcacatcgaaatcaatggttgagcgcattctcactgatattcaaaaagccgatccgcgctggagcgtgattttgttgcgttatttcaatccgattggggcgcacgaaagtggtttgattggcgagcagccaaacggcatcccgaataatttgttgccttatatctgccaagtggcggcaggcaaactgccgcaattggcggtatttggcgatgactaccctacccccgacggcacggggatgcgtgactatattcatgtgatggatttggcagaagggcatatcgcggcaatgaaggcaaaaagtaatgtagcaggcacgcatttgctgaacttaggctccggccgcgcttcttcggtgttggaaatcatccgtgcctttgaagccgcatccggcttaaatattccctatcaaatccaaccccgacgcgccggagacttggcgtgttcctttgccgacccgtcccataccaaacaagagacaggttgggaaaccaaacgcagccttgcgcaaatgatggaggattcgtggcgttgggtcagccgcaaccccaacggatatggggattaa

SEQ ID NO: 38151 - DNA, 1281 bp, Neisseria meningitidis
atgttagacatccaattgctccgcagcaacaccgccgccgttgccgaacggcttgcacggcgcggttatgactttgataccgcacgttttgacgcactggaagaacgacgcaagtccgttcaggtgaaaaccgaagaattacaagcctcgcgtaacagcatttccaagcaaatcggcgcactgaaaggtcagggcaaacacgaagaggcacaggcggccatggatcaagtcgcccaaatcaaaaccgatttggaacaggcagccgccgatttggaagccgtgcaaaaggaactggacgcatggctgttgagcattccgaacctgccgcatgaggacgtgcctttcggtaaggatgaaaccgaaaacgtcgaagtccgcaaagtcggcaccccgcgcgaatttgactttgaaatcaaagaccatgtcgatttgggcgaacctttgggtttggatttcgaaggtggcgcgaaactttccggcgcacgatttaccgtgatgcgcggacaaatcgcccgtctgcaccgcgccttggcacagttcatgctggatacgcacacgctgcaacacggctacaccgagcattacacgccttatatcgttgacgatacgacgctgcaaggtacgggccaactaccaaaatttgcggaagatctgttccacgttacccgtggcggcgacgaaaccaaaaccacccaatacctgattccgacagccgaagttaccctgaccaataccgttgccgacagcattatcccgtccgaacaactgccgctgaagctgaccgcgcattcgccctgtttccgcagcgaggcgggttcgtacggcaaagacacgcgcggtctgattcgccagcaccagttcgacaaagtagaaatggtacaaatcgttcatcccgaaaaatcatacgaagcactggaagaaatggtcggccatgccgaaaacatcctgaaagctttggaactgccctaccgcgtgattaccctgtgtaccggcgacatgggcttcggcgcaaccaaaacgtatgacttggaagtttgggttcccgcgcaaatacctaccgcgaaatctcaagctgctccaactgcgagatttccagcccgccgcatgaagcgcgtttcaaagacgaaacgcaaaacgcttggtacatactttgacggctccggcttggctgtcggcagaacgctggtcgccgtattggaaaaccatcaaaacgccgacggcagcatcaacatcctgccgcactgcaaccgtatatgggcggcgttgccaagttggaagtga

SEQ ID NO: 38152 - DNA, 1218 bp, Neisseria meningitidis
  misc_feature 1203, 1204, 1205, 1206, 1207: 'n' is a, c, g or t
atggcgttgggcgcattcgttgccggcatgctgctttcggaaacggaataccgtttccaagtcgaagacgacatccgcccgttccgcgatattttgctcggctttttctttatcacggtcggcatgaagctggacattcaggcattgatcggcggctggcggcaggtattgatgctgttggcaatgctgctggtgttgaaggcactggttgtgtttgccattgccttcaaaatgaaacattcggtcggcgacagcctcaaaacggctttgtatctcgcgcaaggcggcgagttcggcttcgtgatgctggccattgccgggcagcttgatatggtttcgccagaatgggaacaggcggcgacggcggcggttctgctgtcgatgattatcgcgcccttcctcttgggcggcagcgatgcgctggtcgggcgtttggtcaagtcaagctgggacatgaagtcgctcgatctgcacagtatgctggtagaaaccatgagcaagtccgaccatgtgctgattgtcggcttcggcaggggcgggcagacggtcggacgcgtccttgcccaagaggatattccgtatttcgcgctcgatttggacatcgcgcgggtgcaggttgccagaagtgcgggcgaaccggtgtcgttcggcgatgcgaaacgcagggaagtattggaagccgccggtctgggacgggcgaaaatggtggtggttacgctcaacaatatgcacgaaacgcaacacgttttagacaatgtgctgtccatgtatcccaatatgcccgtatatgtgcgcgccaccaacgacgattatgtgaaaacgtttaccgatataggtgcggaagaagccgtgtcggacaccaaagaaaccggactcgtgctggcaggctatgcgatgttaggcaacggcgcgtcgtatcggcacgtctatcagacgatggcaaatatccgccacagccgttatgccgcgttggagggactgtttgtcggtagtgatgatgaggcaggattcggcgaaaacggcgaaaccgtccgtcacgcctttcctttggctgcagaagcatacgccgtcggcaaaacagtcggcacgcttccgatggcggcttacggcatcaaactcttgttcgtccgccgccgcaccggccggattgaaaacccggatgcctcgtttacattgaaaggcggtgacgtgttggtggtcgcnnnnncacacacttaa

SEQ ID NO: 38153 - DNA, 342 bp, Neisseria meningitidis
  misc_feature 6, 7, 8, 9, 10: 'n' is a, c, g or t
gtgtgnnnnnataaagaaggcggcattaccgtcgaagactgcgcaaccgtcagcaaccacttgagccgcgtcttcatggttgaagacatcgactacaaaaacctggaaatttccagccccggactcgaccgtcccttgaaaaaagccgccgacttcgtgcgctttgccggtcagaatgccaaaatcaaaacccgcctgccgatagacggtcagaaaaactttatcggtaaaatcgaaggctgcgaaaacgataccgttaccatatccttcgacggcaaaaccgtacaaatcgaattgggcaacatcgacaaagcccgcctgcgccccgaattcaaattctaa

SEQ ID NO: 38154 - DNA, 291 bp, Neisseria meningitidis
gtggaatattttatgttgctggcaacagacggggagaatgtgtatgaagcgcgtatggcggcacgtcccgaacacctcaaacggctggagacgctgaagtcggaaggccggctgttgacggcaggcccgaatcctttgccggaggactccaaccgcgtttcgggcagtttgattgtggcgcagttcgagtctttggacgcggcgcaggcttgggcggaagacgatccctatgttcatgcaggcgtgtacagcgaagtgctgatcaagccgtttaaagcggtgttcaaataa

SEQ ID NO: 38155 - DNA, 216 bp, Neisseria meningitidis
atgacggaatcccatggttacctatcaaataatttacctgttaaaatcataaatgatattatttatgcaacccagttagtcgaagatttggttttaggaaaaataaaaattgttgattttttaaaatcatataacaatttttattgttggcttggttttgatgagttgcctcaatctgagaaaataaaattcctaagctatctcaatatattatga

SEQ ID NO: 38156 - DNA, 1566 bp, Neisseria meningitidis
atgacccaagacaaaatcctcatcctcgacttcggttctcaagttacccagctgattgcccgccgcgtgcgcgaagcccacgtttactgcgaactgcattccttcgatatgcctttggacgaaatcaaagccttcaaccccaaaggcatcatcctttccggcggccctaattccgtttacgaatccgactatcaggccgataccggtatttttgatttgggcattccggttttgggcatctgttacggcatgcagtttatggcgcaccacttgggcggcgaagtgcagcccggcaaccagcgcgaattcggttatgcgcaagttaaaaccatagacagcgagctgacacgcggcattcaagatggtgagccaaacacactcgacgtatggatgagccacggcgacaaagtgtccaaactgcccgacggtttcgccgtcatcggcaacaccccgtcctgcccgattgccatgatggaaaacgccgaaaaacaattctacggcatccagttccaccccgaagttacccacaccaaacaaggccgcgccctgttgaaccgctttgtcttggatatttgcggcgcgcaacctagctggacgatgccgaactacatcgaagaagccgttgccaaaatccgcgaacaggtcggcagcgacgaagtgattttgggtttgtccggcggcgtggactcttccgtagccgccgcgctgattcaccgcgccatcggagaccaactgacctgcgtgttcgtcgatcacggcctcttgcgcttgaacgaaggcaaaatggtgatggatatgttcgcccgcaatttgggtgtgaaagtgattcacgtcgatgccgaagggcagtttatggagaaactcgccggcgttaccgatcccgagaaaaaacgcaaaatcatcggtgcggaatttatcgaagtatttgatgctgaagaaaaaaaactcaccaacgccaaatggctggcgcaaggcacgatttaccctgacgtaatcgaatccgcaggcgcgaaaaccaaaaaagcccacgccatcaaatcccaccacaatgtcggcggcctgcctgaaaacatgaagctcaagctgcttgagccgttgcgcgatttgttcaaagacgaagtgcgcgaactgggcgtggctttgggtctgccgcgcgaaatggtgtaccgccatcccttccccggtcccggtttgggcgtgcgcatcttgggcgaagtgaaaaaagaatacgccgacttattgcgtcaagcagacgatatttttattcaagaattacgcaacaccaccgacgaaaacggcacgtcttggtacgacctgaccagccaagccttcgccgtgttcctgcctgtgaaatccgtcggcgtaatgggcgacggacgcacttacgactacgtcgtcgcactgcgcgcagtcatcaccagcgactttatgaccgcacattgggctgagttgccttactcactgctcggacgcgtgtccaaccgcatcatcaacgaagtcaaaggcatcaaccgcgtggtgtacgatgtcagcggcaaaccgcctgccaccatcgagtgggaataa

SEQ ID NO: 38157 - DNA, 879 bp, Neisseria meningitidis
ttgaaccgccacaaaagcaccatcagccgcgaaatcagacggcaccgcacccaagggcagcaatacagcgccgaaaaagcccagcggcaaagccggactatcaaacagcgtaagcgacaaccctataagctcgattcgcagctgattcagcacatcgacacccttatccgccgcaaactcagtcccgaacaagtatgcgcctacctgtgcaaacaccaccggatcacgctccaccacagcaccatttaccgctaccttcgccaagacaaaagcaacggcagcacgttgtggcaacatctcagaatatgcagcaaaccctaccgcaaacgctacggcagcacatggaccagaggcaaagtccccaaccgtgtcggcatagaaaaccgacccgctatcgtcgaccagaaatcccgtatcggcgattgggaagccgacaccattgtcggcaaaggacagaaaagcgcattattgaccttggtcgaacgcgttacccgctacaccatcatctgcaaattggatagcctcaaagccgaagacactgcccgggcagctgttagggcattaaaggcacataaagacagggtgcacaccattaccatggataacggcaaagagttctaccaacacaccaaaataaccaaagcattgaaagcggagacttatttttgtcgcccttaccattcttgggagaaagggctgaatgagaacaccaacggactcatccggcaatacttccccaaacaaaccgatttccgtaacatcagtgatcgggagatacgcagggttcaagatgagttgaaccaccgaccaagaaaaacacttggctacgaaacgccaagtgttttattcttgaatctgttccaaccactaatacactag

SEQ ID NO: 38158 - DNA, 891 bp, Neisseria meningitidis
atgaacagcccttttcacaacatcggcatcgtaacccgccccaacacgcccgacatccaagacaccgcacacacgctgattacctttttgaaacagcacggctttaccgtctatctcgacgaagtcggcataaaggaaggctgcatctacacccaagacaccgtcggctgccatatcgtcaacaagaccgaactggggcaatactgcgacctggtcgccgttttaggcggagacggcacctttctctccgtcgcccgcgaaatcgccctgcgcgccgttccgattatcggcatcaaccaagggcatttgggcttcctgacccaaattccccgcgaatatatgacggacaagctattgcccgttttagaagggaaataccttgccgaagagcgcatcctgattgaggccgcactcatccgcgaaggcaaaaccgccgaacgcgccatcgccctcaacgatgccgtcctctcccgtggcggcgccggacagatgattgagtttgaagtcttcgtcaatcgggaattcgtctatacccagcgttcggacgggctgattgtctccacccccaccggatcgaccgcctattcgcttgccgccggcggccccatcatgcaggcaggattgcacgccttcacgctcgtccccatctgcccgcaatccatgaccaaccgccccatcgccattccagacacgtccgaaatcgaaatcctcgttacccaaggcggcgacgcgcgcgtccatttcgacggtcaaacccatatcgacgtgcaaaacctcgaccgcatcaccatccgccgctaccgaaaccccttacgcatcctacatccgaccgactaccaatatttcaaaaccctgcgccaaaaactgcactggggcgaacaattggtctaa

SEQ ID NO: 38159 - DNA, 927 bp, Neisseria meningitidis
atgtcttttgccttcttttttcccggacaaggttcccaaagcctcggtatgatgaacggctttgccgaacacgccatcgtcaaaaacacctttgccgaagcctccgccatattggggcaggacttgtgggcgatgattaacggcagcgatgccgaaatcatcggacaaaccgtcaatacccagcccatcatgctcgccgccggcgttgccgtttaccgcgcctatttagaagcgggcggcaaaacgcctgccgccgttgccggacacagcctcggcgaatacaccgcactcgttgccgccggcgcattgaattttgccgacgcggtcaaactcgtgcgcctgcgcgccgaactgatgcagtccgccgtaccgcaaggcgtgggcgcaatggcggcgattctcggcttggaagatgagcaggtaaaacaaatttgcgccgaagccgcccaaggcgaagtggtcgaagccgtcaacttcaactcacccggacaaatcgtgattgcaggcaatgccgccgccgtcggacgcgccatggctgccgccaaagaagccggtgccaaacgcgccctgccgctgcccgtgtccgtaccttcccattgcagcctgatgaaacccgccgccgacaaactcgccgaagccctcaaaaccgtcgaaatcaagcagccgcaaatccgcgtcatccacaacgccgacgttgccgcctacgatgatgccgacaaaatcaaagacgcgctcgtccgccagctttacagccccgtacgctggacggaaaccgtcaacgcccttgtttcagacggcattgccgaatccgccgaatgcggcccgggcaaagtgttggcgggcttggcaaaacgcatcaacaaagccgccgcgtgcagcgcactgaccgatgccggacaggttgccgcctttatcgaagcgcactga

SEQ ID NO: 38160 - DNA, 267 bp, Neisseria meningitidis
atgaatcaagctgttgcacaatttgctcctttagtgttgattatggtggtgttctacttcctgatcatgcgtccgcagcaaaagaaattcaaagcgcatcaggcaatgcttgccgccttgaaagtcggcgacaaagtggtcttggcggcaggtttcaagggtaaggtaaccagagtcggcgaacagttttttaccgtggatatcggacagggtacaaaaatcgaggtcgaagtggaacgcaatgcgatttctgcaaaagtcgattga

SEQ ID NO: 38161 - DNA, 747 bp, Neisseria meningitidis
atggaaaccccgaccaacaccccgcaacgctccctgcgtcaaaacagtatctacctgctgcccaactcctttaccatcgccgcgctgttttccgcgttttacgcaatcacccaatccatgcacggacgttatgaaaccgccgccatcgcggtattcatctctatgttgctggacggtatggacgggcgcgtggcgcggctgaccaacagccaaagcgcgttcggggaacagctcgacagccttgccgatatggtcagcttcggcgttgcccccgcgcttattgcctacaaatggcagctttggcagttcggcaaaatcggttattccgtcgccttcatctactgcgcctgcgccgccctgcgcctcgccctgttcaacacgctcatcggcaaggtggacaaacgctggtttatcggcgtgcccagtccgactgccgccgcgctgattgtcgggctgatttgggtcaaccacagcgtcgaaaaattccccgccgtccactggtgggcattgggcatcacactgtttgccggcctgtcgatgattgtccaaatccctttttggagttttaaagaaatcaacatccgcagacaagtcccctttgtcggaatgctgcttgccgtcttattgctgcttctggtcacttgggaaccgtcgctcgtcctcttcctgttctttctcggatacagcctgtccggctacattatggcggcacgccgattctggaaaaaatacagaaaggcggattaa

SEQ ID NO: 38162 - DNA, 1008 bp, Neisseria meningitidis
atgagcaccttcttccagcaaaccgcccaagccatgattgccaaacacatcgaccgtttcccgctattgaagttggaccaggtgattgattggcagccgatcgaacagtacctgaatcgtcaaaaaacccgttaccttagagaccaccgcggtcgtcccgcctgtcccctgttgtccatgttcaaagccgtcctgctcggacaatggcacagcctctccgatcccgaactcgaacacagcctcatcacccgcatcgatttcaacctgttttgccgtttcgacgaactgatcatccccgattacagtaccttatgccgctaccgcaactggctggcgcaagacgacaccctgtccgaattactcaaactgattaactgccaactgaccgaaaaaggcttaaaagtagagaaagcatccgccgccgtcgttggcgccaccattattcaaaccgccggcagcaaacagcgccaggccatagaagtcgatgaagaaggacaagtcagcggccaaaccacaccgagtaaggacagcgatgcccgttggataaagaaaaacggcctctacaaactcggttacaaacaacatacccgtaccgatgcggaaggctatatcgagaaactgcacattacccccgccaatgcccatgagtgcaaacacctgccgccgttgttggaaggggtacctagaggtacgaccgtctatgccgacaaaggctacgacagtgcggaaaaccggcaacatctggaagaacatcagttgcaggacggcattatgcgcaaagcctgccgcaaccgtccgctgacggaagcgcaaaccaaacgtaaccgatatttgtcgaaaacccgttatgtggtcgaacagagcttcggtacgctgcaccgcaaattccgctatgcgcgggcagcctatttcggactgattaaagtgagtgcgcaaagccatctgaaggcgatgtgtttgaacctgttgaaagccgccaacaggctaagtgcgcccgctgccgcctaa

SEQ ID NO: 38163 - DNA, 348 bp, Neisseria meningitidis
atgaatcgaacaaaaacgtgtaaggagtgcggagagattaagccgataacggcgtttccgaaaaacggctttgacagaaaaaccgggctgcaaaaatacgcgccccgatgccgccgatgccacaacgtctatcagcaagatttgctgtacaagcgccgtgaaaaagaatttgagcaaaagcaggcagtcatggctgcattgatggacgccgagcgcgaaaaagaggaggcagctaaggcgcgaagcatcgcacaaagcctcgtgttggcgaaagcagcctgtccgatactgcacatcggcttgtggactgagccgttatttatccctcaagggatgttacagatttaa

SEQ ID NO: 38164 - DNA, 1185 bp, Neisseria meningitidis; identical to SEQ ID NO: 37431

SEQ ID NO: 38165 - DNA, 588 bp, Neisseria meningitidis
atggaacataagctgccgcaactgccttatgaactggacgcattgtccccgcatctgagcaaagagactttggaattccactacggcaaacaccatcaaacctacatcaccaacctgaacaatcaaatcaaaggcaccgaatttgaaaacctgcctttggaagagattgtgaaaaaatcttcgggcggcgtgttcaacaacgcggcacaaacttggaaccacaccttctactggctgggtttcacgtccaaaggtcaaggcaaacctgccggcgaactggccgccgccatcgacgcgaaatggggcagcttcgagaaattccaagaagcgttcaatgcctgcgcggccggtacttttggctccggttgggcgtggctggtaaaaacccctgccggcggattggatttggtttctacttccaacgccgctacgccgctgaccactgaaaacacgccgctgctgacctgcgacgtgtgggaacacgcctactacatcgactaccgcaacagccgccccaactacctgaaaggtttttgggaaatcgtcaactgggacgaggttgccaaacgttttgccgccttgtcctga

SEQ ID NO: 38166 - DNA, 561 bp, Neisseria meningitidis
  misc_feature 538, 539, 540, 541, 542: 'n' is a, c, g or t
atgaaacagaaaatttttgtcctttataccggcggcaccatcggcatgacgcaaagcagcgaaggcctgcgccccgataccgcgctggtcgggcaggcactcgcgccgttttcaaacggcatggatttcgattggcacgtttgtgggacgctgattgattcttccgccgtccaactgcaaaactggtgcgcttggctggacatcattgccgccgcgctgccgcagtacgacggcgttttggtgctgcacggcacggacacgctcgcctataccgccaatctgttcgccctcgccctgcagggtttggacaagccaatcgtcctgaccggttcccaatggccttacgccgctgaaaacagcgacgccccgcgcaacctctccaccgccgttgccgccttcagcctcaagctcaaacaaaccgttatcgcgtttgacggcaaactgtatcccgccgtcggcagcagcaaagtcagcaccgaaaccgccgcaggcttcgacaatccgcatttcggcgccatcgccgaatgggacgaaacannnnncacacacttaattaattaa

SEQ ID NO: 38167 - DNA, 1113 bp, Neisseria meningitidis
atgaccgcaaaggaagaactgttcgcatggctgcgccatatgaacaaaaacaaaggttccgacctgtttgtgacgacccatttcccgcccgcgatgaagctggacggcaaaatcacccgcatcacggacgaaccgctgacggcggaaaaatgtatggaaatcgccttttcgattatgagtgcgaagcaggcggaagaattttcatcgaccaacgagtgcaacttcgccatcagcctgccggacaccagccgcttccgcgtcaatgcgatgatacagcgcggcgcgacggcgttggtattccgtgcgattaccagcaagattcccaagtttgaaagcctcaacctgccgccggtcttgaaggatgtcgcgctgaaaaaacgcgggctggttatttttgtcggcggcaccggctcgggcaaatcgacttcgcttgcctcgcttatcgattaccgcaatgaaaattcgttcggacacattatcaccatcgaagacccgatcgagtttgtccacgaacacaaaaactgcatcatcacccagcgagaggtcggcgtggatacggaaaactggatggcggcgttgaaaaacacgctgcgtcaggcgcccgatgtcatccttatcggcgaaatccgcgaccgcgaaacaatggactacgccattgcctttgccgaaacggggcatttgtgtatggcgacgctgcacgccaacagcaccaatcaggcactcgaccgcatcatcaactttttccccgaggagcggcgcgaacaattgctgacggatttgtcgctcaaccttcaggcgtttatttcgcaacgcctcgttccgcgagacggcggcaagggcagggtggcggcagtcgaggtgctgctcaattcgcccctgatttcggagttgattcacaacggcaacatccatgaaatcaaagaagtgatgaaaaaatccactaccctgggtatgcagaccttcgatcaacacctttaccaattgtatgaaaaaggcgatatttccctgcaagaagcattgaaaaatgccgattccgcacacgatttgcgtttggcggtacagttgcgcagccgccgcgcgcaaagttccagccccgatttggaactgctctga

SEQ ID NO: 38168 - DNA, 681 bp, Neisseria meningitidis
atgacttataccattacccccatcggcaccgcccgatcgccctacaaacagaaattcggcatcgcccgccagcccggtttagcctctgccgcagaagtatgcatcgagctgaatcccgaatttaccgcagacagcgtgcgcgggctggaagatttcgattatgtgtggataagttttatttttcacggcgtattggatgaaggctgggcgcaaatggtgcgcccgccacggctcggcggcaaacaaaaaatgggcgtgttcgccacgcgcagcccccaccgccccaaccatctcggactctcgctcctgaaactcgaacgcatcgaaaccggcaaacccgtccgcctctattgcagcggcgcagacctgttggacggcacaccaattatcgacataaaaccctacatcccctttgtcgaatccaaacccgatgcatcatccggcttcgtcagcggcaaacccgaagagcttgaagttgtatggctggaaaacatcggcgcggaaaatttatctgaaagcacccaaaacctaatcagccaaagcattgcccaagacccgcgccccgcctatcaggatattcccgaacggatttatgtgatgaatattgcggattacgaagttaggtttcaaatcgaagaaaaccgtgcaaccgttattgatctttccccaaccccgctttaa

SEQ ID NO: 38169 - DNA, 2394 bp, Neisseria meningitidis
atgaaactgaaacagattgcttccgcactgatggtcttgggcatatcgcctttggcacttgccgacttcaccatccaagacatccgcgtcgaaggcttgcagcgtaccgagccgagtaccgtattcaactacctgcccgtcaaagtcggcgacacctacaacgacacacacggcagtgccatcatcaaaagcctgtacgccaccggtttctttgacgacgtacgcgtcgagactgcggacgggcagctcctgctgaccgtcatcgaacgccccaccatcggctcgctcaacatcaccggcgcaaaaatgctgcaaaacgacgccattaagaaaaatctcgaatcgttcgggctggcgcagtcgcaatactttaatcaggcgacactcaatcaggcagtcgccggcctgaaagaagaatacctcgggcgcggcaaactcaatatccaaatcacgcccaaagtaaccaaactcgcccgcaaccgcgtcgacatcgacatcacgattgacgagggcaaatccgccaaaatcaccgacatcgaatttgaaggcaaccaagtctattccgaccgcaaactgatgcggcagatgtcgctgaccgaaggcggcatttggacatggctgacacgaagcaaccaattcaacgagcagaaatttgcccaagacatggaaaaagtaaccgacttctaccaaaacaacggctacttcgatttccgcatcctcgataccgacatccaaaccaacgaagacaaaaccaagcagaccatcaaaatcaccgtccacgaaggcgaacgtttccgttggggcaaagtctccatcgaaggcgacaccaacgaagtccccaaagccgaactggaaaaactgctgaccatgaagcccggcaaatggtacgaacgccagcagatgaccgccgttttgggtgagattcagaaccgcatgggctcggcaggctacgcatacagcgaaatcagcgtacagccgctgccaaacgccgaaaccaaaaccgtcgatttcgtcctgcacatcgaaccgggccggaaaatctacgtcaacgaaatccacatcaccggcaacaacaaaacccgcgacgaagtcgtgcgccgcgaattgcgccaaatggaatccgcgccttacgacacctccaagctgcaacgctccaaagagcgcgtcgagcttttgggctacttcgacaacgtacagtttgatgccgtcccgcttgccggcacacccgacaaagtcgatttgaacatgagcctgaccgaacgttccaccggctcgctcgacttgagcgcgggctgggtacaggataccggcctggtcatgtccgcaggcgtttcccaagacaacctgttcggtacgggcaagtcggccgccctgcgcgcctcacgaagcaaaaccacgctcaacggctcgctgtcgtttaccgacccgtacttcacggcagacggggtcagcctgggctacgatgtttacggaaaagccttcgacccgcgcaaagcatcgaccagcatcaaacaatataaaaccaccacggcaggcgcaggcatccgcatgagcgtgcctgttaccgaatacgaccgcgtgaatttcggtttggtggcagaacacctgaccgtcaacacctacaacaaagcgcccaaacactatgccgactttatcaagaaatacggcaaaaccgacggcacagacggcagcttcaaaggctggctgtacaaaggtaccgtcggctgggggcgcaacaaaaccgacagcgcgttatggccgacgcgcggctacctgacgggcgtgaacgccgaaatcgccctgcccggcagcaaactgcaatactactccgccacccacaaccaaacctggttcttccccctgagcaaaaccttcacactgatgcttggcggcgaaatcggctatgccaacggctacggcaaaaccaaagaaatccccttctttgaaaacttctacggcggcggcctgggttcggtacgaggttacgaaagcggcacactcggtccgaaagtctatgacgaatacggcgaaaaaatcagctacggcggcaacaaaaaagccaacgtctccgccgagctgctcttcccgatgcccggcgcgaaagacgcgcgcaccgtccgcctgagcctgtttgccgacgcaggcagcgtgtgggacggcaaaacctacgacgacaacagcagttccgcgaccggcggcagggttcaaaacatttacggcgccggcaatacccataaatccacctttaccaacgaattgcgctattccgccggcggcgcggttacctggctctcgcctttaggcccgatgaaattcagctacgcctacccgctgaagaaaaaaccggaagacgaaatccaacgcttccaattccaactcggcacgacgttctaa

SEQ ID NO: 38170 - DNA, 900 bp, Neisseria meningitidis
atgtggttcaagcagattagtttttatccgctcaacaaagaaaagctgcctgaggcggacatacttgccgacaaacttgctgaagctgaatttacccattgccaaggcttagactggttcagcgaaggctttaccgcaccggtttcattctcccctgaactcgttttccctgccgactttaccttgcgcgtcgccctgaaaaaagaagaaaaagtcctgcctgccggcgtcatccgcgatattttggaagagaaggtagcggaaatccaaaacaatgaagcccgcaatgtcggtcgcaaagaaaaacaagagcttaaagagcaaattacagacgacctgctgccccgagcgtttacccgcagcagccgtacagaagcggtgtttaacacccgccacggctacctgctcgtcaataacgcggcttccgccaaagcagaaaacatcctgaccaagctgcgcgaagctttgggcggtttggaagcctcgctgccgaataccaagcaatcgccctcttccttgatgaccggctggctgttgcaagggcattgcgaaggcggttttgaattagacagcgattgcgaactcaaaggtacgggcgatattgttcccgtcgtcaaagtatccaaacaagatttaaccgccgacgaagtggttcaacacgtcaaaaacggtaaaaccgttacccaactgggcttggtgtggcgcgaacaaattgcctttatcctcactcaagacttcacactcaagcgcatccaatacctcgacgtattgcaggaagaagccgaaagcaacggcgacgatgccgccggccttgccttcgcctcgcaaattctgatggcggaatccgtcagcaccatgttggaagaactggtttcctatttgggcggctggcaagattga

SEQ ID NO: 38171 - DNA, 696 bp, Neisseria meningitidis
atgtttgtttggcacgaatacgaaaatgcggcagaagcggcgcagtctttggctgacgcagtggcggatgctttgcagggcgcactggacgagaagggcggtgcggtgttggcagtttccggcggacgttcgccgattgcatttttcaacgccctgtcgcaaaaagatttggattggaaaaacgtcggcatcaccttggcagatgaacgcatcgtgccgaccgtccacgccgacagcaataccggtttggtgcgcgaatacctgttgaagaacaaagcggaagcggcaatgtggattcctatggtggaagacggaaaaactgaaaccgaattacatcccgatgctgttgtcgattatgcactgaaacattacaaacagcccgatgttttggttttgggtatgggaaacgacgggcatacggcttcgattttcccgaaagctccgcagtttcagacggcaatcgacggttcggcaggtgtcgcgctggtgcataccacgcccgttaccgcgccgcacgagcgcgtcagtatgaccttggatgcgattgcccatacggggcatgtgtttttggcgatacggggcgaagagaaaaaagccgtgttcgaccaagccgcacaaggcgaaaaccgcgaatatccgatcaacctcgttttgaaccatcaaggagtgaactgccatgtcttctacgccgaataa

SEQ ID NO: 38172 - DNA, 732 bp, Neisseria meningitidis
  misc_feature 8, 9, 10, 11, 12: 'n' is a, c, g or t
gtgtgtgnnnnngtttccggttctttaatcgagcgcatcaacaataaaggcacggttaccgtcggcacggaaggcacttacgcaccgtttacctaccacgacaaggacggcaaactgaccggttacgatgtggaagtaacccgcgccgtggcggaaaaactgggcgtgaaagtcgagtttaaagaaacgcaatgggattcgatgatggcgggtttgaaggcggggcgtttcgacgtggtggcaaaccaagtcggtctgaccagccccgaacgccaagcgacattcgacaaatccgatccttacagctggagcggtgccgtattggttgcccgtaacgacagcaacatcaaatctatcgacgacatcaaaggcgtgaaaaccgcacaatccctgaccagcaactacggcgaaaaagccaaagctgcaggcgcagatttggtggcagtggacggtttggcgcaatcgctgaccctgattgaacaaaaacgtgccgatgcaaccctgaacgacgaattggcggttttggactatctgaagaaaaacccgaatgcgggcgtgaaaatcgtttggtccgcacctgccgatgaaaaagtcggttccggcctgattgtcaacaagggcaatgacgaagccgtggcgaaattcagtacggcaatcaacgagctgaaagccgacggtacgctgaaaaaactgggcgaacaattcttcggaaaagacatcagtgttcaataa

SEQ ID NO: 38173 - DNA, 240 bp, Neisseria meningitidis
gtgcgcggcatccgttctgcttcggattacgaatacgaacgttccatgcgccacatcaacagcgacctcgcccccgaaatatccaccgtattcctcatgccgccgcgcgaaatcgccgaagtgtcgtccactatggtcaaaggactggtcgggccggaaggctggacggaaacgatccaccgctacgtgccgcaagctgtgtacgaaaaaatccttgccgaacatcaacacgaaaattga

SEQ ID NO: 38174 - DNA, 786 bp, Neisseria meningitidis
atgaatccgtttttgaatacagcctttaaagccgcccgccgtgccggtcagatgatgatacgcgccgcgggcaatctcgatgccgtcaaaaccgacagcaaagcattcaacgattttgtttccgatgttgaccgcaattccgaaatcatcctggttgaggctttgaaagaagcctatccgcaccacaaaatcacttgcgaagaaagcggctcccacggtaaagccgcagccgaatacgaatggattatcgatccgctcgacggcacgaccaacttccttcacggccatccccaatacgccatctctatggcactcctgcacaaaggcgtgttgcaagaagctttggtgtacgcccccgaacgcaacgacgtttacatggcttcgcgcggcaaaggcgcgttgctcaatgaccgccgcatccgcgtttccaaccgcatcgaattgaaccgctgcctgatcggtaccggctttcctgttgtcgatcaaagcatgatggacaagtatctggcgattttgaaagatttcttggcaaaaaccgccggcggccgtcgtgaaggcgcggcttctttggatttgtgtgctgtggcgactggttgttttgacggctttttcgagttcaacctcaaaccttgggatattgccgcaggcgcattgattgttcaggaagcgggcggtatcgtaaccgatatgacgggtgaagacggctggctggaaagcggcgatattgttgccgccaatcccaaagtgctggcgcaaatgttaaaaatcatttccgcacacgtttaa

SEQ ID NO: 38175 - DNA, 1005 bp, Neisseria meningitidis
atgaccatcatcgtaacaggcgcggccggctttatcggcagcaacatcgtcaaagcacttaatcaacgcggtattaccgacatcgtcgccgtcgataatttgagcaaaggcgaaaaattcaaaaaccttgccgagtgcgaaatcgcccattatctcgacaaacacgaattcatccgccaagtgagggaacacattttaccttatcaaaacatcgaagccgttttccatcaaggcgcgtgttccgatacgatgaaccacgacggtttgtatatgatggaaaacaactaccagtacacgctggatttgttgaactggtgtcaggacgaacgcattcccttcctttatgcctccagtgcggcggtttacggcaaaggcgaaatcttccgcgaagagcgcgaactcgaaaaaccgcttaatgtgtacggctactccaaattcctgttcgaccaagtattgcgccgccgcatgaaagaaggtctcaccgcccaagtcgtcggcttccgctacttcaacgtttacggacaacacgaacaacacaaaggccgcatggcatccgtcaccttccaccatttccaccaataccgcgaacacggttacgtcaacctgttcggcagcaatgacggttacggcaacggcgaacaaacccgcgactttgtcagcgtcgaagacgttgccaaagtcaacctctacttcttcgaccatcccgaactttccggcatctacaacctcggtaccggccgcagccaacagtttaacgaactcgccgccgccaccgtcaacgcctgccgcgccgccgaaggcaagcctgaaatgagcttgaaagagctggtggaagaagaacttatccgctacatccccttccccgacgcactcaaaggcaaataccagagcttcacccaagccgacatcaccaaattgcgcgaagccggatataaggaagaatttttcgatgtcaaatcaggcgtcgaccgctacgtcaaatggatgctggaaaatttggcttaa

SEQ ID NO: 38176 - DNA, 597 bp, Neisseria meningitidis
ttgcggcaaggcttgtggaatgtgtttttgcctgcttctgatgccgaaattttatttttcttgccgaacaatttgttttctcaaggcaaacttgattataatgggggcatgaaaaaataccttatccctctttccattgtggcagttctttccggctgccagtctatttatgtgcccacattgacggaaatccccgtgaatcctatcaataccgtcaaaacggaagcacctgcaaaaggtttccgccttgcctcttcgcattggacggatgttgccaaaatcagcgatgaagcgacgcgcttgggctatcaggtgggtatcggtaaaatgaccaaggttcaggcggcgcaatatctgaacaacttcagaaaacgcctggtcggacgcaatgccgtcgatgacagtatgtatgaaatctacctgcgttcggcgatagacagccagcggggcgcaatcaatacggaacagtccaagctgtatatccagaatgccttgcgcggctggcagcagcgttggaaaaatatggatgtcaaacccaacaaccccgcatttaccaactttttgatggaagtgatgaagatgcagcccttgaaatga

SEQ ID NO: 38177 - DNA, 1782 bp, Neisseria meningitidis
atgccttatttcgccctgtttgacgatgccgtaagcggccgcgcaaaacgctatcaaaatcatgtggaaagccgttttttccgtcccgaagaactcgatgctttggacggcgcgctgcaatcgggctggcaaaaagggctgcatgccgtgttgtttgcagactacggattcggtttgccgctgacgggggttgagtccgagcgcggcggcaaccttgccctgcactggtttgccgactgcgccgacaccgatgccgcaagctggcttgcccgacactcagacgactttcccgccggcatttccacgccgcaatcctccgtatccgaagccgattacctcgaccatatccgccaaatccacgaagccatccgacgcggcgacacctatcaaatcaactacactacccgcctgcacctgcaagcctacggcaatcccgtcaaactttaccaacgcctgcgccagcccgtcccctatgccgttttgtcccacctgcccgatgcacaagggcaatccgcgtggacgctgtgtttctcgcccgaactcttcctcaaaatcggttcggacggcaccatcagcaccgaaccgatgaaaggcaccgcgccgattttgggcgacggacaagacgaacgccgcgccgccgagttgcaagcagacccgaaaaaccgcgccgaaaacgtgatgattgtcgatttgctgcgtaacgatctcggcaaaatcgcccaaaccggcacagtatgcgtacccgaaccgtttaaagtatcgcgtttcggcagcgtttggcagatgaccagcaccatccaagcccaagccttgccgcacacctcgttcgccgacatcctccgcgccgccttcccctgcggcagcatcaccggcgcgcccaaaaaaatgagtatgcagattatcgaatcgctcgaagccgaagcgcgcggactttatacgggcagcatcggctatttgaacccgtgttccggcggcttggggtttgaaggcacgttcaacgtcgttatccgcaccttgtcgctcacgccgctttcagacggcatttatcaaggcgtgtacggtgtcggttccggcatcgtcatcgacagcgaccccgccgccgaatatcgggaatgcggctggaaagcccgtttcctcaacgaattgcgccccaacttcggcatttttgaaaccctgcgcgcggaaaacggacgctgcaccctgctcgaccgccacctatgccgtctgaaaacctccgcacgcgccctcaacctgcccctgcccgacggctgcgaaaatcaaatcaaacaatacattgccgacttgcccgatggcgcgttccgcgtcaaagccctgctcgcttcagacggcatcagcctgtcccgcgccgttttaaaccgtctgaccgacaaacaacgcgtcatcatttcgccgaccatcctgcccgcacaaaactacctgcgccgcttcaaaaccacacaccgcgccctcttcgaccaagcgtggcaaaccgccgaaacacaaggcgcgttcgacagcctgtttttcaattcagacggcatcctgctcgaaggcggcagaagcaacgtgttcgtcaaataccaagggcaatggctcacaccgtctttagatttagacattttaaacggcataatgcgccaagccgtattggacgaaccgcaaaaatatttgcaaacaaatcaagtaatcgaaacacacatcacacaaaaaacactgcaagaagccgaagaaatccgcctctccaacgccttgcgcggcgtatttgccgccgcccttgcctga

SEQ ID NO: 38178 - DNA, 1446 bp, Neisseria meningitidis
atgaactggtctgatttgaatttgatgcccgccatgcccgaaatcgtgctgcttgcgctgctggtgttattgttgctggcggacttgtgggtcagtgatgacaaacgccggtggacgcattacggcgcgttggcaacggtggcggttacggctgtggtgcagcttgccgtttgggaacagggcagcacgtcttcgttcaacggcatgtatattgcagacggtatgtcgcgtttggcaaaaatggttttatatgccttgacgtttgccctgtttgtttatgccaagccctacaaccaagtgcgcggtattttcaaaggcgagttttacaccctgtcgctgtttgccctcttgggcatgagcgtgatggtgagcgcggggcattttttaactgcctatatcggtttggaactcttgtcgctcgccctttacgccctgattgccctgcgccgcgattccggctttgccgccgaagccgccttgaaatattttgttctgggcgcgctggcatccggcctgctgctctacggtatttctatggtttacggcgcaaccggttcgctggaatttgccggcgtgctcgcctcttccttcaatgaagaagcaaacgaatggctgttgaaactgggtctggtgtttatcgtcgtcgccgttgcgttcaaactcggcgcggtgccgttccatatgtgggtgcccgacgtgtatcacggcgcgcccacttctgttaccgccctagtcggcactgccccgaaagtcgccgccgtcgttttcgctttccgcatcctcgttaccgggttgggaaccgtgcatcatgactggtctctgatgtttgccctgcttgccgccgcctcgctgctggtcggcaaccttgccgccatcatgcagaccaatatcaaacgtatgctcgcctattccaccgtatcgcatatgggctttatcttgttggcgtttatggcaggcgcggtcggctttgcggcgggtctctattacgccattacctacgcgctgatggcggcggcagggttcggcgtgttgatggtgttgtcggatggggacaacgagtgcgaaaacatcagcgatttggcagggctgaaccaacaccgcgtatggcttgcctttttgatgctgctggttatgttctccatggcaggcattccgccgctgatgggtttttacgccaaattcggcgtgattatggcactcttgaaacaaggctatgtttggttgtccgtatttgccgtcgtgatgtcgctgattggtgcgttctactacctgcgcgtggtcaaagtcatgtattttgacgaatccggccgcgcccatcccaccgtcggcggcaacaatgccgcaaaattccttttgagcgtcaacgcgctgctgttggtgctgtggggcattatgccgcaaaccgttatcgactggtgcgccaaggcgttggaaaacacgctgtaa

SEQ ID NO: 38179 - DNA, 1104 bp, Neisseria meningitidis
atgatggaaacacagctttacatcggcatcatgtcgggaaccagtatggatggggcggatgccgtgctggtacggatggacggcggcaaatggctgggcgcggaagggcacgcctttaccccctatcccgacaggctgcgccgccaattgctggatttgcaggacacgggggcggacgaactgcaccgcagcaggattttgtcgcaagaactcagccgcctgtacgcgcaaaccgccgccgaactgctgtgcagtcaaaacctcgcgccgtccgacattaccgccctcggctgccacgggcaaaccgtccgacacgcgccggaacacggttacagcatacagcttgccgatttgccgctgctggcggaactgactcagatttttaccgtcggcgacttccgcagccgcgaccttgcggccggcggacaaggtgcgccgctcgtccccgcctttcacaaagccctgttccgcgatgacaaagaaacacgcgtggtactgaacatcggcgggattgccaacatcagcgtactcccctccgacgcacccgccttcggcttcgacacagggccgggcaatatgctgatggacgcgtggacgcaggcacactggcagcttccttacgacaaaaacggtgcaaaggcggcacaaggcaacatattgccgcaactgctcgacaggctgctcgcccacccgtatttcgcacaaccccaccctaaaagcacggggcgcgaactgtttgccctaaattggctcgaaacctaccttgacggcggcgaaaaccgatacgacgtattgcggacgctttcccgttttaccgcgcaaaccgtttgcgacgccgtctcacacgcagcggcagatgcccgtcaaatgtacatttgcggcggcggcatccgcaatcctgttttaatggcggatttggcggaatatttcggcacacgcgtttccttacgcagcaccgccgaactgaagctcgatccgcaatgggtggaagcagccgcatttgcgtggttggcggcgtgttggattaatcgcattcccggtagttcgcacaaagcaaccggcgcatccaaaccgtgtattctgggcgcgggatattattattga

SEQ ID NO: 38180 - DNA, 600 bp, Neisseria meningitidis
atgtctgaaaaactggaaaaaatcgttttggcaagcggtaatgtcggcaagctcgaagagttcgccaacctattcaaaccttacggcatcaccgtattgccgcaatccgcattcggcatacccgaatgctccgaaccctattccacctttgtcgaaaacgcgctggcaaaagcccggcacgccgccggacacagcgggctgcccgcactcgccgacgacagcggcatctgtgccgccgccctaaacggcgcaccgggcatacattccgcacgttacgcgggcgaccatcccaaatccgataccgccaacaacctgaaacttgccgccgaacttgtcggcaaagccgacaaaagctgctgctacgtctgcgtattggtttttgtccgccataaagacgacccgcgtccgattattgccgaaggcgtatggcacggacagtggcacgataccccgcaagggcaaaacggtttcggttatgacccgtatttttatctgcccgaacacggcaaaaccgccgccgaattggattcggaggtcaaaaaccgcgaaagccaccgcgcgcaggcactcgccgatttaatccgcaaactcgccctttaa

SEQ ID NO: 38181 - DNA, 195 bp, Neisseria meningitidis
atgacaaaatattattcatggggcgtaaacggctttccgccctacgttttcgacaccatttggaaacgatggaagttgaatgggcgcgggggcggttatcgtgtgcgacatcccggacggcatgaccgtcgcgggcaatccggcaaagccgctgccgcgcaaaaaccccaagaccgggacggcataagcgattaa

SEQ ID NO: 38182 - DNA, 576 bp, Neisseria meningitidis
atgccgtctgaaaacccgataggaaaaacgatgaaatccatagacgaacaaagcctgcataatgcccgccgcctgtttgaaagcggcgacatcgaccgtatcgaagtcggtaccaccgcgggcctgcaacagattcaccgttacctgttcggcggcttatatgagtttgcgggtcaaatcagggaagacaacatttccaaaggcggttttcgttttgccaacgccatgtatttaaaagaggctttggttaaaatcgagcagatgcccgagcggacttttgaagaaatcatcgccaaatatgttgaaatgaacattgcccatccgtttttggagggtaatggcagaagtacccgcatctggctggatttggtgctgaaaaaaaacctgaaaaaagtcgtgaactggcaaaatgtaagtaaaaccctgtatttgcaggcgatggaacgcagccccgtcaacgatttagaactgcgctttctgttaaaggacaacctgactgacgatgtggacaaccgtgaaatcatctttaaaggtatcgagcagtcgtattattacgaagggtatgaaaaaggctga

SEQ ID NO: 38183 - DNA, 1518 bp, Neisseria meningitidis
atggtaatttccaatacccgcgaacttgagaaactcaaagaccggattcccaatctgatcaacatcgcccgcatcgccatcgtttttccgctgatgattatgcacatcctcgggctggaaaccggcagccgtgcgaacctgcacgcttcgtggacggcgtgggcattttatgtttggctcgccattgcctgctggctgattttcttttccatcatccatccgcattggcaatggcagtcgctgaaaatgccgcgtttcagcgcggtggcggacatcacgatgatcggcgtgctgacctacctgttcggcggcatcgattccggcttcggcatcctgattctgcccttcgtcgtctgctcctgcctgctcagctacgggcgttaccccctgctctatgccagctacgccgccatcctgctgatattcaacgccattgccgacggcgatatcggcaaatatccgctcatatcggatgcccgaaccgcctcggcaaccttcatccttgtcgccgcctcctatctttccgccatcttcacctccctgtcggtcaaatacatcgaccgtgccggaaaacttgcccatgaaaaccacgccgcctaccgccgcatcaggggcttgaaccaaaccgtactcaaccgcgttcaggaagcggtcgtcgtcatcaacgtcgagcatcagaccatactgttcaataaaaaggcaaaagacctgctacccatgcttgaaatcggacagcataccgccctgttcgaccctattaccgttttatgggacaaggcctctccgcacactttcgaatacgtcctcggcacatccggcctgaacgccggcatccgcgccgttccggtcaacaaagggccggacaagctgcttatcctctacatccgcccgcaaagcgaaattcaggcggaagccctgtccgtcaaacttgccgcgctcggacaactgaccgccaacctcgcccacgaaatccgcaacccgatgtccgccatccgccacgccaacgacctgctgcgcgaaaatatggaagcgggggcggcagatccgttcaacgccaaattgtgcaaaatcatcgacggcaacgtctgccgcatcgacaaaatgctcgaagatatttcctcgctcaacaagcgcaacaaaaccgaacgcgaaaccatcggcctgataccgttttgggaagaattcaaacaagagttcctgctcggccatcccgatgccgccggctgcatccgcttggatatgcagggcaatcacccgaccgcctatttcgatcccgcccacctgcggcagattatgtggaatctcgccaacaacgcgtggcggcacagccgcaaacagcccggctcgatttccgtcaccatccgccccgcgcaaaaaaacaccgtctgcatcctctttgccgaccgcccgaagtgcaggaacacctgttcgaacccttttacaccacggcggaaaacggcaccggcctcgggctgtatgtcgcccgcgaactggcgcacgccaatttcggcgatttga

SEQ ID NO: 38184 - DNA, 750 bp, Neisseria meningitidis
atgcttatccaggcagttaccattttccccgaaatgttcgacagcattacccgctacggcgtaacgggacgcgcgaacagacagggaatctggcagtttgaagcagtcaatccccgaaagtttgccgacaacagattgggctacatcgacgaccgcccgttcggcggcggcccgggaatgattatgatggctccgccgcttcatgcagcaatagaacacgccaaagcacaatcctcccaagctgcaaaagtcatctacctcagcccccaagggaaaccgctgacacaccaaaaagcggtagaactggcagaacttccgcatctgattctgctgtgcggacggtatgagggcatagacgaaaggcttctgcaaagcagcgtcgatgaagaaatcagcatcggagacttcgttgtttccggcggagagcttcccgccatgatgctgatggatgcggtattgaggctcgtacccggcgtattgggcgatatgcagtctgccgaacaagattcgttctcaagcggcattttggactgcccccactacaccaaacccttagaatttcaaggcatggctgttccggaagtattacgttccggcaatcatggcttgatagcggaatggcggttggaacaatcgctgcgccgcaccttggagcgcagacccgatcttttggaaaagcgcagtttaatcccaaaggaatcccgcatcttgaataaaatcctacaagagcaacgggaaatccaatcataa

SEQ ID NO: 38185 - DNA, 1419 bp, Neisseria meningitidis
atgaatattcacaccctgctctccaaacaatggacgctgccgccattcctgccgaaacggctgctgctgtccctgctgatactgcttgcccccaatgcggtgttttgggttttggcactgctgaccgccaccgcccgcccgattgtcaatttggactatcttcccgccgcgctgctgatcgccctgccttggcgtttcgtcaaaattgccggcgtattggcgttttggctggcggttttgtttgacgggctgatgatggtgatccaactcttcccttttatggatctcatcggcgccatcaacctcgtccccttcatcctgaccgcccccgccccttatcagataatgaccgggctgttgctgctgtatatgctggcgatgccgtttgtgttgcagaaagccgccgccaaaaccgacttccggcacattgccgtctgcgccgccgttgtggcggcagccggctatttcaccggccatttgagttactacgaccggggtcggatggccaatatcttcggcgcaaacaacttctactacgccaaaagtcaggcgatgctctacaccgtcagccagaatgccgactttattaccgccggcctggtcgatcccgtcttcctccccttgggcaatcaacagcgtgccgccacgcatctgaacgagccgaaatctcaaaaaatcctctttatcgtcgccgaatcttgggggctgccggccaatcccgaacttcaaaacgccacttttgccaaactgctggcgcaaaaagaccgtttttcggtttgggaaagcggcagttttccctttatcggcgcgacggtcgaaggcgaaatgcgcgaactgtgcgcctacggcggtttgcgcgggttcgcactgcgccgcgcgcccgacgaaaaatttgcccgctgcctccccaaccgtttgaaacaagaaggttacgccacctttgcgatgcacggcgcgggcagttcgctttacgaccgcttcagctggtatccgagggcgggctttcaagaaatcaaaaccgccgaaaacctgatcggtaaaaaaacctgcgccattttcggcggcgtgtgcgacagcgagctgttcggcgaagtgtcggcatttttcaaaaaacacgacaagggactgttttactggatgacgctgaccagccacgccgactatcccgaatccgacattttcaaccacaggctcaaatgcaccgaatacggcctgcccgccgaaaccgacctctgccgcaatttcagcctgcacacccaattcttcgaccaactggcggatttaatccaacgccccgaaatgaaaggcgtggaagtcatcatcgtcggcgaccatccgccgcccgtcggtaacctcaatgaaaccttccgctacctcaaacaggggcacgtcgcctggctgcacttcaaaatcaaataa

SEQ ID NO: 38186 - DNA, 855 bp, Neisseria meningitidis
atgtcggcacaactgatcaatggtaaagaagtttcgcaaaaacgcctgcaggcggttgccgaagcggtggcgcaacgccaacagaacaatctgcacacgccttgcctggccgtggttttggtcggaggcgaccctgccagcgcggtttatgtccgcaacaagaaaacctcctgccaaaaatgcggcatcaaatcactgtcttacgagctgcccgaatcaacatcgcaggaagaactgctggcactggtcgaccgcctgaatgtcgattccgaagtggacggtattctggttcagctgccactgccgaagcacctcgacagccaggcggttttggaacgtatttcgccggataaggacgtggacggcttccatccttacaatgtgggcaggcttgcagtcaaaatgccgctaatgcgcccgtgtacgcccaagggcgtgatgacgcttttggaggcttacggcatcgatccgaaggggaaaaaagcggtcgtggtcggcgcgtcgaatattgtcggccgcccgcaggctttggaattgctgctggcgcgcgcaacggtaacggtctgccacagcgcaaccgaaaatctggcagacgaggttgccggagccgatattttggtggtcggcgtgggcattccgaactttgtcaaaggcgaatggatcaaacccggcgcggtcgttattgatgtgggcatcaaccgtctggacgacggcagcctgtgcggcgacgtggaatttgaaacggcaaaagaacgggcggcgatgattacgcccgttcccggcggcgtgggtccgatgacgattgccacattgatggaaaacaccctgcacgcggcttcactgcacgatgcttga

SEQ ID NO: 38187 - DNA, 1215 bp, Neisseria meningitidis; identical to SEQ ID NO: 36211

SEQ ID NO: 38188 - DNA, 465 bp, Neisseria meningitidis
atgcaaggcaatcaagcagttttagattacatgaacgaattgctgtctggcgagctggcggcacgcgaccaatactttatccactcccgcctctactccgaatggggctacaccaaactttttgaacgtctcaaccacgagatggaagaagaaaccacacacgccgaagacttcatccgccgcatcctgatgctgggcggtacgccgaaaatggcacgcgccgaactgaatatcggcacggacgtggtttcctgcctcaaagccgacctgcaaaccgaatatgaagtacgtgatgcgttgaaaaaaggcatcaaactgtgcgaagaggctcaagactatgttacgcgcgacctgatggttgcccaactgaaagataccgaagaagaccacgcccactggctggaacagcagcttcgcctgatcgagttaattggcgaaggcaactactaccaaagccaactgtaa

SEQ ID NO: 38189 - DNA, 975 bp, Neisseria meningitidis
gtgcagccggggctttgggcttcagacggcatattttcggaatggcggcattcttgccgtcggcgcggcagccgtatggggaagggaggggatattgtggtcggtaacggcaaaaaatatgccgcaccattgctggtgctgggttgcgtggtgttcggtctgggcagtctgattgtcagatccgtccccgtcggttcgtatgcaatcgcattttggcggttgctgatttcggtgttcgtattttggtttttagcacggtttttcaggcaaaaattcccaaaaaacaggaaaaccgtccgatatgccctgacggcgggcgtgtttctcgctttcgatttggcgttgtggcacgaaagcatacacgcggtcgggccgggtatttccaccctgctcaacagcctgcaaatctttttcttgtcggcaatcggtgttttctttttcggcgagcgtttgagcgggctgaaaaaggcaggcttaatatcggcagttgccggcgtggcgatgattgccggtgcggaattcggctacaacggtaatgcggtttggggattcgtcagcggtttggtatcgggactgatgctcgccctgtcgatggtgttcgtccgcaaaacccatgaaatcgagacggtggcgcttttcccttcaatgatgattttgagtttgggcggcgcggtatcgctggttgttccggcattgctgatggatggcggcgtgctttatccgacgacttggaaagatgcgggtttggtgcttgtgtacggcgtggtgatgcagtgcttcgcgtgggcgatggttgcctatgcgattccgctgctttcgctgtcgctgacggggctgctgcttttgtccgaaccggttgccgccctgttcatcgattatttcgggttgggcaaaccgattgaaggcgtgcagtgggcaggggtggcgctgacgctttcggcaatttacctcggttcgctgaaacagcagtcttaa

SEQ ID NO: 38190 - DNA, 546 bp, Neisseria meningitidis
atgggcaaaaccgtaaccttaaccgctggacacagcaacaccgacccgggtgcggtcaacggaagcgaccgtgaggcggacttggcgcaggatatgcgcaacattgtggcttcaatcctgcgtaacgattacggcctgaccgttaaaaccgacggcacgggcaaaggcaatatgccgctgcgcgaagcggtcaagctgattcgcggctcggatgtggcgattgagtttcacaccaacgctgccgtcagcaaagcggcgacaggcatcgaagccttgagtaccgttaaaaacaaacgctggtgtcaggtgttgagcaaagccgttgccaagaaaaccggctggaaactgcgcggcgaagacggctttaaacccgacaatgcgggtcggcattcgcgcctggcttatgcacaagccggcggcattgtgtttgagccttttttcatcagcaacgacactgatttagccttgtttaagacgactaaatggggcatctgccgcgcgattgcggacgcgattgcgatggaattgggggcggcaagagtatga

SEQ ID NO: 38191 - DNA, 1008 bp, Neisseria meningitidis
atgagcaccttcttccagcaaaccgcacaagccatgattgccaaacacatcgaccgcttcccgctattgaagttggaccgggtgattgattggcagctgatcgaacaatacctgaaccgtcaaaaaacccgttaccttagagaccaccgcggccgtcccgcctatcccctgttgtccatgttcaaagccgtcctgctcggacaatggcacagcctctccgatcccgaactcgaacacagcctcatcacccgcatcgatttcaacctgttttgccgttttgacgaactgagcatccctgattacagcaccttatgccgctaccgcaattggctggcgcaagacgacaccctgtccgaattgctcaaactgatcaaccgacaactgaccgaaaaaggcctaaaagtagagaaagcatccgccgccgtcgttgacgccaccattattcagaccgccggcagcaaacagcgtcaggccatagaagtcgatgaagaaggacaaatcagcggccaaaccacaccgagtaaagataaagatgcccgttggataaagaaaaacggcctctacaaactcggttacaaacaacatacccgtaccgatgcggaaggctatatcgagaaactgcacatcacccccgccaatgcccatgagtgcaaacacctgccgccgttgttggaaggactgcccaaaggtacgaccgtctatgccgacaaaggctatgacagtgcggaaaaccggcaacatctggaagagcgtcagttgttagacggcattatgcgcaaagcctgccgcaaccgtccgctgacggaaacgcaaaccaaacataaccgatatttgtcgaagatccgttatgtggtcgaacaaagcttcggtacgctgcaccgcaaattccgctatgcgcgggcagcctatttcgggctgattaaagtgagtgcgcaaagccatctgaaggcgatgtgtttaaacctgttgaaagcggccaacaggctaagtgcgcccgctgccgcctaa

SEQ ID NO: 38192 - DNA, 3435 bp, Neisseria meningitidis
atgaccgagccgacctacatccccctgcgcctgcataccgaattctcgattaccgacggtatggtgcggattaaaaaactgattgccaaagcgcaggaatacggtttgcctgctttgggcatcagcgatttgatgaacgaattcggtttggtgaaattctataaaacctgccgcggcgcagggattaaacccatcggcgcggcggacgtgtggataggcaatccgaatgcgcccgacaagccgttccgcgccatgctgattatccgcaacgatgcgggctatctgcgcttgagcgagcttctgacggcggcttatgtcggcaaagaccgcaatatccatcatgcggaactcaatcccgaatggctggaaaacggcgacaacagcggcttgatttgtttaagcggcgcgcattacggcgaagtgggcgtgaatctcttgaacggcaatgaagacgcggcgcgtgcggcggcgttgaaatatgcggcatggtttcccgatgcgttttatttagagctgcaacgcctgcccgaacgccccgaatgggaggcttgcgtttccggcagcgtgaagctggcggaggaactgggtttgccggtggtggcgacccacccgacgcagtttatgagccgcgacgatttcaacgcgcacgaggcgcgggtgtgtatcgcaggcggctgggtattgacggacaaaaaacgtccgcgcgatttcacgccgggccagtttttcattccgccggaaaccatggccgaacgtttcgccgatttgcctgaagccttggaaaacacggtagaaattgccaaacgctgcaacctgcacatcacattgggcaaaaacttcctgccccttttccccacgcccgacggtttatcactcgatgactatctcatcaaactctccaacgagggtttgcaggaacgcatggttcagctttatcccgacgaagcggaacgcgcagaaaaaatgccggaatatcaggaacgtttggattttgagctgaacatcatcatccagatgaaatttcccggctatttccttatcgtacaagactttatcaactgggcaaaaacgcacggctgtccggtggggccggggcgcggttcgggcgcaggctcgctggtggcgtattcattgaagattaccgaccttgatccgctcaaatacgcgctgctgtttgaacgtttcttaaaccccgaacgcgtctccatgcccgacttcgacgttgacttctgtcaggcaaaccgcggccgcgtgattgagtatgtgcgcgaaaaatacggcgcggaggcggtcagccagattgttaccttcggcacgatgtcatctaaagcggtcatccgcgacgtggggcgcgtgttagagctgccgtttatgctgtgcgacaaactgtccaagctgattccgttggaagccaacaaacctctgggtttggacgacgcgatgaaggcggagccgcagattcaggaattaatcgaagcggaagaagcggacgaactcattacgctggcgaaaaagctggaagatttgacgcgcggtctgggtatgcacgcgggcggcgtgttgattgcgccgggcaagatttccgattacagccccgtgtatcaggcggatgaatccgcctctcccgtatccatgtacgacaagggcgacgtggaagacgtgggtttggtgaaattcgactttttaggtctgcgtaacctgaccattatcgaaatggcgcagaacaacatcaaaaacaccaccggcgatatcgtcgatgtcggcaaaattccgctcgacgaccaagccgcctaccaaatcttccgagatgcgaacaccaccgccgtgttccagttcgagtcgaccggcatgaaaaaaatgctgaaaacggcgcatacgaccaagtttgaagaactgattgccttcgtatcgctctaccgccccggcccgatggacaacatccccgacttcgtcgcgcgcatgaaaggccaggaattccaatacatccatccgctgctcgaaggcatcctcgcgccgacctacggcattatggtgtatcaggaacaagtgatgcaggcggcgcagattatcggcggctactcgctcggcggcgcggacttgctgcgccgcgcgatgggtaagaaaaagcccgaagaaatggtgaaacaccgcgaaatcttcgccgaaggcgcggcgaaacaaggcatttcgcgcgaaaaatccgacgaaatcttcaactacatggaaaaattcgccggctacggtttcaacaaatcccacgccgccgcctacgccctgatttcctaccagaccgcatggctcaaggcgcactaccccgccgaatttatggcggcgacgatgtcgtccgaattggacaacaccgaccagctcaagcatttctacgacgactgccgcgccaacggcatcgagttcctgccgcccgacatcaacgaatccgactaccgcttcacgccgtatccgaacatgaaaatccgctacgcactcggcgcgattaaaggcacgggcgaagccgccgtcgaatccatcatcgccgcgcggcaaagcggcggcaagtttaccggcctcttggacttctgcgagcgcgtcggcaaagaacatatgaaccgccgcaccctcgaagccctgatacgcggcggcgcgttcgacagcatcgaacccaaccgcgccatgctcttggcaaacatcgacctcgctatggacaacgccgaccaaaaagccgccaacgccaatcagggcgggcttttcgacatgatggaagacgccatcgaaccggtgcggctcattgacgcgccgatgtggagcgaatcggaaaaactcgccgaagaaaaaaccgtcatcggcttttacctgtccggccacccgttcggcccgtatgcccaagaagtccgccaaatcgccccgcagaaactgtcgaaactcaaaccgcaagacagcgtgcgcctcgccggattcgttaccgccgtgcgtacgatgatgggcaagcgcggcaaaatcgccttcgtcagccttgaagatttgagcggacaggttgaaatcatggtcggcggtcagacgttggaaaactgcgccgactgcctcaaagccgaccaagtgctgattatcgaatccaaagtcagccgcgacgactacggcggcggcgacggactgcgtattctggcaaaccaagtcatgaccctgcaaacggcacgcgaacgctacgcccgcagcctcagcctcgccctcgccccgcatcacgacatcggcggactggtacaactgctcgccgcccaccaactgcccgacacgccgcgcatcccgctgcaactgtcgtatgccaacgaaaaagcgtcgggcaggcttcaagtgccgccgaaatggacggttacaccgagctccgcattgttcggcgaactggaaacattgctcggcagccggtcggtgcgcgtcaactggtaa

SEQ ID NO: 38193 - DNA, 600 bp, Neisseria meningitidis
atgcgcaaacagaacactttgacgggaatcccgacttctgacggacagagggggtttgcactgtttatcgtgctgatggtgatgatcgtcgtggcttttttggttgtaactgccgcgcagtcttacaataccgagcagcggatcagtgccaacgaatcagacaggaaattggctttgtctttggccgaggcggctttgcgggaaggcgaacttcaggttttggatttggaatatgatacggacagtaaggttacatttagcgaaaactgtgaaaaaggtctgtgtaccgcagtgaatgtgcggacaaatacaaataatggtaatgaagaggtttttgacaatatcgtggtgcaaggcaagcccaccgttgaggcggtgaagcgttcttgcactgcaaattctaccaacctgtgcattgacaataaagggatggaatataagaaaggcacgagaagcgtcagcaaaatgccacgttatattatcgaatatttgggcgtgaagaacggagaaaatgtttatcgggttactgccaaggcttggggtaagaatgccaataccgtggtcgtccttcaatcttatgtaagcaataatgatgagtaa

SEQ ID NO: 38194 - DNA, 381 bp, Neisseria meningitidis
  misc_feature 358, 359, 360, 361, 362: 'n' is a, c, g or t
atgaacctgattcaacagctcgagcaagaagaaattgcccgcctgaacaaagaaatccccgaattcgcaccgggcgacaccgtagtcgtatccgtacgcgtcgtggaaggtacccgcagccgtctgcaagcctacgaaggcgttgtcattgcacgccgcaaccgtggtctgaacagcaacttcatcgtccgtaaaatttccagcggcgaaggtgttgaacgtactttccaactgtactctccgaccgtcgaaaaaatcgaagtcaaacgccgtggcgacgtacgccgtgccaaactgtactacctgcgcggtctgaccggcaaagctgcacgcatcaaagaaaaactgcctgcacgcnnnnncacacacttaattaattaa

SEQ ID NO: 38195 - DNA, 1386 bp, Neisseria meningitidis
atgatggcaagagacaaccgcatccaaatgtttccgcacgaatggcgcgccagtacgacgctttccggcgtgtacgcgctgcgtatgctgggtatgttcctcgtgctgcccgtattggcggtgtatgccgcctcgctgcccggcgcggaaggcaacaaaacgctggtcgggctggcaatgggcatttacgggctgacacaggctctgctgcaactgcctttgggcatcgcttccgacaagttcgggcgcaagaaaaccatttatgcgggactggtcgtgtttgcggcgggcagctttcttgccgccgccgccgatacgctgcccatgctggtcgccgcacgcgccatacagggtgcaggggcggtcagtgcggcggttaccgcgctgctggcggatttgacgcgcgacggcgtacgtacccgcgcaatggcgatgatcggtttgagtatcggtttgacgttttcggtcagcctcgtcgttgcccccgtgattgccgacgcggtcggcgttcgcggactgtttatgctgaccggcattctgaccgtcatcagcatcggcgtggtggcgtggatgactcccgatcccgaagtttccaagctgcacgaagatacgcaggcgcagccttcgcgcataggcgaagttttgaaaaaccgtaggctgctgacgcttgatttcggcattttcgccctgcacgccgcacaaatggcattgtttaccgcgctgcctttcgcgatgacccagctcggtttggaaaaaatacagcattggaaagtctatctgccttcgaccattacgggcttggtggtgatggttccgctgattatcgtcggcgagacgcgcaacaagcttaagcaggtttttgttttgggtatcgtctgtattgcggcggcgcagctcggtttgctgtccggtatgcgctcggtaggcttgattaccgcttatttggttgtttactttatcggttttaatgtgttggaagcgagcctgccgtctatggtttccaaaatcgcgccgtccgacctgaagggtacggcgatgggcgtgtacaacacgatgcagtcgctcggactgtttgccggcggcgcggcaggcggtttgctgtttcaaaaatacggcttttccggcgtgtttgccttttgcagtatattgatgctgctgtggctggtaattgccgttttatcgcctgcgcccaagcccgtcaaaaacctcagttaccctgtcggcggcgtgtggcagggcaatcaggaagggttataccgcgccttgtcggagcttgagggtgtggaagacatcggtttcagtttcgacgggcagaccgtctatctcaaagtgttgcagaagggtttcgatcaggctgccgctgaaaaaatcatcacaggagtttaa

SEQ ID NO: 38196 - DNA, 447 bp, Neisseria meningitidis
gtgcgcgcctttcagacggcattgaggccgtcccgcatcctgaacatcctgaccgtatcgctccactcggcttcccttgccgtctgcctgacctggttttacggctggatgatgtggttcggtttggcggctttggcggcaagttacgcatactcgctcaggataacgaatctgaaacaccgccatgccataaccgccattaccatagaccgcgacggacaggcggaaatcgtatccggcaaagaaaaaacagcaaaggcggcaacacttgcgggcagcagtatggttacgccttatgccttattcttacaatgggacaccggcggcaaaaccgtccgccactgcatcatgcccgacatgacggacaaagaatcctaccgcaagctgaaagtctgggtactttggcggcagccgaaaaaaaccgccgaaaccgatacatcagactga

SEQ ID NO: 38197 - DNA, 270 bp, Neisseria meningitidis; identical to SEQ ID NO: 36672

SEQ ID NO: 38198 - DNA, 597 bp, Neisseria meningitidis
  misc_feature 578, 579, 580, 581, 582: 'n' is a, c, g or t
atggcgacactgtccgacaaaaccatcttagttaccggcgcatcgcaaggtctgggcgaacaggtcgccaaagcctatgcggcggcaggcgcaaccgtgattctggtggcacgccatcagaaaaaactggaaaaagtctatgacgcgattgtcgaagccggataccccgaaccattcgccatctgctttgaccttattagcgcggaagaaaaagaatttgaacatttcgccgccaccattgccgaagccacgcaaggcaaactggacggcatcgtccactgcgccggctatttttacgccctctcgccgctggatttccaaaccgtcgccgaatgggtcaaccaataccgcatcaacaccgtcgcacctatggggctgacccgcgccctgttcccgctgctgaagcagtcgcccgacgcgtccgtcatcttcgtcggcgaaagccacggcgaaacacccaaagcctactggggcggcttcggcgcgtccaaagccgcgttgaactacctgtgcaaagtcgccgccgacgaatgggaacgcttcggcaacctgcgcgccaacgtcctcgtccccggacnnnnncacacacttaattaa

SEQ ID NO: 38199 - DNA, 192 bp, Neisseria meningitidis; identical to SEQ ID NO: 37158

SEQ ID NO: 38200 - DNA, 1101 bp, Neisseria meningitidis
atggcaggcaacactttcggacaactcttcaccgttaccaccttcggcgaaagccacggcgcgggtttgggctgtatcatcgacggctgcccgcccggcttggaattaagcgaagcggatatccaatttgacctcgaccgacgcaaacccggcaccagccgccacgttacccaacgccgcgaagccgaccaagtcgaaatcctctccggcgtattcgaaggcaaaaccaccggcacgcccatcgccctcttaatccgcaataccgaccagcgcagcaaagactacggcaacatcgccaccagcttccgccccggccatgccgactatacctattggcacaaatacggcacgcgcgactaccgcggcggcggcaggagctccgcccgtgaaaccgccgcccgcgttgctgccggagccgttgccaaaaaatggttgaaagaaaaattcggcacggaaatcaccgcctacgttacccaagtcggcgaaaaagaaatccggtttgaaggctgcgaacacatttcccaaaatcctttttttgccgccaaccatagccaaattgccgagctggaaaactatatggacagcgtgcgcaaatcgttggattccgtcggcgcgaagctgcatattgaagccgccaatgtccccgtcggcttgggcgaacccgttttcgaccgcctcgatgccgaaatcgcctacgcgatgatgggcatcaacgccgtaaaaggcgtggaaatcggcgcaggttttgacagcgtaacgcaacgcggcagcgaacacggcgacgaactgaccccgcaaggcttcctgtccaaccattcgggcggcatcctcggcggcatcagcaccgggcaagacatctgcgtcaatatcgccatcaaacccaccagctccatcgccaccccgcgccgcagtatcgacatcaacggcaaccccatcgaactcgccacgcacggcaggcacgacccctgcgtcggcttgcgcgccgcgccgattgccgaagctatgctcgccttggttttaatcgaccacgccctgcgccatcgtgcgcaaaatgcggatgttgccgtggatacgcccgatatcgcccgctcggacaagtaa

SEQ ID NO: 38201 - DNA, 2751 bp, Neisseria meningitidis
atgctgacaaacattgccaagaaaatcttcggcagccgcaacgaccgcttgctgaaacaataccgtaaatccgttgccagaatcaacgcgctcgaagaacagatgcaagccctaagcgatgctgatctgcaagccaaaactgccgaattcaaacaacgcctcgccgacggtcagactttggacggcattttgcccgaagccttcgccgtctgccgcgaagcgtcccgccgcaccctcggtatgcgccacttcgacgtgcagcttatcggcggtatggtgctgcacgacggcaaaatcgccgaaatgcgtaccggcgaaggcaaaaccctggtcgccaccctcgccgtctatctcaacgcgctggccggcaaaggcgtacacgtcgttaccgtcaacgactacctcgcctcacgcgatgcgggcattatggagccgctctataatttcctcggtctgaccgtcggcgtgattatttcagatatgcagccgttcgaccgtcaaaacgcctatgccgccgatatcacctacggcaccaataatgaattcggcttcgactacctgcgcgacaatatggttaccgaccaatacgacaaagtgcagcgcgaattgaattttgccgttgtcgatgaagtggattccatcttgattgacgaagcgcgcactccgctgattatctccggtcaggcggatgacaacatccagttgtaccaaatcatgaacaccgttccgccccacctcgtccgtcaagagacagaagaaggcgaaggcgactattgggtcgacgaaaaggcacatcaggtcatcctgagcgaagcaggtcacgaacacgccgagcaaatcctgacccaaatgggattgctggcagaaaacgactccctctattccgccgccaatatcgccctgatgcaccaccttatggcggcattgcgcgcgcattccctcttccacaaagaccaacattacgtcatccaagacggcgaaatcgtcatcgtggacgaattcaccggccggctgatgtccggccgccgctggtcggagggtctgcatcaagccgtcgaagccaaagaaggcgtggaaatcaaacgcgaaaaccaaacccttgcctccatcaccttccaaaactatttccgcctgtacaccaagctctccggcatgaccggcacagccgataccgaagctttcgaattccaaagcatctacaacctcgaaaccgtcatcatcccgaccaaccgccctgtacagcgcaaagacttcaacgaccagattttccgttccgccgaagaaaaattcgaagccgtcgtcaaagacatcgaagaatgccacaaacgtgggcagcccgtcctcgtcggcaccaccagcatcgaaaactccgaactggtctcccaccttctgcaaaaagccggactgccgcacaacgtcctcaacgccaaagaacacgaacgcgaagccctgattgtcgcccaagccggcaaagtcggcgcgattaccgttgccaccaatatggcgggacgcggtacggacatcgttttaggcggcaacctgaagcaccaaaccgatgccatccgtgccgacgaaaccttgagcgacgaagagaaacaggcacaaatcgccgcactcgaaaacggctggcaggcagaacacgataaagtaatggaagcaggcggcctgcacatcatcggtacggaacgccacgaaagccgccgtatcgacaaccaattgcgcggacgttccggccgtcagggcgaccccggatccagccgtttctacctttcgtttgaagacccgctgctgcgcttattcgcactcgaccgcgccgccgccatcctcaaccgtctcgcccccgaacgcggcgttgccatcgaacacaacctgctgacgcgccaaatcgaaggggcgcaacgcaaagtcgaaggcagaaacttcgatatgcgcaaacaggttttggaatacgacgacgttgccaacgaacagcgcaaagtcatttacagccagcgcaacgaaattctgaccagcaaagacatcagcgacctgatgcaggaaatccgttctgatgtcgtcagcgacctcgtggatacctatatgcctcccgacagcatggaagaacaatgggacatcccgactttggagaaccgtctggctgccgaattcagactgcacgaagacatccaatcctggctgaaggcggacaatgcgattgacggtcaagacatcaaagaacgcctgatcgaacgcatcgaaaacgaatatgccgccaaaaccgaactggtcggtaagcaggcaatggccgatttcgagcgcaacgtgatgttgcaggtcatcgacaaccaatggcgcgaacacctcgccgctatggactacctgcgacaaggcatacacctgcgcagctatgcccaaaaaaatccgaagcaggaatataaacgtgaagcctttaccatgttccaagacctgtggaacggcatcaaattccatattgcctccctgcttacctcggttcaaatcgaacaaaaccctgtcgcggtggttgaagagcaacccatcggcaacatccagtccatccattccgaatcgcccgatatggaagaacttttgggtcagtcgcaaaccgatctggttaccgaagcctttaatcccgatgggacagatttcagccccgaagccttggaagcgcgggggcaaatcgtccaccgcaacgacccctgcccctgcggcagcggtttgaaatacaaacaatgccacggcaaactggcttaa

SEQ ID NO: 38202 - DNA, 1299 bp, Neisseria meningitidis
atggctaaaaatgttgtagtaatcggcgcacagtggggcgacgagggtaaaggtaaaatcgttgactggctggcggaagaagccggcggcgtggtgcgcttccaaggcggccacaatgcgggtcatactttggtcgtcggcggcaaaaaaaccattttgcgcctgattccgagcggcatcctgcatgaaagtctggactgcttcatcggttcgggcgttgtcgtctcccccgaagccctgttgggcgaaatcgacgagttaaacgctgcaggcgtgaaaaacgtcgaaggccgtctgaaaatcgcgccgacctgcccgctgatcctgccttaccacatcgcgctcgaccaagcccgcgaagcatcgcgcggcaaaggcaaaatcggcacgaccggccgcggcatcggccctgcctacgaagacaaagtggcacgccgcgccattcgcgccgccgatttgctgcatcctgaaaaactgcgtgaaaaactggatgccgtccttgcttattacaacgtccaactgcaacatctgcacaatgccgaaccggttaaagcggaagacgtgatggcggttatcgaaaaagtcgcgccgcgcattgcgccgatgattaccgacgtgtcccgcgtgttgaacgagaaaaacaaaaacggcgaaaaactgctgtttgaaggcgcgcaaggtgcgttgttggacatcgactacggcacttatcccttcgttacctcgtccaactgtctggcgggagccgcttccgcaggcgcgggcgtaggtcctcaaatgctggattatgttttgggcatcgtcaaagcctataccacgcgcgtcggttcgggcccgttcccgaccgaattgttcgacgaagtaggcgtaggtttggcagaacgcggacacgaattcggttcggtaaccggacgcgcacgccgctgcggctggtttgatgccgccgcattgaaacgctccatccaaatcaacggcatttccggtatgtgtattactaaactcgatgtaatggacggcgttgaaaccatcaatatctgcgtcggctatgaattgcccgacggcggcaaaaccgacatcctgccttgcggttccgatgcggtggaaacctgcaagccgatttacgaaaccatgcccggctggcgtgaatccactttcggcgtgaaggactacggcgcattgcccgaaaacgccaaagcatatttgaaacggattgaagaagtctgcggcgcgccggtcgccatcgtctccaccggccccgaccgagaagaaacgattgtgctgcatcatccgttcgcataa

SEQ ID NO: 38203 - DNA, 624 bp, Neisseria meningitidis
atggaacgcaaagaacgcctgcgtgcaggcatcgccgcattgggtttggatatttccgcagcggcgcaggacaggcttttggcctatgtggatttgttgaaaaagtggaacaaaacctacaatctgaccgccctgcgcgacgaggaaaaaatggttgtccatcatcttttggacagcctgacgctgctgccccatatcgagggtgtgcaaacgatgctggatgtcggttcgggcggcggtcagcccggcattccggcggcggtgtgccgtccggatgtgcaaataacccttttggatgcgaatacgaagaaaacggcttttttacagcaggcggttatcgagttggggttggacaatgtgcgcgtggtatccggacgcgtggaggcggtttcggacgtgcgtgccgacgtggttaccagccgtgcgtttgcagaactggcggactttgtatcgtggacggcgcatctgttgaaagacggcggctactgggcggcgatgaagggcgtatatccgcagggggaaatcggccgcctgccgcaggatgtgtgcgttgaaaaagtccaaaggctcgacgtgccaggcttggatgcggaacgccatatcgtcatcctgagcaagcgttga

SEQ ID NO: 38204 - DNA, 1284 bp, Neisseria meningitidis
atgaaccgtaacgaaattttattcgaccgcgccaaagccatcatccccggcggcgtgaattcccccgtccgcgcattcggcagcgtcggcggcgtgccgcgcttcatcaaaaaagccgaaggcgcgtatgtttgggacgaaaacggcacgcgctacaccgactatgtcggttcgtgggggcccgcgattgtcggacacgcgcaccccgaagtcatcgaagccatgcgcgaagctgccttgggcggtttgtcgttcggcgcgcctaccgaaggcgaaatcgtcattgccgaagaaatcgccaaaatcatgccgtccgtcgaacggctgcgccttgtcagctccggtaccgaagccaccatgaccgccatccgtctggcacgcggctttaccggccgtgacaaaatcatcaaatttgaaggctgctaccacggccattccgacagcctgttggtgaaagcaggcagcggtctgctcaccttcggtaatccctcttccgccggtgtgcctgccgactttaccaaacacactttagtcctcgaatacaacaacatcgcccaactcgaagaagcctttgctcaaagcggcaatgacattgcctgtgtgattttggagccttttgtcggcaatatgaatctggttaggccgtctgaagccttcgtcaaagccctgcgcgaattgaccgaaaaacacggcgcagtgttgatttacgacgaagtgatgaccggtttccgcgtcgcgctcggcggcgcacaatcgctgcacggcatcacgcccgacctgaccacgatgggcaaagtcatcggcggcggtatgccacttgccgcgttcggcggacgcaaagacattatggaatgtatttccccgctgggcggcgtgtatcaggcaggcaccttgtcgggcaacccgattgccgtcgccgccggtttgaaaacgctggaaatcatccgccgcgaagggttttatgaaaacctgacggcgcgtaccgaacagttggttcaaggttttcagacggcagcggatgcggcgggcatcgagttcaccgccgacagcgtgggcgggatgttcggcctgtattttgccagccatacgccgcgaaactatgccgatatggcgcgttccaatattgacgctttcaaacgcttcttccacggtatgctcgaccgcggcattgccttcggcccgtccgcttatgaagcaggtttcgtttctgccgcgcatacgcccgagctgattgacgaaacggttgcggttgcggttgaagtgttcaaggcgatggctgcatga

SEQ ID NO: 38205 - DNA, 1008 bp, Neisseria meningitidis
atgagcaccttcttccggcaaaccgcccaagccatgattgccaaacacatcgaccgtttcccgctattgaaattggaccgggtgattgattggcagccgatcgaacaatacctgaatcgtcaaaaaacccgttaccttagagaccaccgcggccgtcccgcctacccgctgttgtccatgttcaaagccgtcctgctcggacaatggcacagcctctccgatcccgaactcgaacacagcctcatcacccgcatcgatttcaacctgttttgccgttttgacgaactgagcatccctgattacagcaccttatgccgctaccgcaattggctggcgcaagacgacaccctgtccgaattgctggaactgattaaccgacaactgaccgaaaaaggcttaaaagtagagaaagcatccgccgccgtcattgacgccaccattattcagaccgccggcagcacacagcgtcaggccatagaagttgacgaagaaggacaaatcagcggccaaaccacaccgagtaaggacagcgatgcccgttggataaagaaaaacggcctctacaaactcggttacaaacaacatacccgtaccgatgcggaaggctatatcgagaaactgcacattacccccgccaatgcccatgagtgcaaacacctgtcgccgttgttggaagggttacccgaaggtacgaccgtctatgccgacaaaggctatgacagtgcggaaaaccggcaacatctggaagagcgtcagttgttagacggcattatgcgcaaagcctgccgcaaccgtccgctgtcggaagcgcaaaccaaacgcaaccgatatttgtcgaagacccgttatgtggtcgaacaaagcttcggtacgctgcaccgtaaattccgctatgcgcggtcaacctatttcggactgattaaagtgagtgcgcaaagccacctgaaggcgatgtgtttgaacctgttgaaagccgccaacaggctaagtgcgcccgctgccgcctaa

SEQ ID NO: 38206 - DNA, 1245 bp, Neisseria meningitidis
atgaccctattttgcgaacaagtcccctacccccgccttgccgaagcattcggcacaccgctttatgtgtacagccaatccgcgctgaccgaagcatttgaacactatcaaaccgcctttgccgagctctccccgctcgtctgctatgcggttaaagccaatggcaacctgagcatcatcaaacactttgcttctttggggagcggttttgacattgtgtccggcggcgaattggcacgcgttttggcggcaggcggcgatgcggcaaaaaccatattttcaggcgtgggcaaaagcgaggcagaaatcgagttcgcgctgaatgccggcgtgaaatgcttcaatatggaaagcattcccgaaatcgaccgtattcaaaaagttgccgcgcatttgggtaaaaccgcgcccgtctccctgcgcatcaaccccgatgtcgatgcaaaaacccatccctacatctccacaggtctgaaagccaacaaattcggcatcgcctacgccgacgcgctcgaagcctaccgccacgccgcacaacagcccaatttgaaaatcatcggcatcgactgccacatcggctcccaactaaccgacttaagcccgctggtcgaagcctgcgagcgcattttgattttggttgacgcgcttgccgccgaaggcattgtgttggaacacttggacttgggcggcggcgtcggcattgtttaccaagacgaagatgtgcctgatttgggcgcgtatgcccaagccgttcaaaaactgatcggcacacgccgtctgaaactcattcttgagcccggccgcagcctggtcggcaacgcaggttcgctgctgacacgcgtcgagtttgtcaaatacggcgaagagaaaaactttgtgatggtcgatgcggcgatgaacgatttgatgcgcccggcgctttatgatgcctatcatcacatcgaggcggtcgaaaccaaagacatcgcgacgctgaccgccaacatcgtcggtccgatttgcgaaaccggcgacttcctcggcaaagaccgcaccatcgcctgcgaagaaggggatttgctgcttatccgcagcgcgggcgcatacggagccagtatggcgagcaattacaacgcgcgcaaccgtgcggcggaagtgttggttaacggtggcggatacaaactcatccgccgacgcgaaaccttagaacagcaaatggcaaacgaactcgcctgcctgcaagccgaacatcaaaatgccgtctga

SEQ ID NO: 38207 - DNA, 1497 bp, Neisseria meningitidis
atgttttccaactacctactcagcttggcaatatggatacccatcgccgcaggtgtgctggttttgtcgaccggtaaggacagccgtgcgccgctggcgcgtgtgcttgcctttatgggtgcgcttgccggtttcttggtaacgctgcccctgtttaccggtttcgaccgtttgagcggcggctatcaatttaccgagttccacgagtggattccgctgctgaaaatcaactatgcattgggcgtggacggtatttcagtgctctttatcatcttgaatgcgtttattacgctgttggtggtgctggcgggttgggaagttattcagaaacgcccggcgcagtatatggcggcattcctgatgatgtcgggtttgattaacggtgcgtttgccgcgcaggatgcgattctgttttatgtgttcttcgagggtatgctgattccgctgtacctgattatcggtgtatggggtggcccgcgccgcgtttatgcgtcggtcaagctgttcctctatacgctgatgggttcgcttttgatgctggttgccatggtttacctgtactatcagacaggcagcttctctattgtcgatttccaaaacatcaagcagattccattgggcgtacaacagcttttgtttgtggcattcttcctgtcatttgccgtaaaagtgccgatgttccctgtgcacacttggttgccggatgcccacgttgaagcgccgaccggcggttcgatggtgttggcggcaattacgctgaaactgggtgcgtatggtttcttgcgttttatcctgccgattatgccggatgcggcacgctattttgcccctgtgatcatcgtattgagcctgattgccgtgatttatatcggtatggtggctttggtgcaaaccgatatgaaaaaactggtggcgtattcgtctatcagccatatgggttttgtaacgcttgggatgtttttgtttgttgacgggcagttggacgactgggcgttgaaaggcgcaatcattcaaatgatttcgcacggtttcgtgtcggcggcgatgtttatgtgtatcggcgtgatgtacgaccgcctgcatacccgcaatattgctgactatggcggcgtggtcaatgtgatgcctaagtttgcggcgtttatgatgttgttcggtatggccaatgccggtctgcctgcaacttccggcttcgtgggcgagtttatggtgattatgggcgcggttaaagtgaatttctgggtgggcgcgttggcggccatgaccctgatttacggtgcgtcttataccctgtggatgtacaagcgcgtgattttcggcgcgatccacaatccgcacgttgccgaaatgaaagacatcaactgccgcgaatttgcgattctggtgattttggcggttgtggtattgggtatgggtctgtatccgaacgcatttatcgaagtggtgcatcaggcggcaaacgatttgattgcccatgtggcacaaagcaagatttga

SEQ ID NO: 38208 - DNA, 852 bp, Neisseria meningitidis
atgaccttactcggaataaagctcaaacagacccagcagctcaaccagcggctgcaacaatctttgcgcgtattgcagatgtcgggtatcgaacttgaacgcgaggtcgaaaactggctgtcggacaaccccctgctcgaacgcaaagacacggatgaattttccgatgccgaattcagccattacactgcgcctgcccgtcaaatcggcggagacgaaggcgaagatatgctgtccaacatcgccggcgagcaggatttcaagcaatacctgcacgcgcaagtatgcgaacacccgctttccgaccaagaatccgcctgtgtccacatcctcatcgatttccttgacgagcaaggttatctgaccgacagcatcgaagacatcctcgaccatacgcccttggagtggatgttggatgaggcaatgctgaaacaagccctgaccgcattgaaaaaattcgacccggcaggcgtggccgccgccgatttgaacgaatcgctgatactgcagatagaaagatcgggcgaatgtgccgccaaaaccaccgccctgcatatcgtccgaaacgccctcaacagcattgacggcaaccgcagccaaaccctcgcacgaataaaaaaacgcctgccccaaaccgacagcggcacactcgaagccgcactcgacctcattgcttcgctcaatccctttcccgccgccggttttgcctcgtccacacccacgccgtattctgacgaggcactcgccaacctgctggctttccgcggcatggaggtttctcgccgcaccattgccaaatacagagaatcctttgagattccggcagcacacaaacgcaaaaccgcagaataa

SEQ ID NO: 38209 - DNA, 1071 bp, Neisseria meningitidis
atggatttaagtatcgtagttcccatttataatgtcgagagttatttggaagcgtgtctaaattccatagaacctatattaagtaatgaaaatgtcgaacttatccttgtgaatgacgggtcaaaagacggaagtgaagatatatgttataaatatatagataaaacaacaaacaacaaacaacaaacaacaaacaacaaacaacaaacaacaaacaacaaacaacaaacaacaaacaacaaacaacaaacaacaaacaacaccagataccgaacaccaaacatcaaatatatatatcaggataaccaagggacggcagaagctaggaataccggaataaaaaattcaaacggaaaatatatagtctttattgattcggatgattttattaattgtcaggtcttgctggattttcttagtaaagatgatattgatatgccggatgtggtttttttaaatgcggttaaatatgataagggaagtgtttcacattttggcgaagattatcagcctgaaaaaatactcaagcaatccaaagtcgaagttttgaaaggattatgccgatttagaaaatttccgggttcggcgtgtaataagattataaaaagggaattgattatcaaagaaaaactgttttttgaaaaagaggtttatgccgaagatatcgaatggtcaatgagattatttaatgcggcaacaactttttcttatttggacggttgttattactattatcggcagggaagaaaagattctaaaacaggaactgtttcggaaaaaagtataaagtcattattatatattttggagaaaaatgcggaaatggaatttgatagggatatatcaagttatctttattcttttctttcctacgaatatctcgttttgctttttatcatgacgagtaaaaatatagagtgtgatgctgatataaaaagaagggcgtatcatttaaggtttatgctgttaaagtccaataaattgatatataagctgatattcccgataatcacattattcggggtcgatattacaggcaggattttaaaagcaatcagggggaatatttaa

SEQ ID NO: 38210 - DNA, 1188 bp, Neisseria meningitidis
atggcagagatctgtttgataaccggcacgcccggttcagggaaaacattaaaaatggtttccatgatggcaaacgatgaaatgtttaagccggatgaaaacggcatacgccgtaaagtatttacgaacatcaaaggcttgaagataccgcacacctacatagaaacggacgcgaaaaagctgccgaaatcgacagatgagcagctttcggcgcatgatatgtacgaatggataaagaagcccgaaaatatcgggtctattgtcattgtagatgaagctcaagacgtatggccggcacgctcggcaggttcaaaaatccctgaaaatgtccaatggctgaatacgcacagacatcagggcattgatatatttgttttgactcaaggctctaagcttctagatcaaaatcttagaacgcttgtacggaaacattaccacatcgcttcaaacaagatgggtatgcgtacgcttttagaatggaaaatatgcgcggacgatcccgtaaaaatggcatcaagcgcattctccagtatctatacactggataaaaaagtttatgacttgtacgaatcagcggaagttcataccgtaaataaggtcaagcggtcaaaatggttttatactctgccagtaataatattgctgattcccgtttttgtcggcctgtcctataaaatgttaagtagttatggaaaaaaacaggaagaacccgcagcacaagaatcggcggcaacagaacatcaggcagtatttcaggataaaacagaaggcgagccggtaaacaacggtaaccttaccgcagatatgtttgttccgacattgtccgaaaaacccgaaagcaagccgatttataacggtgtaaggcaggtaagaacctttgaatatatagcaggctgtgtagaaggcggaagaaccggatgcacatgctattcgcatcaagggacagcattgaaagaagtgacggagttgatgtgcaaggactatgtaaaaaatggcttgccgtttaacccatataaagaagaaagccaagggcgggatgtccagcaaagcgcgcagcaacattcggacagaccgcaagttgccacgttgggcggaaagccgctgcaaaatcttatgtatgataattggcaggagcgaggaaaaccgtttgaaggaatcggcgggggcgtggtcggatcggcaaactga

SEQ ID NO: 38211 - DNA, 567 bp, Neisseria meningitidis
atgtccgccctcctccccatcatcaaccgcctgattctgcaaagcccggacagccgctcggaacttgccacctttgcaggcaaaacactgaccctgaacattgccgggctgaaactggcgggacgcatcacggaagacggtttgctctcggcgggaaacggctttgcagacaccgaaatcaccttccgcaacagcgcggtacagaaaatcctccaaggcggcgaacccggggcgggcgacatcgggctcgaaggcgacctcatcctcggcatcgcggtactgtccctgctcggcagcctgcgttcccgcgcatcggacgaattggcacggattttcggcacgcaggcagacatcggcagccgtgccgccgacatcggacacggcatcaaacaaatcggcaggaacatcgccgaacaaatcggcggattttcccgcgaatccgagtccgcaaacatcggcaacgaagcccttgccgactgcctcgacgaaataagcagactgcgcgacggcgtggaacgcctcaacgaacgcctcgaccggctcgaacgcgacatttggatagactaa

SEQ ID NO: 38212 - DNA, 348 bp, Neisseria meningitidis
atgcgcctaaaccacaaacagggcgaggcaggggaagatgccgcgcttgccttcctccaatcccaaggctgcacactgcttgcccgcaactggcactgcgcctacggcgaaatcgacctgattgtcaaaaacggcggcatgattctgtttgttgaagtaaaataccgcaaaaatcggcaattcggcggtgccgcatacagcatttccccatccaaattattgaaactgcaacgaagtgtagagtattatctgcaacagaacaggttgacaaacgtaccgtgccgcctcgacgcggtactcatcgaaggcagccgcccgcccgagtggatacagaatattacaggttga

SEQ ID NO: 38213 - DNA, 594 bp, Neisseria meningitidis
atggcaagcattcaaaacttatacgaaaccgtcagccgcgttttgggcaatcaggcaggcaaagtcatttcagctttgggcgagattaccgtcgagtgtctgcccgaacactatatttcagtcatgaccgcattgcgcgatcatgaagagctgcatttcgagcttctggtcgatttgtgcggtgtcgattacagcacttacaaaaacgaagcatggcagggcaaacgctttgccgtcgtcagtcagctgctttccgttaaaaacaatcaacgcatccgcgtacgcgtctgggtttcagacgacgacttccccgtagttgaatccgtagtcgatatttacaacagcgcggattggtacgaacgcgaagccttcgatttgtacggcatcatgttcaacaaccacccggacttgcgccgcatcctgaccgattacggctttgtcggacatccgttccgcaaagacttcccgatttccggctatgtggaaatgcgttacgacgaagagcaaaaacgcgtgatttaccaacccgttaccatcgagccgcgcgagatcacgccgcgtatcgtccgtgaggagaactacggtggccaataa

SEQ ID NO: 38214 - DNA, 1374 bp, Neisseria meningitidis
atgagtaatccattttcctctttaggtttgggtacggaactcgtttccgcactgaccgcgcaaggttacgaaaacccgacgcccatccaagccgccgccattcccaaagcactcgccggtcatgatttgctagccgccgcgcaaaccggcacaggcaaaaccgccgcctttatgctgcccagtctggaacgcctcaaacgttacgccaccgccagcacctcgcccgcgatgcaccccgtgcgtatgctcgtccttacccccacgcgcgaacttgccgaccaaatcgaccaaaacgtgcagtcctacatcaaaaacctgccgcttcgccacaccgtcttgttcggcggtatgaatatggacaaacagaccgccgatttgcgtgccggctgcgaaatcgtcgtcgccaccgtcggacggctgctcgaccacgtcaaacaaaaaaacatcagtttgaacaaagtcgaaatcgtcgttctggacgaagcagaccgcatgttggatatggggtttatcgacgacatccgcaaaatcatgcagatgctgcccaaacaacgccaaaccctgctcttttccgctaccttctccgcaccgatacgcaaactggcgcaagacttcatgaacgcgcccgaaaccgtcgaagtcgccgcgcaaaacaccaccaacgccaacgtcgaacaacacatcatcgccgtcgataccattcagaagcgcaacctgctcgaacggctgattgtcgatttgcatatgaaccaggtcatcgtgttctgcaaaaccaaacaaagcgtcgaccgcgtaacgcgcgaactggtgcgccgcaacctgtccgcacaggcgatacacggcgaccgttcccaacaaagccggctcgaaacactcaacgccttcaaagacggcagcctgcgcgtcctcgtcgccaccgacatcgccgcgcgcgggctggacattgccgaactgcccttcgtcatcaattacgaaatgcccgcccagcccgaagactacgtccaccgcatcgggcgcacggggcgcgcgggcgcggacggcgtggcgatttccctgatggacgaatccgaacagaaaatgtttgaatccattaaagagctgaccggcaacaagctgctcatcgagcgcatcgagggcttcgagccgcaatggtgggaacagggcggcgcaaaaccggaaaaaaccgaaatgcgcgaaccgagacaacgcaaccgctacgaatccgccagggctcagcgcgaaaaaaatacccgaccggaaaccacggcaaacgatgcgggcgcggcttgcggaaaaattgccggacgcagccgccgaagccgtcgggaacaccggacgtgcgccctgctccaaccgcgttacggcgtaaaataa

SEQ ID NO: 38215 - DNA, 1332 bp, Neisseria meningitidis
atgctgttcaaccacaccgcttccgaactcctcgacctctgccgccgcacgctcgacttagcaaaagcgacgggcgcaaccgccgccgaagccgatttcagcgaatcattgggacaaagcgtcagcgtgcgcttgggcgaaatcgaacaaattgagttccagcaggacaagtcgctggacattaccgtttacgtcggcaaacgcaaaggccgcgccagcactgccgacttctccgaacaagccctgcaagacaccgtcaaagccgccatcgacatcgcccgctacactgccgaagacgattgcgcaggtttggcagacgcttcgcttatggcgcaacacgtcggcgacctcgaccgttaccacgaatgggatttaagcacggaagccgccgtcgagttggcaaaacaatgtgaacaagctgccctgaacgaggatgagcgcatcgaaaactccgaaggggcggcggtgcaaaccggccattaccaatacgtttacggcaacacccacggttttgccgcacaccggcaaggcacgcaccacagcatttcctgcagcgtcgttgccgccgacgaaaacgggatgcagcgcgactactggtacgattccgcctgccgccatccggatatggacagccccgaaaccatcggtcaaaccgccgcccgccgcactttgcgccgactcggcagccgcagcatcccgacaggcagctaccccgtcctcttcgataccaccgtttcgggcggccttatcggacacctcgtcggcgcactctccggcggcgcgctctaccgccaaagcagtttcctgatcgacagcatcggcaaaaaagtcctgcccgatttcctcaacctgcgcgaagaaccgcacatcccccgctctttccgcagcagctattttgatgcggaaggcgttgccaccgcgccgcgcttcgtgattcaaaacggcattgtcgaaggctatttcctcagcagttacagcgcgcgcaaactcggtatgcagaccacgggcaacgccggcggcgcgcacaacctgtatttgaaccatacgcacgaaacgcaatccgacctgctgaaagaaatggggacgggattgttggtaaccgaactgatgggacagggcgcgaacaccattaccggtgactactcgcgcggcgcggcgggtttttgggtggaaaacggcgtgattgcctaccccgtccacgagattaccgtagccggacgcttgcaggatatgtaccgcgacattgtcggcgtggcggatgacgctttgcggcgttcgtccaacaaaatcggctcgattctgattgcggggatgacggttgccggaagctga

SEQ ID NO: 38216 - DNA, 279 bp, Neisseria meningitidis
atgaatatccgaactgcttttgctttgtgcgccatcgccttatccgccgctgcggctgcctacgccaaagaaatcaaaatcgatgccaacaacacgccttattccgaagccgacgcgcaaaagctggcggcaacggcagtcggtatgggtgttaaggaacctatcagcctgaacggcggcagcgacagcattaccgtgtccggcagcagcgcgacgcagtgcgtgttcaaagtcggcaacggaggcgcattgcagattcaagggctaaactgcaagtaa

SEQ ID NO: 38217 - DNA, 873 bp, Neisseria meningitidis
atgcccattttgaaccatattgccctcatcggtgtagggctgatcggcggttcgttcgttctcgacctcaaaaggcagggactcgtccgcaccgttaccggtatcgacaccgaccgcgacaacctcgaacgtgcattggaacgcggcgtgattgaccgtgcgtccgttgccatcgacgcggacagcatcggcggtgcggacttggtactgattgccacgcccgtcgccaccgttcccgccattttgaccgcgctgcgccccgttttgccggaacacacttggatttccgatgtcggcagcaccaaatcttcggtcatcgaagccttccgccgctgtctgcccgaccgcctgcaccgctgcatcgccgcccacccgattgccggttcggacagaagcggtgcgcaagccgcgcagttcgggctgttccgccacagaaaactcatcatcacgccacacggcggcgaacattcagacggcattgccttggtagaagaactgtggcacgcggtcggtgcggaaatttatacgatggacgcgcaacgccacgacgcggttttcgccgccgtctcccatatgccccacctgaccgccttcgcctatgtccaccagattctcgaccaccccgacggacaggaatatctgaaattcgccgccacgggctttcgggacttcacccgcatcgcctccggtcatcccgccgtgtgggcggacatctgccttgccaacaaagacagcctgctgcaactggttcaaggcttgggcaaacagttggacgttttggcaaacatcctgaccaccgacgaccgcgaagccctgtaccgctattttgaagaagccaaaaccacacgcgaccgctggctggacggcaactga

SEQ ID NO: 38218 - DNA, 792 bp, Neisseria meningitidis
atgattactgtgaacacactgcaaaaaatgaaggcggcgggcgagaaaatcgctatgctgaccgcttacgaatccagttttgccgcgctgatggacgatgccggcgtggatgtgctgctggttggggattctttgggaatggcggttcaagggcggcagtcgacgctgcccgtcagcctgcgcgatatgtgttatcacaccgaatgtgtggcacgcggtgcaaaaaatgcgatgattgtcagcgatttgccgtttggtgcatatcagcagagtaaggagcaggcgtttgccgccgccgccgaactgatggctgccggcgcgcatatggtcaaactcgaaggcggtgtgtggatggcggaaacgaccgaatttctgcaaatgcgcggtattccggtttgcgcgcacatcggtctgaccccgcaatccgtgtttgccttcggcggatacaaggttcaggggcgcggcggcaaggcgcaggcgttgcttaacgatgccaaggcgcatgatgatgcgggggcggcggtcgtgctgatggagtgtgttcctgcggaactggcaaaaaaggtaactgaatccgtttcctgtccgaccatcggcatcggcgcgggtgtcgattgcgacgggcaggttttggtgatgcacgatatgctcggcattttcccgggtaagacggcgaaattcgtcaaaaactttatgcaggggcatgatagtgttcaagcggcggttcgggcgtatgttgccgaagtcaaagccaaaaccttccctgctgcggaacatatttttgcagactga

SEQ ID NO: 38219 - DNA, 747 bp, Neisseria meningitidis
atgagcacacaagatttaagcggcaaaatcgctttggtaacaggcgcctcgcgcggtatcggtgcagcaattgccgacacactggcggcagccggtgccaaagtcatcggtacggcgaccagtgagagcggtgcggcggcgattagcgagcggttggcgcaatggggcggcgaaggccgcgtattaaattccgccgaacccgaaaccgtcgaaaacctgattgccgacatcgaaaaaacgttcggcaaactcgatattctggtcaacaacgccggcatcacccgcgacaacctcctgatgcgtatgaaagaagaagagtgggacgacatcatgcaggtcaacctcaaatccgtctttcgcgcctccaaagccgtcttgcgcggcatgatgaagcagcgcgccggccgtatcatcaacatcacatccgtcgtcggcgtgatgggcaatgccggtcaaaccaactatgccgcggcaaaagcaggcttaatcggtttctccaaatccatggcgcgcgaagtcggcagccggggcattaccgtcaactgcgtcgcccccggctttatcgataccgacatgacccgcgccctgccggaagaaacccgccaaacctttaccgcccaaaccgccttgggcagattcggcgacgcgcaagacattgccgatgcagtcttgttcttggcttccgatcaggcaaaatacattaccggtcaaacgctgcacgtcaacggcggcatgctgatgccctga

SEQ ID NO: 38220 - DNA, 633 bp, Neisseria meningitidis
atgagaaaaaccaaaaccgaagccttgaaaaccaaagaacacctgatgcttgccgccttggaaaccttttaccgcaaagggattgcgcgcacctcgctcaacgaaatcgcccaagccgccggcgtaacgcgcggcgcgctctattggcatttcaaaaataaggaagacttgttcgacgcgctgttccaacgtatctgcgacgacatcgaaaactgcatcgcgcaagatgccgaagatgccgaaggagggtcttgggcggtattccgccacacgctgctgcactttttcgagcggctgcaaagcaacgacatctactacaaattccacaacatcctgtttttaaaatgcgaacacacggagcaaaacgccgccgttatcgccattgcccgcaagcatcaggcaatctggcgcgagaaaattaccgccgttttgaccgaagcggtggaaaatcaggatttggctgacgatttggacaaggaaacggcagttatcttcatcaaatcaaccttggacgggctgatttggcggtggttctcttcctgcgaacgtttcgatttgggcaaaaccgccccgcgcatcatcgggataatgatggacaacttggaaaaccatcccgacctgcgccggaaataa

SEQ ID NO: 38221 - DNA, 600 bp, Neisseria meningitidis
atgaacaatttaatcaaaatcaacctcctcccctacagggaagagatgaacaagcgcaaacagcagcagtttaaaacgctgatgtacggtgccgtgctgacgggcgttgccgccgttgcggcaacctacctgtttatcgacaatatgatcaataaccagtcggaaagaaacacgctgctggaaacctccatcgcacacttggataccgagctgtcggaaatacaaaagctcaaacaggaaaaagatgccttcctgattaagaaaaacaaagtcgaggagctccagctcaaacgcctccaagccgcaaaaatcctcgacagcctgaatgaggccgtccccggaagcacctacctgacctcgctggatgccgttaccgccgactcttatcggctcagcggcaggacatccagcgacaaccgcgttgccgccatgatgagggcgatgcccaataccggcatattcaagcaacccgaattgttaagcatcaagaaaaacaattcgcatcaagaatttacccttcaggcaacattacaacccatcgtaaaggcggccgaatccaaagagaatccggcttcgggaaacgcacaggaggcaaactga

SEQ ID NO: 38222 - DNA, 1215 bp, Neisseria meningitidis
atgacgcacaccgcatcgaaaacacccaaattttggctgaccatcaccgccgccgcattcatcctgctgattaccatcggcatgaggatgacgctcggactgttcgtccaacccatcgtcaacaccaccgaattgagcattgcccaattcagcctcatcatcgccgttttccaactgatgtggggcgtatcgcaaccattgtccggcgcgcttgccgaccgtttcggcgcgttcagggtattaagcggcggcgccgtcctgctcgtctgcgcctgcctgattgcccccaacatcccgacttattgggggctgatgattgccgtcgggctgctgctcgcattcggcacaggctcaggcggtttctccatcattatggggcaggtcgccgcccaagtccccgcacacaaacgcggcttggcatccggactggtcaacgccggcggttcggcaggacaattcctgttcgcaccgctggttcaagggcttaccgcattgccccaagccggctggacgggcacattttacgtttgggcgggcatcgccctgctgattctgcccgtctcatggtggcttgccggcggcaacaacgccgcccacacccaacacgcccaagccacacacggacaaagcctcggagaagcagtcaaaaccgccttcaaaaccccaagctacatcctgctgcacctaagcttttttgcctgcggcttccacatcgcctttctcgtaacccacctacccacggaagtcgccctgtgcggactgcccgccaccgtcgcatccacagccatcgccatcatcggactggcaaacatcgccggctgcattttttccggctggtgcacaagccgcgttcggggcaaatacgtcctgttcggactgtacgcctcgcgcgccgcgatgatactcatctacattttttcgcccaagaccgacctcaacttctacattttcgccgccgcactcggatttacctggctcgccaccgtcacgccgaccgcctccattaccggcaaactcttcggcacacgctacctcgccaccctgttcggactgacgatgctcagccaccaaatcggcggattcctcggctcgtacatcggcggcatcgtgattacacaattcggcgactacggctggatgtggtacgccgacgcactgctggcgggaaccgccgccctcctcaacctccccatccgcgaacccgaaaccgcctga

SEQ ID NO: 38223 - DNA, 585 bp, Neisseria meningitidis
atgatcagcagactgaccggcaaactggttgaaaaaaaccctccgcaaatcgtcatcgatgtcaacggtgtcggctatgaggccgacgtatcgatgcagaccttctacaacctgccgcccgtgggtgaaagcgtacaactgtttacccagcttatcattcgggaagacgcacatcttttatttggttttgccactgcggaagaacgcaaaacattccgccaactgattaaggtcggcggcatcggcgcgaaaacggctttgggcattttgtcggcgatgacggcagacgaactggcgcaggcggttgcagaagaagatgtcaaacgcctgtcttccgcgccgggaatcggcaaaaaaaccgccgaacgtatggtcttggaactgcgcggcaagctggtcgcgcatacggtaacggacgggctgtttgccgccgcacccgccgccgacgaaacggaagacatcgtcagcacgctgcttgcgctgggttacagcgaacgcgaagcaaaagcggcggtcaaaggcgttccggaggggacggacgtgggcgaaggcgtgcgccttgctttgaaaaacctgctgaaataa

SEQ ID NO: 38224 - DNA, 1023 bp, Neisseria meningitidis
atgctgacaaaaaaggagtttgagaagtttttagacgaggtttgcaccgtattgaggcaagaggcaaaaaacgcacctttcaaatcccaagatatttttgaaaacagagttcgtgcgctgtgcattgcaaaaattcccgcttatgctgacatagttatcaatcctgaacctgtgccgcaaattttccccgatgttccaataggggaatatggcgtagaagtcaaattcacgctaaaagatacttggcgcagcgtagcaaacagtatccaagagaaaaacaaagctgacggtgtacagcatatctatgtggtattcggaaaaatggggggcattcccgatgtgaaatggcaactttacgaagatagcgtaatccatgtccgcacatcgcatgttccgcgctttgaggtagaaatagaatctgatcgaccgtctctgtttgagggtttcggtatttcctatgctgaatttgccgatttggatatgcatgaaaaaatggaatatatccgaaaatatgcccgtaacaggttgaaagaaggcgagcggttatggtggatagaagacattgacgcagtagacagccatgatctgcctttggaagtgcgcctttacacttccctgccgcaggaagaaaaaatccgcctccgagctgaagcagcattagtctccccccgtattgtctgctcaggcagggcgaagcacaaatacgataatgccgtcctgtatctgattacctatcgcggtgtgctttgtcatcaggcgcgggacttattcagtgcgggcagcgttgccaactcggcggaagactaccgtggcggaaactatgtagaaaaatctttaaaattgattgagcatgaaattgaaaaagctgctttggaaatggatgatgctctaattgtcgaatattggggagaaagcgtcccgacagaaaaacgcctagagtattggattaagatgttggatgatttggcagatggctggataccttctgaatcgctattcaatggtaggtataaagccaaataa

SEQ ID NO: 38225 - DNA, 1071 bp, Neisseria meningitidis
atgaccaaacatatcgccatcctccgaggtgacggcatcggtcccgaaatcgtcgccgaaaccgtccgcgtactcgacaaactcatcgcccaaggtttggatgccggctacgaatacgccccattgggcggcgaagcctatgacgaatacggtcatccttatcccgaatttacgcaaaacctctgccgcaaagccgatgccgtcctgcttggtgcagtcggttctcctcaatacgacaacctcgaccgtccgttgcgccctgagcgcggcctgttggcaatccgtaaggatttgaacctgtttgccaatttgcgtcctgctgttttatatcccgaattagccaacgcctccacgctgaagcctgaaatcgttgccggtttggatattttgattgtgcgcgaactcaccggcgacatctatttcggcgaaccgcgcggcatccgcgttctggaaaacggcgaacgcgaaggctacaacaccatgaaatacagcgaaagcgaaatccgccgcatcgcccacgtcgctttccaatccgcccaaaaacgcagcaaaaaagtctgctccgtaggcaaagccaacgttttggaaaccaccgaactgtggcgcgaaatctttgaagaaatcggcaaacaatatcccgatgtcgaactttcccatatgtatgtggacaacgccgctatgcagctcgtgcgcgcacccaaacagtttgacgtgattgccaccggcaacatcttcggcgacatcctctccgacgaagcctccatgctgaccggctccatcggtatgctgccttccgcttctttggacgaaaacggcaaaggcctgtacgaaccgtcccacggctccgctcccgacatcgccggacaaaacaaagccaacccgctggccaccatcctctcgctcgcaatgttgctgcgttacagcctgaacgacgaagcgcgcgcgcaacaagttgaaaacgccgtccaaaaagtgctgcaacaaggcttgcgtaccagcgacatttacgaagaaggcacaaaactcgtttcctgctccgaaatgggcgatgcggtactcgccgccttgtaa

SEQ ID NO: 38226 - DNA, 315 bp, Neisseria meningitidis
atgaaacttatctataccgtcgtcaaaatcattatcctgctgttcttcctgctgcttgccgtcattaatacggatgccgttaccttctcctacctgccggggcaaaaattcgatttgccgctgattgtcgtattgttcggcgcatttgtagtcggtattatttttggaatgtttgccttgttcggacggttgttgtcgttacgtggcgagaacggcaggttgcgtgccgaagtaaagaaaaatgcgcgtttgacggggaaggagctgaccgcaccaccggcgcaaaatgcgcccgaatctaccaaacagccttaa

SEQ ID NO: 38227 - DNA, 510 bp, Neisseria meningitidis
atgacaatgattttaagcattttaagcctgttttttatcatcagactgttatttttagccgtctctattaaacatgaaaaagccttgattgccaaaggggcaaaacaatacggaaaaaccaattccacgctgcttgcggcagttcatacgctttattatttggcgtgttttgtttgggtatggctttctgacactgcttttaatggcatatccttgattggtacgctgacggtgatggcttcgtttgtgatattgtcattgattattaagcagttgggggagatttggacggttaaaatctatattttaccaaatcatcaaattaatcgttcgtggttgtttaaaacattccgccaccccaattattttttaaacatcatacccgaactgattggcatcgccttattatgtcaagcgtggtatgttttattgattggcctgcccatttatttgctggtcttatttaagcgtatccgacaagaagaacaggcgatggcaacacttttttaa

SEQ ID NO: 38228 - DNA, 687 bp, Neisseria meningitidis
atgtttgatttcggtttgggcgagctggtttttgtcggcattatcgccctgattgtcctcggccccgaacgcctgcccgaggccgcccgcaccgccggacggctcatcggcaggctgcaacgctttgtcggcagcgtcaaacaggaatttgacactcaaatcgaactggaagaactgaggaaggcaaagcaggaatttgaagctgccgccgctcaggttcgagacagcctcaaagaaaccggtacggatatggaaggcaatctgcacgacatttccgacggtctgaagccttgggaaaaactgcccgaacagcggacacctgccgatttcggtgtcgatgaaaacggcaatccgcttcccgatgcggcaaacaccctatcagacggcatttccgacgttatgccgtccgaacgttcctacgcttccgccgaaacccttggggacagcgggcaaaccggcagtacagccgaacccgcggaaaccgaccaagaccgcgcatggcgggaatacctgactgcttctgccgccgcacccgtcgtacagaccgtcgaagtcagctatatcgataccgctgttgaaacccctgttccgcataccacttcgctgcgtaaacaggcaataagccgcaaacgcgatttgcgtcccaaatcccgcgccaaacctaaattgcgcgtccgtaaatcataa

SEQ ID NO: 38229 - DNA, 840 bp, Neisseria meningitidis
  misc_feature 6, 7, 8, 9, 10: 'n' is a, c, g or t
gtgtgnnnnntcttggtgctgggcatcattatgctgggtatggggatgactttgggcagggaggactaccggattttggcgcagcgtcctttggatgtgtttatcggtgcggcggcgcaatataccgtgatgccgttgctcgccatcggtattgccaagctgttcgacctttcgccggggctgactttggggctggtgttggtggggacgtgtccgggcggcgtgtcgtccaacattatgagtttccttgccaaaggcgatgtggcgttttcagtcggtatgacgacggtgtctacggtgctggctccggccgttacgcctttgtggatgacctgcctggtcggtcagacggtggatatggacggttgggggatgttccggtttatgctgctggtcacgcttttgccggtggtgctgggttcggcggcaaatatcctgctgcacggaaaacattggtttgaaaatgtccgtgccgttatgccgggcgtggcggtattggcatttgcctgcattgtcggcggtgtggcttcggttcacggacaccgttttgccgaatcggcgttggtaatggtgttggcgattgcggtacacaatatcgccggctatgtgtcaggctattacgccgccgcgctgtttggtatggatacggcaaaaaaacgcaccttggcaatcgaagtcggcgtgcagaatgccggtttggcaacaggattgagcgcgaaatttttcccaggcaaccccgaatcggcggttgcggcggcggtcgcctgcgtgtggcattcggtttcggggacggtattgggcaacttgttcgctctgtgggacaagcgtcgggacgcttag

SEQ ID NO: 38230 - DNA, 513 bp, Neisseria meningitidis
atgaaaaactttaacggcaaactcatcctcatcggactgatgggcgcgggcaaaaccacgctgggccggcaaatggcgcagcggctggattaccgtttttacgacagcgatcacgaaatcgccgcagccgccggcgttcccatccccaccatatttgaaatggaaggcgaacagggattccgttcgcgcgaaaccgccatactcaaaaagctggttatcctgccccatatcgtcctgtccaccggcggcggcgcggtgttaaaagaagaaaaccgcgcccttatccgcaaaagcggcacggtcgtctatctgcacgccccgcccgaaatcctgctcgaacgcacgcgctgcgacaacagccgtcctttgctgcaagttgccgatcctttggcgaaattacgtgaactctacgccgcacgcgaccccgtttaccgccaaaccgccgactttaccgtagaatcggcaaactgccgggaaaccgtgcaaaccctgctcaaacgcttatcccgataa

SEQ ID NO: 38231 - DNA, 618 bp, Neisseria meningitidis
atgaccttcccgccactcaaatccccgctcaaattctacgccgtcgtccccaccgccgattgggtggggcgcatggtcaaagcaggtgccgacacggtgcaactgcgctgcaagaccctgcacggcgatgaattgaaacgcgaaatcgcccgctgcgtcgccgcctgtcaaggcagccgtacgcagcttttcatcaacgaccactggcgcgaggcaatcgaagcaggcgcgtacggcgtgcatctcggacaagaagacatggacaccgccgaccttgccgccatcgccgccgccggtttgcgcttgggtttgagtacgcactccgttgccgaactcgaccgcgccctgtccgtacaccctagctacgtcgccagcggcgcgattttcccgaccacgaccaagcaaatgcccaccgccccgcaaggcttggacaaactgcgcgaatatgtgaaacaggcaggcggcacgcccgtcgtcgccattggcggcatcgatttgaacaatgctgaagaggtattggcaaccggcgtttcctcactcgccgtcgtccgcgccgtgaccgaagcggcaaatcccgaagcggtggttaaagcgtttcaggctttgtgggatggataa

SEQ ID NO: 38232 - DNA, 564 bp, Neisseria meningitidis
  misc_feature 8, 9, 10, 11, 12: 'n' is a, c, g or t
gtgtgtgnnnnnggcgaggaagtggtcattgctaaatttttcgaattgattgaaaaacatacgccgcaactggtcagttggaacggcggcggtttcgacctgccggttctgcattaccgttcgctgctacacggcatcaacgccgcgcgctattgggatatgggcgacggcgatttcggcgacagccgcgatttcaagtggaacaactacatcagccgttaccaccaacgccactgcgatttgatggatttgctcgcgctttaccagccgagggcaaacgtgccgctggacgatatggcgaaactgtgcggttttccgggcaagctgggtatggacggcagcaaggtgtgggatgcgttccacgcgggcaggctgaaagaaatccgcaattattgcgaaaccgatgccgtgaatacgtatttgatgtatctgcgtttttgtctggtcagcggcagattcgacgcggacgaatacgaaatggaaatcaagcggatcagaaactatctttccacccaaacagaagataaaccgcattggtcagaatttgcccaagcgtggaaatag

SEQ ID NO: 38233 - DNA, 498 bp, Neisseria meningitidis
atgtcttcatctgtttcaagtaaaacgcgctattgggtattggcacttgccgccatcgtgctggaccagtggtcgaagtgggcggtgctgtcgtcgtttcagtatcgggaacgcgtcaatgtcattccttcgtttttcgatctgaccttggtgtacaacccgggcgcggcgttcagcttccttgccgatcagggcggctggcaaaaatacttttttttggtgctggcggtggcggtgagcgcgtatttggtacgcgccatcttgcgcgatgagtttgcaaccctcggcaaaacgggtgcggcgatgattatcggcggtgcgttaggcaatgtcatcgaccgcctgatacacggtcatgtcgtcgatttcttattgttttattggcaaaattggttttatcccgcctttaatattgccgacagctttatctgcgtcggtgcggtgttggcggtgttggacaacatcgtccaccgtaaaacccaagaagaaaaatattga

SEQ ID NO: 38234 - DNA, 2790 bp, Neisseria meningitidis
atgaccgattacagcaaaaccgtcaacctgctcgagagcccgtttccaatgcgcggcaatcttgccaagcgcgagcctgcatggctgaaaagctggtacgagcaaaaacgctaccaaaaactgcgcgaaatcgccaaaggccgcccgaaattcattctgcacgacggtcctccgtatgccaacggcgacatccacatcggtcacgccgtcaataaaatccttaaagacatcattatccgcagcaaaacccaagccggtttcgatgcgccttatgtgccgggttgggactgccacggtctgcccatcgaagtgatggtggaaaagctgcacggcaaagacatgcccaaagcccgcttccgcgaattgtgccgcgaatacgccgccgaacagattgcccgtcagaaaaaagactttatccgcttgggcgtgttgggcgactgggaccatccttacctgactatggatttcaaaaccgaagccgataccgtgcgtatgctcggcgaaatctacaaatccggctatctctaccggggtgcgaaaccggttcaattctgcttggactgcggttcttcgctggccgaagcggaagtggaatataaagacaaaatctcgcccgcgattgacgttgcctatccgtttaaagacactgccgcgcttgccgccgcattcggtttggcaagtatcgaaggcaaagcgtttgccgtcatctggacgactacgccttggacgctgcctgcgagccaagccgtatctgccggcgcggacgtggtgtatcaactgattgatacgcccaaaggcaaattggtattggcgaaagatttggcggaagacgcgctcaaacgttacggcttttcagacggcatcgccatccttgccgaaaccaccggcgacaagctggaaaacctgcacatgaaccatccgttcctcgaacgcgatattcccatgcttaacggcgaacacgttaccaccgatgccggtaccggcttggtgcatactgcgcccgcgcacggtttggaagactacgccgtctgcaacaaatacggcatcgagctttacaatcctgtcaacgccgaaggcaaatacatcggcgaaacgccgcgcgttgccgatatgcgcgtttgggaggcgaaccccgtcatcctgcaatggttggaagaaaccggcaaccttttggcaagcagtaaaatcgaacacagctacgcccactgctggcggcacaaaacgccgctgatttaccgcgcgacaggtcaatggtttgtcggtatggacaaagccggtgccgacggcaaaaccctgcgcgacaaagccatcaaggccgtggacgataccgaattcttcccgtcttggggtcgcgcgcgtttggaagccatgattgaaggtcgtcctgactgggtggtttcacgccaacgctattggggcacgccgatgactttctttgttcacaaagaaacgggcgagctgcatccgaactctgccgaacttttggaaaaagtcgcgcaacgcattgaagaaaaaggcatcgaggcttggttctccctcgataaaagcgaattattaagcgcggaagattgcgaacattacgacaaactccccgatacgatggacgtatggttcgattccggttcgacccattattccgttgtgaaacaacgcgaagaattggaatggccggcggatttgtatctcgaaggcagcgaccagcaccggggctggtttcaatcgtccatgctgaccggctgcgcctcatcaatgggacgcgcaccgtataaacagctgctgacccacggttttgttgtagacggcgaaggcaaaaaaatgtcgaaatccatcggcaacgtcgtcgcgccgcaagaagtctataacgaattcggcgcggacatcctgcgtctgtgggcggcatctaccgattacagcggcgaattggcgatttctaaagaaatccttaagcgcgtaaccgaaagctaccgccgtatccgcaataccttgagctttttgtttgccaacttgagcgactttaatccgattgaagatgccgtgcaacaggcagacatggtggaaatcgaccgctacgccgtggtattggcacgtcagctgcaagagcgtctggcaggcgattactatccgcgctatgctttccactttgccgtaaaagacattgtttctttctgctcggaagacttgggcgcgttctacctcgacatcctgaaagaccgcctctacaccaccaaagccgacagccatgcacgccgcagcgcacaaactgccctgtatcacatcacacgcagtttggttctcttgattgcaccgattttgtgcttcaccggcgaagaagcgtgggacatcatcggcggcggcgaagaagacagcgtcctcttccacacctggcacgagttcccgaccatcaacgaaaaagccgaagccgaattggtgaaaaaatggacggcagtccgcaaagtgcgcgaagccgtaaccgccgccatcgagcctttgcgcgccgacaaaaccatcggttcgtccttgcaagccgaagccgaaatcaccgcgccggaagaaatggccggctacctgaacgccttgggcgaagaattgcgctttgccatgctggtgtctaaagcagaagtgaaagtaggtgatgaacttgccgttgccgccaaagccggcagcggcgaaaaatgcgaacgctgctggcactacacacgcgatgtgggcgcggttgcaggctatgaaaccgtctgcaaacgctgtgcagagaatgtcggcggagaaggcgaaacgcgccattacgcctga

SEQ ID NO: 38235 - DNA, 954 bp, Neisseria meningitidis
atgacacataccgtccacctgcatttagaagaaaccgacaacttggcgttgcagcgtctgtgcggttcttttgacaacaaccttgatttacttgctaaagcactcgatatccacatcagccgccgttttgaacatttcactttcaacggcgcatttgcacacgccggcaaacgcgcactgctcaaactcttggaaacggcgcagacgcgcgacctaaacgacggcgacatcaggcttgccgccgtcgaagcccaaaccgaagatgccggtcatcaagaaaaaaaccatgaccacgcctattatttccgcaccaagcgcggcagcatcggcggcagaacgccacggcagaacggctatatccgcgccctactcaaccacgacatcgtattcggtctcgggccggcaggtacgggcaaaacctatcttgccgtcgccgccgccgtcgatgcgatggaaaaacaccaagtcgaacgcatcattttagtgcggcctgccgtcgaagccggcgagaaactgggttttctgcccggtgacctgacccagaaagtcgatccctaccttcgtccgctttatgatgccctctatgacctgatgggcttcgaccgtgtcaccaagctgattgaaaaaggtctgattgagattgccccgctcgcctatatgcgcggcaggacgctcaacggcgcatacatcatcctcgacgaagcgcaaaacaccacgcccgaacaaatgaaaatgttcctgacccgcatcggcttcggcgcgaaagccgtcattaccggcgacaccagccaaatcgacctgcccaaaaacatcaaatcgggattaaaagatgcgcgtgagaaactgcacggcgtggaagggctgtatttccacacctttaccggcgaagacgttgtccggcatcctttggtgcaaaaaatcgtcgaagcctacgaatcggcagaacacgactga

SEQ ID NO: 38236 - DNA, 297 bp, Neisseria meningitidis
gtgcacatattccgtttcggaacgagcttccatataccgaatacggggctgaccgtcggcggcggcgtgtccgcacaaagcggcacaagcagcctgtacaacatccgtcagggcggctacgggctgatagacggtttcgtccgttacgaattgggcaaacacgccaaattgagcctcatcggtacgaacttaaacggacgcacttattttgagaacaactacaaccgtacgcgcggcgcaaacaacttctatggagagccgcgcactgtcagcatgaaactggattggcagttttaa

SEQ ID NO: 38237 - DNA, 684 bp, Neisseria meningitidis
atggaactggtatttatccgccacggacaaagcgaatggaacgcgaaaaacctgtttacaggctggcgcgacgtgaagctgagcgagcaggggcttgccgaggctgccgccgccggtaaaaaactgaaagaaaacggctatgagttcgacatcgccttcacatccgtcctgacccgcgcgattaagacctgcaacatcgttttggaagaatccgaccaactgttcgtaccgcaaatcaaaacatggcggctgaacgaacgccactacggccaactgcaaggcctggacaaaaaacaaaccgccgaacaatacggcgacgagcaagtccgcatctggcggcgcagctacgacaccctgccgccgcttttggacaaagacgatgagttttccgcacacaaagaccgccgctatgcccatctgcctgccgatgtcgtacccgacggcgaaaacctgaaagtaacgctggagcgcgtattaccgttttgggaagaccaaatcgcccccgcgattttgagcggcaaacgcgtcttggtggcggcgcacggcaactccctgcgcgcgctggcaaaacacatcgagggcatttccgacaaagacatcatgggcttggaaatcccgactggccagccgttggtgtacaaattggacgacaatttgaaagtcctcgaaaaattctacctgtaa

SEQ ID NO: 38238 - DNA, 1146 bp, Neisseria meningitidis
atgatttacggctcaatgccgtctgaaaagctcacaatttttcagacggcatttgttatgcaagtaaatattcagattccctgtatgctgtacagacgcgggagtgttaagccccccttgtttgaagctccgcggctcctgccgagcttcaccgaccccgttgtgcccaagctctctgctcccggcggctacattgtcgacattccgaaaggcaatctgaaaaccgaaatcgaaaagctgtccaaacagcccgaatacgcctacctgaaacagcttcagacggccaagaacgtcgattggaaacaggtgcagctggcctacgacaaatgggactataaacaggaaggcttgaccggagccggtgcagcgattgtggtgattattgtaaccgctctaacttatggatacggagcggctgcagcgggtagcgtaactgccgcaggaagtagtacagccgcagctgcaacaacgacagcggcagcaactaccactgtttctactgcagctgccatgcaaaccgcagctttagcctccttgtatagccaagcagctgtagccatcatcaataataaaggcgatgtaggcaaagcattaaaagatctcggcaccagtgatacggtcaagcagattgttacttccgcactgacggcgggtgcattaaaccagatgggagcagatattgcccaattgaacagcaaggtaagaaccgaactgttcagcagtacgggcaatcaaaccattgccaaccttggaggcagattggccaccaacctcagcaatgcaggtatctcagctggtatcaataccgccgttaacggcggcagcttgaaagacaacttaggcaatgccgcattgggagcattggttaatagcttccaaggggaagccgccagcaaaatcaaaacaaccttcagcgacgattatgttgccaaacagttcgcccacgctttggcgggttgtgttagcggactggtacagggaaaatgtaaagatggggcaattggcgcagcagttggggaaatcgtagctgaatccatacttggcggcagaaaccctgctacactcagcgatgcagaaaagcataaagttatcagttactcgaagattattgcgggcagcgtgcggcactcaacggcggcgatgtga

SEQ ID NO: 38239 - DNA, 120 bp, Neisseria meningitidis
atgatttgggatttgctatattgtgttatgagcgcaatgcagccgacaaaaaagaattcttggattggttatatggaattgtcaggactgtccctgccgaaagttttccaaggtatctga

SEQ ID NO: 38240 - DNA, 201 bp, Neisseria meningitidis
atgaaatttgaagaacgtttcatagttcaagacttggaaacgcatgactttatttatcccgatcctttcggtgatgtggggtttactcaaaatattaaatcagcaggtcaatttgaaagctacgaagatgcgttgaattcaggcataaatgaaataggcggaggattccagatatttcagttcttcgtaaaatcggaataa

SEQ ID NO: 38241 - DNA, 288 bp, Neisseria meningitidis
atgaagataacgcactgcaaattaaagaaaaaagtacagaaagaactgctccgtttttttgtactcgaagttaccgcccgttctgccgccgatattttgggtatccatcccaattcggcagcactgttctaccgtaaaatccgcacggttatcaaccatcatttggtcttggctgccgatgaggtttttgagggccctgtcgagcaggacgaaagcgatttcggcggacggcgtaaaggcagacgtggtcgcgggcggcaggaaaagtggttgtcttcggcattctga

SEQ ID NO: 38242 - DNA, 228 bp, Neisseria meningitidis
  misc_feature 205, 206, 207, 208, 209: 'n' is a, c, g or t
ttggacaaacaaatcgacaaccacacccacacgcattttgacggcaaagaccaagtggcggagcaaatcaaaggcatcggttcgataacgacggctacgctgatggtgatgttgcccgaattggggcggctgtcgcacaaacggatagcgggtttggccggcattgccccgcacccgagggagggcggggaaaccaaattcaaannnnncacacacttaattaattaa

SEQ ID NO: 38243 - DNA, 876 bp, Neisseria meningitidis
atgaacctctacgacctgctccttgccccctttgcagaatttgactttatgcgctacgccctcgtatccgtcttctgcctgtccctcagtgccgcacccgtcggcgtattcctcgtcatgcgccgtatgagcctgataggcgacgcattgagccacgccgtcctgcccggtgccgccgtcggctacatgtttgccggcttaagcctgcccgccatgggtttgggcggcgtagccgcaggtatgctgatggcactgcttgccggactcgtcagccgcttcaccaccctgaaagaagatgccaactttgccgccttttatctcagcagcctcgccatcggtgtagtcctcgtcagcaaaaacggcagcagcgtcgatctgctgcatctgcttttcggctctgtacttgccgtcgatattcctgccctgcagctcatcgccgccgtatccagcctcacgctcattacccttgccgtcatctaccgcccgctcgtactcgaaagcatcgaccccctgtttctcaaatctgtcggcggcaaaggcgggctttggcacgtcctctttctcgtcctggtcgtcatgaacctcgtatccggctttcaagccctcggcacactcatgtccgtcggactcatgatgctgccaaccattaccgcccgcctgtgggcgaagcacatgggcgcactcatcctcctatccgttctgacagccctgctgtgcggcttgagcgggctgctcatttcctaccacatcgaaatcccttccggccccgccatcatcctctgttgcagcgtcctttatctcttttccgtcatactcggcaaagaaggcggcattctgaccaaatggctcaaaaaccaccgccaccacaccacctga

SEQ ID NO: 38244 - DNA, 195 bp, Neisseria meningitidis; identical to SEQ ID NO: 37083

SEQ ID NO: 38245 - DNA, 3606 bp, Neisseria meningitidis
atgtttcattttgcatttccggcacaaactgccctgcgccaagcgataaccgatgcctaccgccgtaatgaaatcgaagccgtacaggatatgttgcaacgtgcacagatgagcgatgaagagcgcaacgccgcctccgagcttgcccgccgtttggttacccaagtccgcgccggccgcaccaaagccggcggcgtggatgcgctgatgcacgagttttcactctccagcgaagaaggcatcgcgctgatgtgtctggcagaagccctgctgcgtatccccgacaacgccacgcgcgaccgcctgattgccgacaagatttcagacggcaactggaaaagccatctgaacaacagcccttccctcttcgtcaacgccgccgcctggggcctgctgattaccggcaaactgaccgccacaaacgacaaacaaatgagttccgcactcggccgcctgatcggcaaaggcggcgcaccgctcatccgccaaggcgtaaattacgccatgcggcttctgggcaaacagttcgtcaccggacagaccattgaagaagccctgcaaaacggcaaagaacgcgaaaaaatgggctaccgcttctccttcgatatgttgggcgaagccgcctacacccaagccgatgccgaccgctactaccgcgactatgtcgaagccatccacgccatcggcaaagatgcggtaggacaaggcgtttacgaaggcaacggcatttccgtcaaactttccgccatccatccgcgctactcgcgcgcccaacacggccgcgtgatgggcgaactgttgcctcgcctgaaagaattgttccttttgggtaaaaaatacgatatcggtatcaacatcgatgccgaagaagccaaccgcttggagctgtctttggatttgatggaggctttggtttcagaccctgacttggctggctacaaaggtatcggtttcgttgtccaagcctaccaaaaacgttgtccgttcgttatcgactacctgattgacctagcccgccgcaacaaccaaaaactgatgatccgcctcgtcaaaggcgcgtattgggacagcgaaatcaaatgggcgcaagtggacggcttgaacggctatccgacctacacccgcaaagtccacaccgacatctcctacctcgcctgcgcgcgcaaactgctttccgcgcaagacgcggtattcccgcaatttgccacgcacaacgcctacactttgggcgcgatttaccaaatgggcaaaggcaaagactttgaacaccaatgcctgcacggcatgggcgaaaccctgtacgatcaagtcgtcggcccgcaaaacttaggccgccgcgtgcgcgtgtacgccccggtcggcacacacgaaaccctgctcgcctacttggtgcgccgcctgttggaaaacggcgcgaactcgtctttcgtgaatcaaatcgttgatgaaaacatcagcatcgacacgctcatccgcagcccgttcgacaccatcgccgaacaaggcatccacctgcacaacgccctgccgctgccgcgcgatttgtacggcaaatgccgtctgaactcgcaaggcgtggacttgagcaacgaaaacgtattgcagcagcttcaagaacagatgaacaaagccgccgcgcaagacttccatgccgcatccatcgtcaacggcaaagcccgcgatgtcggcgaagcgcaaccgattaaaaaccctgccgaccacgacgacatcgtcggcacagtcagctttgccgatgccgcgcttgcccaagaagcggttggtgcagccgttgccgcgttccccgaatggagtgcgacacctgccgccgaacgcgccgcctgcctgcgccgtttcgccgacctgctcgaacagcacacccccgcgctgatgatgcttgccgtgcgcgaagcgggcaaaacgctgaacaacgccattgccgaagtgcgcgaagccgtcgatttctgccgctactacgcaaacgaagccgaacacaccctgcccaaagatgccgaagccgtcggcgcgattgtcgccatcagcccgtggaacttcccgctcgccatctttaccggcgaagtcgtttccgcattggcggcaggcaacaccgtcatcgccaaacccgccgaacaaaccagcctgattgccggttatgccgtttccctcatgcacgaagccggcatcccgacttccgccctgcaactcgtcctcggcgcaggcgacgtgggtgcggcattgaccaacgatgcccgcatcggcggcgtgattttcaccggctcgaccgaagtggcgcgcctgatcaacaaagcccttgccaaacgcggcgacaatcccgtcctgattgccgaaaccggcggacaaaacgccatgattgtcgattccaccgcacttgccgaacaagtctgcgccgacgtattgaactccgccttcgacagcgcgggacaacgctgctccgccctgcgtatcttgtgcgtccaagaagacgttgccgaccgtatgctcgacatgatcaaaggcgcgatggacgaactcgtcgtcggcaaaccgattcagctcactaccgatgtcggccccgtcatcgatgccgaagcacagcaaaacctgttgaaccacatcaacaaaatgaaaggcgttgccaagtcttaccacgaagtcaaaaccgctgccgatgtcgattccgaaaaatccacgttcgtccgccccatcctgtttgaattgaacaacctcaacgaactgcaacgcgaagtcttcggccccgtcctgcacgtcgtccgctaccgcgccgacgaactcgacaacgtcatcgaccaaatcaacagcaaaggctacgccctgacccacggcgtacacagccgcatcgaaggcacggtacgccacatccgcagccgcatcgaagccggcaacgtttacgtcaaccgcaacatcgtcggcgcagtcgtcggcgtacagcccttcggcggacacggtctgtccggcacaggccccaaagcaggcggttcgttctacctgcaaaaactgacccgcgccggcgaatgggttgccccgaccctgagccaaatcggacaggcggacgaagccgcactcaaacgcctcgaagcactggttcacaaactgccgttcaacgccgaagagaaaaaagccgcagcggccgctttgggacacgcccgcatccgcaccctgcgccgtgccgaaaccgtccttaccggaccgaccggcgagcgcaacagcatctcatggcacgcgccaaaacgagtttggatacacggcggcagcacggttcaagcctttgccgcactgaccgaacttgccgcctccggcgtacaggcagtggtcgaacccgacagcccgctggcttcctacaccgccgacttggaaggtctgctgctggtcaacggcaaacccgaaaccgtcggcatcagccacgttgccgccctgtcgcctttggacagcgcgcgcaaacaggaacttgccgcccacgacggcgcactcatccgcgtcctcccttcggaaaacggactcgacatcctgcaagtttttgaagaaatctcttgcagcgtcaacaccacagccgccggcggcaacgccagcctgatggcggttgccgactga

SEQ ID NO: 38246 - DNA, 216 bp, Neisseria meningitidis
atgaaagaatacaaagtcgtcatttatcaggaaagccagttgtccagcctgtttttcggcgcggcaaaggtcaaccccgtcaatttcagcgcgttcctcaacaaacaaacccccgaaggctggcgggttgtaacgatggaaaaagatttgcgccgtatgctgttgtttttcaaacgcgaggcctacgtcgtcattttggagcgggaccgtgtttaa

SEQ ID NO: 38247 - DNA, 186 bp, Neisseria meningitidis
atgagcactttcttccggcaaaccgcccaagccatgattgccaaacacatcgaccgcttcccgctattgaagttggatcaagtgattgattggcagccgatcgaacaatacctgaatcgtcaaaaaacccgttaccttcgagaccaccgcggccgtcccgcacatcctgtcgccggtattccctaa

SEQ ID NO: 38248 - DNA, 276 bp, Neisseria meningitidis
atgaacgcgtcaaactggagcgtttacctgatattgtgtgaaaacagcgcgttctattgcggcatcagcccgaatccgcaacagcggcttgccgcccacacggccggaaaaggcgcgaaatatacccgcgtattcaaaccggtggcgatgcgtatcgttgcaggcgggatggataaaggcactgcgctcaaacaggaaatcgccgtcaaaaaactgaccgccgcacaaaaacggaaattgtgggaacaggcggaaaaaatgccgtctgaaacctga

SEQ ID NO: 38249 - DNA, 807 bp, Neisseria meningitidis
atgcaaaaccacgttatcagcttagcttccgccgcagaacgcagggcgcacattgccgataccttcggcaggcacggcatcccgtttcagtttttcgacgcactgatgccgtctgaaaggctggaacaggcaatggcggaactcgtacccggtttgtcggcgcacccctatttgagcggagtggaaaaagcctgctttatgagccacgccgtattgtggaaacaggcattggacgaaggtctgccgtatatcgccgtatttgaggacgacgttttactcggcgaaggcgcggagaaattccttgccgaagacgcttggctgcaagaacgctttgaccccgattccgcctttatcgtccgcttggaaacgatgtttatgcacgtcctgacctcgccctccggtgtggcggactactgcgggcgtgcctttccgctgttggaaagcgaacactgggggacggcgggctatatcatttcccgaaaggcaatgcggttttttttggacaggtttgccgttttgccgtctgaacgcctgaaggcggtggattggatgctcttcagcagttttctcgacaaaggggggatgacggtttgccaactgacccccgccttgtgcgtccaaagcgaaaccctgcccagccaactgaaaaacggcaggcaggaatcgtaccgcaaccgccgctccccgaaggttttgttgaaacgcgctttgggaaaaatcggcagggaaatcgaaagggcgagggaacggaaacgtcagaaaaaattggaaaaacacctcgggcggcacgtcgtcccatttgaatag

SEQ ID NO: 38250 - DNA, 726 bp, Neisseria meningitidis
atggaaacacaaaacaaacctaccgttaccgacattgaccgccccatactcgtcccgcccggcggacataaaaaagtcttgctgcattcctgctgcgccccgtgcagcggcgaagtgatggaggcgatgcttgcctccggcatcgactacaccatttatttttacaatcccaatatccatccgcacaaagagtatatgctccgaaaagaggaaaacgtgcgctttgcggaaaagttcggcattcctttcatcgataaagacgacgactacgaaaacgaccgcaaagaatggtttgccaaagccaaaggcatggagtttgagccggaacgcggcatccgctgcaccatgtgtttcgatatgcgttttgaaaaggcggcgcaatacgcgcatgaacacgggttccccgtctttaccagttcgctgggcatttcacgctggaaaaatatggcgcaaatcaacgactgcggacaccgcgccgccgcgccttacgatgatgtggtgtattgggatttcaactggcgcaaaggcggcggcagcgcgcgcatgattgaaatcagcaaacgtgaaaacttctaccagcaggaatattgcggttgcgcctattccttgcgcgattccaatgcccaccgcaaatcgcagggcagaatccccatcaaactcggcgtgctgtattacggcgacgaatcgacacaatatgaacctgcacccatccgggtggacaaataa

SEQ ID NO: 38251 - DNA, 1923 bp, Neisseria meningitidis
atgattgaaatcaaaaacctcaccctgcaacgcggtttgaaaatcctgctcgacaaagccaacgccactgtcaatcccggtcagcgcgtcggtttgatcggcaaaaacgggacgggcaaatccagcctgtttgccttactcaagggtgaaatcactcaggacggcggcgatgtctcgattccgaaaaactggcggctcgcttccgtttcccaagaaacgcccgatttggatatttccgctttggattacgttttgcagggcgatgccgagttgcaggcttttcagacggcattgaggcaggcggaagcgcaaaatgacggcatgaagcaggcggaatatcatgctaaattggaagaaatcgacgcttataccgcgccggcccgcgcggcaaaattgttgaacgggctgggtttttcgcaagaagaacacagccgccccgtcaaatccttttccggcggctggcgtatgcgcctgaatcttgcgcaagccctgatttgccgcgccgatttgctcttgcttgacgaaccgaccaaccacttggatttggaaaccgtcttgtggctggaaaaccaccttgcctctttaccctgcacgcaaatcatcatttcccacgaccgcgatttcctcaatgcggcaaccacccaaaccatcgaattgtcccagcaaaagctcacgcaatacggcggcaattacgatttttaccaaaacgaacgcgcgcagcgtctcgcgcagcaacaagccgcctatgtcaaacagcaggcgcaaatcaaacatctgcaatcctttatcgaccgcttcaaagccaaagccaccaaagccgttcaggcgcaaagccgcatgaaggctttggcaaagctcgaacgcatcgctcccgcgcatttggacagcgagttttcctttgagttttacaatcccgagcatctgcccaatcctttgctgaagctggaacacgcagatttgggttacgaaggcaaaactgttttgcacgacattaccctgtcgctggaaagcggcgcgcgctatggtttattgggtgtcaacggcagcggtaaatctacatttatcaaagccttggcgggcaaaatcgatttgctctccggcagcatcgtccgttccgaaaaactcaatatcggctattttgcccaacaccaactcgataccatccgcgccgaccaaaaccctgtttggcatattcagcagctttctcccgaagtacgcgaacaagaaatccgaaatttcctcggcggcttcaattttgttggcgatatggcgttacagaaaaccgaacctttttccggcggagaaaaagcccgccttgcccttgccatgattatctggcaaaagccgaacctgttgctgcttgacgaaccgaccaaccatttggacttggatatgcgccacgccttaacgctcgcgttgcaaagtttccaaggcgcattaatcgccgtatcgcacgaccgcagcctgcttgaagcgactaccgacagcttcctcctgatcgacaaaggccgtctgaagaacttcgacggcgatttgaacgattaccgccaatggcgtttggcacaggaaaacgccgccgccgcacccgcagcatccgcacaaagccaaagccgcaaagacaccaagcgcatcgaagcgcaaatccgtcaggaaaaagcccgacgcagtaaaccgatacagcagaaaatcgaccgtgccgaaaaagaaatggcacggctttccgaaattcagacggcatgtgaggcatttttagcacaagaagacgcttaccttgaagcaaacaaagaaaaattgcaaaataccttatcccagctggcaaaagtcaaaacacaacttgcccaaatcgaagaggtttggctggcttgtcaagaagaattggaacggattgaaactgaaatcgagaaacagtttgccgagcgataa

SEQ ID NO: 38252 - DNA, 576 bp, Neisseria meningitidis
  misc_feature 561, 562, 563, 564, 565: 'n' is a, c, g or t
atgaacagacaaaaagtcatcgccatcgacggcccgggcgcatcgggcaaaggcacggttgccgcccgcgttgccgccgcattgggatacgattatctcgataccggcgcactctaccgcctgactgccctatatgcacaaaaacaaggcgtgggatggcacgatgaagaaaacgtttccgaactggcaaaaaaactgcccgccgtattttcaggcagccgcatcctgctcggcggcgaagacgtttcagacggcatccggacagaagccatcggcatgggcgcatccgcagtcgcacagttgcctaaagtccgcgccgccctgctgcaacgccaacgcgattttctgaccgaaaaaggactggttgccgacggacgggacaccggatcggtcgtcttcccccaagccgaacttaaaatcttcctgacggcagaatccaaaatccgtgccgaacgccgcgccaaacaaatcggcatcccctgcgaaggtttggcattcgagcgcatcctgtccgacatcgaagccagagacgaggcagaccgaaaccgcaaagttgccccnnnnncacacacttaa

SEQ ID NO: 38253 - DNA, 246 bp, Neisseria meningitidis
  misc_feature 227, 228, 229, 230, 231: 'n' is a, c, g or t
atgccgtctgaaaccgatatgttctgtgtcggcaatgtttcagacgaaaacggaaggacaaagattatgaaaaaaattcaagcggatgtcgtcgtaatcggcggcggtactgccggtatgggtgcgtttcgcaatgcccgtttacattcggataatgtttacctgattgaaaacaatgtgttcggcacaacctgcgcgcgcgtgggttgtatgccttccaaactctnnnnncacacacttaattaa

SEQ ID NO: 38254 - DNA, 1257 bp, Neisseria meningitidis
gtggccaataaattaagaaactacaccatcaacttcggcccgcaacaccctgcggcgcacggcgtattgcgtatgattttggagttggagggcgaaaccatcgtccgtgccgatccgcacatcggcctcctgcaccgaggtactgaaaaactggcggaaaccaaaacctatctgcaagccctgccctatatggaccgcttggactacgtttccatgatggtcaatgagcaggcgtattgtttggcagtagaaaagctcgccggtatcgatgtgcctatccgcgcccaatacatccgtgtgatgttcgccgaagtaacgcgcatcctcaatcacttgatgggcatcggttcgcacgccttcgacatcggcgcgatgaccgccattctttacgccttccgcgaccgcgaagagctgatggacttgtacgaagccgtgtccggcgcgcgtatgcacgccgcctacttccgtcccggcggcgtttaccgcgacctgcccgacttcatgcctaaatacgagggcagcaaattccgcaatgccaaagtattgaagcagctcaacgaatcccgcgaaggcacgatgctcgactttatcgatgccttctgcgaacgtttcccgaaaaatatcgacacactcgaaaccctcctgaccgacaaccgtatttggaaacagcgtaccgtcggcatcggcgtcgtctcccccgaacgcgccatgcaaaaaggctttaccggcgtgatgttgcgcggttcgggcgtggaatgggacgtgcgtaagaaacagccttacgaagtgtacggcaaaatggatttcgacatccccgtcggtgtcaacggcgactgctacgaccgctacctctgccgtatggaagaaatgcgccaatccgtacgcatcatcaaacaatgttccgagtggttgcgtgtcaatccgggtccggtcattaccacaaaccacaaatttgctccgcccaaacgtaccgaaatgaaaacaggtatggaagacctgattcaccatttcaaactctttaccgagggtatgcatgttcccgagggcgaaacctacaccgctgtcgaacatccgaaaggcgagttcggcgtttacatcatttcagacggcgcaaacaaaccctaccgcctgaaaatccgcgcacccggcttcgcccatctgcaaggcatggacgaaatggcaaaaggccacatgctcgccgacgtcgttgccatcatcggtacgcaggacatcgtattcggggaggttgaccgataa

SEQ ID NO: 38255 - DNA, 1539 bp, Neisseria meningitidis
atgaatatgctgggagctttggcaaaagtcggcagcctgacgatggtgtcgcgcgttttgggatttgtgcgcgatacggtcattgcgcgcgcattcggcgcgggcatggcgacggatgcgttttttgtcgcgttcaaactgcccaacctgcttcgccgcgtgtttgcggagggggcgtttgcccaagcgtttgtgccgattttggcggaatataaggaaacgcgttcgaaagaggcgacggaggcttttatccgccatgtggcggggatgctgtcgtttgtgctggtcatcgttaccgcgctgggcatacttgccgcgccttgggtgatttatgtttccgcacccggttttgccaaagatgccgacaaatttcagctctccatcgatttgctgcggattacgttcccctatatcttattgatttcactttcctcttttgtcggctcggtactcaattcctatcataaattcagcattccggcgtttacgcccacgttcctgaacgtgtcgtttatcgtattcgcgctgtttttcgtgccgtatttcgatcctcccgttaccgcgctggcttgggcggtttttgtcggcggtattttgcagctcggcttccaactgccctggctggcgaaactgggttttttgaaattgcccaaactgaatttcaaagatgcggcggtcaaccgcgtgatgaaacagatggcgcctgcgattttgggcgtgagcgtggcgcaggtttctttggtgatcaacacgattttcgcgtcttatctgcaatcgggcagcgtttcatggatgtattacgccgaccgcatgatggagctgcccagcggcgtgctgggggcggcactcggtacgattttgctgccgactttgtccaaacactcggcaaaccaagatacggaacagttttccgccctgctcgactggggtttgcgcctgtgtatgctgctgacgctgccggcggcggtcggactggcggtgttgtcgttcccgctggtggcgacactgtttatgtaccgcgaatttacgctgtttgacgcgcagatgacgcagcacgcgctgattgcctattctttcggcttaatcggtttgattatgattaaagtgttggcacccggcttctatgcgcggcaaaacatcaaaacgcccgtcaaaatcgccatcttcacgctcatctgcacgcagttgatgaaccttgcctttatcggcccactgaaacacgtcggactttcgcttgccatcggtctgggcgcgtgcatcaatgccggattgttgttcttcctgttacgcagacacggtatttaccaacctggcaagggttgggcagcgttcttagcaaaaatgctgctctcgctcgccgtgatgggaggcggcctgtatgccgcccaaatctggctgccgttcgactgggcacacgccggtggaatgcaaaaggccgcccggctcttcatcctgattgccgtcggcggcggactgtatttcgcatctctggcggctttgggcttccgtccgcgccatttcaaacgggtggaaagctga

SEQ ID NO: 38256 - DNA, 921 bp, Neisseria meningitidis
atgaccttaaccgaattgcggtacatcgtcgcagtcgcccaagaacgtcatttcggcagggcggcgcggcgttgttttgtcagtcagcccactttgtctattgccattaagaaattggaagaagagcttgccgtctctttgtttgaccggagcagcaacgatattattacgaccgaggcgggggaacgtatcgttgcacaggcgcgtaaggtgttggaagaggcagagcttatcaggcatttggcaaatgaagaacaaaacgagctggagggtgcgttcaaactcgggctgatttttacggttgcgccgtacctgctgccgaaactgattgtctcgttgcgccgtactgcaccgaaaatgcctttgatgttggaagagaattacacgcatactttgaccgagtcgctcaaacgcggggacgttgacgcgattatcgttgccgaaccgtttcaagagccgggcattgttaccgaacccttgtatgacgaaccgtttttcgtgattgtcccgaaagggcattcatttgaggaactggatgccgtttcgccacggatgctgggtgaggagcaggttttgctgctgacggaaggcaactgtatgcgggatcaggtactctcaagctgttccgaattggcggcgaaacaacgtatacaggggttgaccaatacattgcagggcagctcgatcaatacaatccgccatatggtcgccagcggtttggcaatcagcgtgttaccggcaaccgcgctgaccgaaaacgatcatatgctgttcagcattattccgtttgaaggtacgccgccaagccggcgggtcgtattggcgtaccgccgcaattttgtccgtccgaaggcgttgtcggcgatgaaggcggcgattatgcagtcgcagcttcacggggtaagttttatccgcgactag

SEQ ID NO: 38257 - DNA, 246 bp, Neisseria meningitidis
atggtttttgacgatattgccaaacggaaaatccgttttcaaacccgccggggattgttggaattagatttaatcttcggcaggtttatggaaaaagaattcgagcatttgagcgataaagagctgtccgagttttccgaaatccttgaatttcaagatcaagaattgcttgccttgattaacgggcattcggaaacggacaaagggcaccttatcccgatgcttgaaaaaatcagacgggcatga

SEQ ID NO: 38258 - DNA, 1437 bp, Neisseria meningitidis
atgccgctgctgtctgtcgagttcgcactgttctttctcgccttcctgccgatttactggggcttggcgaaatacccgtccgtccaaaacctgctgcttttggctgccggtatgggctggctctaccatatcggccccgtatttgcggcaatcgtcgtcctttattcctcctgcgtgtaccttttgggcgaactgctccgttccgatcgcgaaaatacgcgccgcttttggctggggtgcggcattgccgtctcgctgaccgtcttgggctttttcaaatatttcgactttttccgcccgctgattgcacaatatgccggacaaggcggcgcaatcgacatcctgatgccgctggggctttcgtattacaccttccagtcgctcgcctatctggtttactgcttccgcgccccgcacgccgcgcgtttcgagtggcacgagctgctgctgcacctgagttttttccccaccgttacctccggcccgattatccgcgccgccgcattcaaaagcgcagacggcgagcaggcaggcgcattggcgcaaatccgtacccgccaaccgcgctcacccgtccgccccgcactcgccgtttccctgattctgctgggtattgccaaaaaatggtggctggcggggatgctcgcagaaaactgggtgtcgcccgtgtttgaaaaccccgcccaattcaacggctggggcgtgttggcgggcgtgtacggctataccttccaactcttcctggacttttccggatattccgatttggttatcggcatggcgatgctgctgggcttccgactgcccaaaaacttctccgcaccgcttcgtgccgcgaatatccgtgcattttgggacaaatggcacatcagcctttccacctggatacgcgactacatctacatccccttgggcggcagcaaaaaaggctttttgcggacacagctcaacctgatggcggcaatggtactctcaggcatctggcacggctacggctggaacttcctcatttggggcgcgctgcacggcacggcgctggtgctgctcaacacgggcgatcgctatttcggacgcaacgcgctatgccgtctgaaataccttgcgccgctctcgtggtttgttaccttccatttcgtctgccttagctttgttgtcttcaataccgcaagccccgacgatgcaggcgcagttttcaatgccctctttgccaatgccaacggctggaatgcgccgcaacaggcaaacatgctgctgcttgcctcgtttgcatccgtgatgctgctctacccttacctgcaacgcgctttcgacggcgcggtcaaaggtttggaaaaaatcccgatgtggctgtggtttatcccgatttccatcatcctgctgctgattatcgtccttgccccctcggggatacccggttttatttatgccaatttttaa

SEQ ID NO: 38259 - DNA, 1152 bp, Neisseria meningitidis
atgcagacatggcagcttccggaacatatcgccgacgtactgcccacgaacgcgcggcagcttgaaagcgcgagggagcagttgttggcactgttccgcgtacacggttatgaactggtacagcctccgctgatggagtacgcacattccctgctgacgcatatcgatgcggggctttccctgaaaaccattttggtaacggacaggctcagcggcaggcagttgggcatacgcgccgacatcacgccgcaggtggcgcgtatcgatgcccatcttttatccgccaaccaagggattaaccggttgtgttatgccggtccggtgttgcacgcgcagcccgacggtctgctgaatatgcgcgaacccttgcaggcaggggcggaaatgtacggttttgccgacatccgtggcgacatcgagctgatagacctgatgctgaaaagcatgaaaattgccgatatgggcaaagtgctgctttcgctggggcatatcggcatatttcgcgccttgtccgatgcggcgcatttggatgcggggcagtccgcaacgctgcttgccttgatgcaggataaagataccggggcggtcgaagcgcaggtcaaggcttggaagctggacggcatgtgggcaaaagcattctcgctgctgccgcgcctgtacggcgggcgtgaagtgttgtccgacgcgcgcggacggttgccggatttgtcggcggtcggcggcgcgttagacgaattgcaggcggtgtgcgacgcattccccgattgtgaaatccatatcgacttgtccgagctgcgtgtcgacaattaccacacgggcttgctgtatgccgcctatgccgccgatttccacgacgcggtcgcgcgcggcgggcgttatgacggattgggcggatatttcggcagggcgcgcccggcaacgggattcagtttcgacttgcgcagctttatcgggcgtttgcccgccatcgaacggcagcccgccgtgttggtcgatgcggaagatgccgaagcggcgcgcgaagcggtcgaagccttgcgtgaacaagggcagtgtgtcgtggttgactacggtatcggacacaatgtttcggaagagcttgcaggccgtctgaaaaagacggacggcgtttggcaggtcgtgaaacgctaa

SEQ ID NO: 38260 - DNA, 504 bp, Neisseria meningitidis
atggctttattgaatatcttgcaatatcccgacgagcgtctgcacacggtggcaaagcctgtcgaacaagtcgacgagcgcatccggaagctgattgccgatatgtttgaaacgatgtacgaatcgcgcggcatcgggctggcggcgacgcaggtcgatgtgcacgagcgcgtggtcgtgatggatttgaccgaagaccgcagcgaaccgcgcgtgttcatcaaccccgtcatcgttgaaaaagacggcgaaaccacttacgaagagggctgcctgtccgtgccgggcatttacgacaccgtaacccgcgccgaacgcgtcaaggtcgaggctttgaacgaaaaaggcgaaaagttcacgctggaggcggacggcttgctggcgatttgcgtgcagcacgagttggaccacctgatgggtatcgtgtttgtcgaacgcctttcccaactcaagcaggggcggattaagaccaagctgaaaaaacgtcagaaacatacgatttga

SEQ ID NO: 38261 - DNA, 1362 bp, Neisseria meningitidis
atgctgaaaaaatggttgaataagatgctgccttccggtcggagcagtaaaaaagcggaaagtaaaacggtcattcctgccgaaagacacaacatccgtgccgaaatgttgagctttgccgccgaaaacgtcatacgccgcctgaaagaggcagggtttcaggcttatgtggtcggcggcgcggtcagggacctgctgctcggcatcgaacccaaggatttcgatgtcgcaaccgatgccatgcccgaacaggtgcacaaactcttccgccgcagccgcatcgtcggcaggcgttttcaaatcgtccatgtgatgaacggtgcggagattatcgaagtaacgacgtttcgcggcggtgcgaaagttcatcagaacgcgcacggcaggattatgaaggacaacacctacggcagcatcgaagaagatgcgatgcggcgcgattttacctgcaatgccttgtattacgatccggaaaaagaagagattttggatttccacaacgggattgccgatgttgccgcccgcaggctggttatgattggcgatgccgccgaacgctatcaggaagaccctgtcaggattttgcgcgccatccgcctgtcgggcaaattgggctttgagctgtcggaagaaaccgccgcaccgattgccgaatcgatatgccgtctgaagcacgaaccggtagcgaggctgttcgacgaaattatgaaactgctgttttcagggcacgcgcgcgagtgtctaaaacgtttgaacggatttgacataccggacgacatccatccgctgctcaatgccttgcgcgtttcagacggcatcgccggaaaaatgacggtgcttgccctgaaaaataccgatgagcggctgcgtgccgacaaatcggtttcggtcggtttcgtactggcggccctgatgtggcccgagttggaacgccattggaaaagcaatctgcaacagggtttgaaacccgtgcccgccctgtccgatgcaatcaatacgatgcgcgaaaccgtcgaacgcggttggggcgtaccgcaacgcttttccgccacgatgcgcgaaatttggatgttccagccgcagtttgaaaaccgcaaaggcgcaaggccgcacaaactgtttgcacaggcgcgtttccgtgccacctatgatttcctgctcttgcgcgccgaaaccggcaatgcggaccgcgcccttgccgagtggtggacggcgtttcagacggcatcgcaggaacaacggacggagatgaccaaaaacgaagccgccgcccgacacgaaaaaaacgaaggacaggcgaaaaaacgccgccgtcgcaggcgcaaacccaagccgaaggttgtgggaacggattgggaataa

SEQ ID NO: 38262 - DNA, 537 bp, Neisseria meningitidis
atgtcggcaaccgtccgtatcttaggtatcgacccgggcagccgcgtaacgggtttcggcatcatcgatgtcagggggcgcgatcatttttacgtcgcctccggctgcatcaaaacgcctcccgatgcgcctctggcagacaggattgccgtgattgtgcggcacatcggcgaagtcgttgccgtttacaagccgcagcaggcggcggtggaacaggtgttcgtcaacgtcaatccggcatcgacgctgatgctgggtcaggctaggggcgcggcattggcggcattggtcagccataagctgcccgtttcggaatacacggccttgcaggtcaaacaggcggtagtcggcaaaggcaaggcggcgaaagaacaggtgcagcatatggtggtgcagatgctggggctttcgggaacgccgcaggcggatgcggcggacggtcttgccgtcgcgctgacccacgccttacgcaaccacgggcttgccgccaaactcaatccttcggggatgcaggtcaagcgcggcaggtttcaatag

SEQ ID NO: 38263 - DNA, 1074 bp, Neisseria meningitidis
atgaaaatcgttttgaccacatctatggcaggcttgggcggcacggaaaccgccaccgtccgcctcggcaggctactcaggcagcacggacacgacatcatgcttgcctcttcggacggaccgttgctcaaagaggcgcaagccttgggcatacgttggcaacccgtcgatttctatcgcggcggccttgccggctacctcaaaagcacctttgcctacgcccggatgctgcgccgcgaacaacccgacatcatcgactgccaaatggcgcgcgtcgttccagcctgcgcccttgccgccaaaatcgtttcgccgaaaaccaaaatcatctaccactcgcacggtttggacgcggcaacctaccccaaaatcgccaaactcttcgacaagctgggcgtgtacatcatcggtaactgcaaacacgaacgcgaaaaactcatccgccacggtttccccgccgaccggattgtctacgcctacaacgcactccccccccccccggaatttcctttccggaaaaccgaaaaagaatgcgccgtactcggcacgctgtcgcgtctggacaccgtccgcgccgtgcatctgatgctggacattttcaaaaaaatggtcgaccgcgatatgcccgtacgcctgaacgtggcgggcataggcgaagaaatggacaatttgaaagcgcaggcggaacgtctgggcatagacggcaaagttaccttcctcggcggcgtgcgcgatttgaccgcctacttcaaagacgtggatattttggtgaacacgccccactgcatcggcgaccacggcgcaggcgtgggcaacaacatcttagaagccggactttacgacacacccgtcgttacctacgatatggcgggcatttccgaaatggtcgtcaacggggaaacgggttactgcatccccttcggcgacgaagaagcctttatcgccgccgtagacacgctcgtcagacaaccggagttgcgcgaagcaatgggcaaaaggctgcacgcacacgtcgccgcactctgttccgacgacgaaatctaccgtaccaccatggcggcctataccatgtaa

SEQ ID NO: 38264 - DNA, 372 bp, Neisseria meningitidis; identical to SEQ ID NO: 36753

SEQ ID NO: 38265 - DNA, 738 bp, Neisseria meningitidis
  misc_feature 723, 724, 725, 726, 727: 'n' is a, c, g or t
atgtcccaacaccgcaaactgattattttgggttccggccccgccggatacaccgccgccgtctatgccgcgcgcgccaatttaaaccccgtcattattacaggtatcgcgcaaggcgggcaactgatgaccaccaccgaagtggacaactggcctgccgatgccgacggcgtgcaagggccggaattgatggcgcggtttctcgcccacgccgaacgtttcggaacggaaatcatttttgaccaaatcaacgccgtcgatctgcaaaaacgcccgtttacactcaaaggcgatatgggcgagtacacttgcgatgccctgattgtcgcaacaggcgcgtccgccaaataccttggtttgccgagtgaggaagcgtttgcagggaaaggcgtttccgcctgcgccacctgcgacggtttcttctacaaaaaccaagatgttgccgtagtcggcggcggcaatacggcagttgaggaggcactctaccttgccaatatcgccaaaaccgttacgttgattcaccgccgcagcgagttccgtgccgaaaaaatcatgattgacaaactgatgaaacgcgtggaagagggcaaaatcatcctcaagctggaaagcaatctgcaagaagtactgggcgacgatcggggcgtaaacggcgcattattaaaaaacaacgacggttctgagcaacaaattgccgtcagcggcatctttatcgccatcggnnnnncacacacttaa

SEQ ID NO: 38266 - DNA, 435 bp, Neisseria meningitidis
atgacgggatttaatgatgccgccggcgtggcatccgtctccaccgacatcaaaggcaaatatgttcaaagcgttacagtcgcaaacggcgtcattaccgcccaaatggcttcaagcggcgtaaacaacgaaatcaaaggcaaaaaactctccctgtgggccaagcgtcaagacggttcggtaaaatggttctgcggacagccggttacgcgcgccgacaaagccgacgacgttaacaaagccaccggcaacgaaatcgacaccaagcacctgccgtcaacctgccgcgacgcttcatctgccgtttgcacaaaacacccaagtattgcccgaatcacggcgaatggccgaaaaacttcgtcattcccgcgcaggcgggaatctaggtttgtcggtgcagaaacttatcgggtaaaaaggtttctccggtcctga

SEQ ID NO: 38267 - DNA, 438 bp, Neisseria meningitidis
  misc_feature 6, 7, 8, 9, 10: 'n' is a, c, g or t
gtgtgnnnnntgattgctttcgccatcaagaatgaaggcaggattggcggcagtgaggaaatattcgggctgcttttgggcatgacttccttttgggtaggactggcgggcattttggtttataccgtcgttcaaatctactatatgagtcgggacgggcagtcattgggtaagaaaatcatgagaatcagggtgttgaaaaccgacggccgcaatcccggttttgtcggcacggttttggtacgcgaaatcgcatggtcggttttggttgccattattgccgccgttatcggtcttgcagtaggtgacaacggagaaaacgccatcaacctgctggcattccttgccaactttgtcctgctctttatggtcaaacgcgatcgccgcacgctttacgacatactggcggatacggttgtcgtcaagctgcccaaataa

SEQ ID NO: 38268 - DNA, 873 bp, Neisseria meningitidis
ttgtcggatgaaggcaggcataaacctacttccgccccaaaccgcgtttttatgatgaaaggtatggataaattgagataccaacaggattttttaaatatccgccccatttttacagccggcgaacaagaatacctgaccgaattgtccgatcggcttcctttatctgttttaacggactccgtgcgtaatattgaagaaatcggtatcgattttgtgtacagttctgccaaattggaaggaaacacttataatcaatacgatacgcaggcattgcttaaactcgggcaaaccgcaggcgggaagttatattcggatgccgtaatgttaatcaacctgagggaaagttaccggcacctgctgtccggtttggacagccccgatccgtttgactggttggatttcttaaaaaccacccacagcctgatttcggaaaacttactggaaaaaggctccggcggcgtagtccgccgcgacagcgttaccataagcgggacagactacacgcctttatccaacccgcaaagtttggatacggaattaaaatggttgcttcaagaagctcccaaaatagaaaatcctttcgaccgcgccgtttatctccataataatttggcgtatcttcaatattttaaagattgcaataaacgtactgccagaaactgtatgaccttgtcgctgatgcgctccggtttttttccttgcgtattcgcccccgacagttatcccgcctatgccggggctgtcgtagcctattacgaaaccggcgattacggtttattcaagaaatattttatttcggcatacgaaaataccgtaaataagtacggcccacagcctgatatggatattttccgcaacttctccctttaa

SEQ ID NO: 38269 - DNA, 321 bp, Neisseria meningitidis
atgaattttcaagactatctcgccacatttccttcaatcgaccatctgggcggtttggacgttcaggatgccgacggcaaaacggttcaccacattcccgccgttcagggtaagctcggttcgctcaagctgtacaatgctttggcagaacgttttgacggaaaattggataaagaagcggcagaacagggtttgatatggtttgccgaacacgttgccgacgcgcgcgcccatcccggcaagcatcccaatatcgacctgcttgaaaaagttgtgcaaagcggcgaaaccttgctgctcaagccgcttgccgcgcaataa

SEQ ID NO: 38270 - DNA, 1887 bp, Neisseria meningitidis
atgccgtctgaagccgtttttcaaataattgatatgaatacagaaaaccgttctccggaacaattcgatatcccgctcttcctcaaaaacctgcccaagctgccgggcgtgtaccgtttttttgacgaaggcggcaaagtcttatacgtcggcaaagcggtcaacctcaagcggcgcgtgtccggctatttccaaaaaaacgaccattcgccgcgcatcgcattgatggtaaaacaggttcatcatatcgaaaccaccatcacgcgttccgaagccgaagccctgattctcgaaaacaacctcatcaaagccttgtcgccgaaatacaatatccttttccgcgacgacaaaagctatccttatttgatgctcagcggccatcaatatccgcagatggcgtattaccgcggcacgctgaaaaagccaaaccaatacttcggcccgtatcccaacagcaacgccgtgcgcgacagcattcaagtgttgcaaaaagtctttatgctgcgtacctgcgaagacagcgtattcgagcatcgtgaccgcccttgcctgctgtatcaaatcaaacgctgcaccgcgccctgcgtcggacacatcagcgaagaagactaccgcgacagcgtgcgtcaagccgccacttttctcaatggcaaaaccgacgaactgacccgcaccctgcaacacaaaatgcaaactgccgccgcgaatctgcaatttgaagaagccgcccgctaccgcgaccaaatccaagcactcggcattatgcagagcaaccagttcatcgacagcaaaaacccgaacaaccccaacgatatcgatttgctcgcgctggcggtttcagacggcatcgtctgcgtacactgggtcagcatacgcggtgggcggcacgtcggagacaaaagtttcttccccgacaccaaaaacgatcccgagccaaacggacaagattacgccgaagccttcgtcgcccaacattatttgggcaaaagcaaacccgacatcattattagcaacttttccgttcccgatgcgctgaaagaggctttggaaggcgaacacggcaaacaaatgcaatttgtcaccaagaccataggcgaacgcaaagtttggttgaaaatggcggaacaaaacgcacaaatggcgattgcacaacgccgcctgcaacaaagcaaccagcaacaccgcatcgacgaactcgccaaaatcctcggtatggattcagacggcctcaaccgcctcgaatgcttcgacatcagccacacccaaggcgaagccaccatcgcctcctgcgtcgtgtacgatgagcaaaacatccagccctcgcaataccgccgctacaacatcacgaccgccaaacccggcgacgactacgccgccatgcgcgaagtgttgacgcgccgttacggcaaaatgcaggaagccgaagccaacggcgagaccgtcaaatggccggatgccgtgttgattgacggcggcaaagggcaaatcggcgtagccgtatcggtatgggaagaactcgggctgcacatccctttggtcggcattgccaaaggcccggagcgcaaagccggtatggaggagctcatactgccttttaccggcgaagtcttccgcctgcccccacacagcccggccttgcatttattgcaaaccgtacgcgatgaatcgcaccgtttcgccattaccggccaccgcaaaaaacgcgacaaagcccgcgttacctcctccttaagcgacatccccggcgtaggcagcaaacgccgccaagccctgctcacccgcttcggcggcctgcgcggcgtgattgccgccagccgcgaggatttggaacaagtggaaggcatcagcaaggcattggcggaaaccatttacaatcatctgcattag

SEQ ID NO: 38271 - DNA, 561 bp, Neisseria meningitidis
atgaaaacagcacaagaactgcgcgccggcaatgtatttatggtcggcaacgatcctatggtcgttcaaaaaaccgaatacatcaaaggcggccgctcttccgccaaagtcagcatgaaactgaaaaacctgctgaccggcgcggcttccgaaaccatttacaaagccgacgacaaattcgacgtggtcatcctgtcccgcaaaaactgtacgtacagctactttgccgatccgatgtacgtctttatggacgaagaattcaaccaatacgaaatcgaagccgacaacatcggcgacgcgttgaaattcatcgttgacggcatggaagaccaatgcgaagttaccttctacgaaggcaaccccatctccgtagaactgcccaccatcatcgtacgcgaagtcgagtataccgagcctgccgtcaaaggcgatacttccggcaaagtgatgaaaaccgcgcgcctggtcggcggcaccgaaatccaagtgatgtcttacatcgaaaacggcgacaaaatcgaaatcgatacccgcaccggcgaattccgcaaacgcgcttga

SEQ ID NO: 38272 - DNA, 678 bp, Neisseria meningitidis
ttggtcaaaacggcagacggctacaaagccatcgcacatatccaaactggagagcacgtctttgccaaagatgaaaccagtggaaaaactggatacaaacccgttaccgcccgatacggcaatccctatcaagaaaccgtttacattgaaatttcagacggcatcggcaacagtcaaaccctgatttccaaccgcatccatccgttttattcggacggcaaatggattaaggcggaagatttaaaagcgggaagcaggctgtattccgaaagcggcaaaacccaaacagtccgcaacaccgttgtcaaaccaaaaccgctcaaagcctacaatctgaccgttgccgattggcatacttactttgtcaagggcaatcgggcggaaacggaaggggtttgggttcataatgagtgtccgccaagaaaaacaccatctacccccatatatgggaatgattcagaagcatatgcagcagcaaaggaattgggatatagaaaaataaaagaaagaacgagaaatgatgctgctatttttaaaaaaggaaagagttatatatcacgcgatgtagattcacataatggaggtgcttggaaagaggcatcttcacccgaaaaactgaacagaaaagaaacaagaaacggtacatttgataaaaacctaaatcgtattggagattaa

SEQ ID NO: 38273 - DNA, 1146 bp, Neisseria meningitidis
atgaccgaaactcaatccctagagcttgccaaagagctgatttcccgaccatccgttacccctgacgacagggattgccaaaaactccttgccgaacgcctgcacaaaatcggttttgcggctgaagaactccatttcggcgacaccaaaaacatctggttgcgacgcggcacgaaagctcccgtcgtctgttttgcagggcataccgacgttgtaccgacaggtcctgtcgaaaaatgggattcgcccccgttcgaaccggccgagcgcgacggaagattatacgggcgcggcgcggcagacatgaaaaccagcatcgcctgcttcgttaccgcctgtgaacgcttcgttgccgaacatcccgaccaccaaggcagcattgcgcttctgattacttccgacgaagagggcgacgcgttggacggcacgaccaaagtcgtcgatgtattgaaagcgcgcgacgagcttatcgactactgcatcgtcggcgagccgaccgccgtggacaaattgggcgatatgattaaaaacggccggcgtggctcgctgtcgggcaacctgaccgtcaaaggcaagcaaggtcatattgcctatccgcatttggcaatcaatcccgtccatacttttgccccggccttgttagagctgacgcaggaagtctgggatgaaggcaacgaatatttcccgccaaccagctttcaaatttccaatatcaacggcggcacaggcgcgaccaacgtcattccgggcgagctgagcgtcaaattcaatttccgcttctccaccgagtccaccgaagcagggctgaaacaacgcgtccacgccattttggacaaacacggcgtgcaatacgatttgcagtggtcgtgttcggggcagccctttctgacccaagcgggcaaactgaccgacgtggcacgcgcagccattgccgaaacctgcggcattgaggccgaattgtccaccaccggcggcacttcggacggacgcttcatcaaagccattgcaaaagaactcatcgaattaggcccgtccaatgccaccatccaccaaatcaacgaaaacgtgcggctggacgatattccgaagctgtctgcggtgtatgaggggatattggcgtgcttgttggctggaaatgccgtctga

SEQ ID NO: 38274 - DNA, 210 bp, Neisseria meningitidis
atgactgaatcgcggcaaacacgccttcaagtcaaatgtccgacctgtcaaacgacagtagtatggaaacccgaaaacgcattccgcccgttctgttcgcaacgctgcaaactgatcgacttgggcggatgggcagacgggaaatatacggtttccgaccaaacggaaagtttgctggaaatatccgaaccggacggcgcataccgctga

SEQ ID NO: 38275 - DNA, 3435 bp, Neisseria meningitidis; identical to SEQ ID NO: 38192

SEQ ID NO: 38276 - DNA, 804 bp, Neisseria meningitidis
  misc_feature 789, 790, 791, 792, 793: 'n' is a, c, g or t
atgaaaaagaccatttttaacattaccaaaatggactgcccgtccgaagaacagctcattcgcatgcgtttaaaagatgtgtctgatatttatgaattacagtttgatattgctgggcggtgcttaaccgtctatcacgataatcaagatacaacgattttacaagtacttgaaccgcttaattttgatagtcatatcatttccaccgaagtgattgttgataagatagtgtttaacaagcctgatgagcacttagaaaaaagattattatatcaagtgctcatgattaactttgtgttttttatcatagagtgttcggttggtatttttgctaattctatggggctgattgctgatagtctagatatgctggcggacagctttgtctatatattggcgctatcagccattggtatgacgctggcgtataaaaaacgtgtggcatttttggcggggataacgcagataatattggcgttatttggggtgatagaagtgattaggcgttttatcggtgctgagcagctgcccaattatcaactgatgattggcacggcatttttggcattgattgcaaactggctgtgcttatatctactgagcaaaaatcaaaataaagaaatccatatcaaagccagcatgatttttacatccaatgacattatcatcaatatcggtgtgatagcggcgggagcattgacgttattgactcattctagctatcctgatttaatcattggcatgattgtctttgtcattgtactatttggtgctagaaatattttaaannnnncacacacttaa

SEQ ID NO: 38277 - DNA, 1314 bp, Neisseria meningitidis
  misc_feature 4, 5, 6, 7, 8: 'n' is a, c, g or t
gtgnnnnngtttatcggactgctgattatcggggtcatcgtatggttgctgctgacggaaaaagtgtcgcccatcatcgcattaatcttggtgccgctgtttggggcgttgctggcggggtttgatgtatcccaattaaaagaattttattcgggcggcaccaaatcggtgatgcagattgtgattatgtttatgttttccattttgttttttggaatcatgaacgatgtggggctgttccgtccgatgataggcggtttgattaagctgactcggggtaatatcgtggcagtgagtgtggggacggtcttggtgtcggtggtggcgcagttggacggggcgggtgcgacgacgtttttattggtcgtccccgcccttttgccgctttacaagcgtctgcatatgaatccttacctgctgtttttgctgctgacttccagtgcgggattgattaaccttctgccgtggggcgggccgactgggcgggttgcaagcgtgttgggcgcagatgtgggcgaattgtataaacctttgttgacggtgcaaattatcggtgtagtgtttatccttgcgctgtccctgcttttgggtgtgcgtgaaaaaaggcggattgtccgggagttgggcgcgttgcccgccgtggcggatttgataaagccggtgcctttgtcggaagaagaacaaaaattggcgcgtccgaaactgttttggtggaatgtcctgctgtttttggcggcgatgagcctgcttttttcgggcatcttcccgccgggttatgtatttatgctggctgcaacggcggcgttgcttttgaattaccgcagcccgcaggaacagatggagcggatttatgcccacgccggcggcgcggtgatgatggcgtccattattttggcggcaggtacgtttttggggattttgaagggtgcggggatgttggacgcgatttccaaagacattgtgcatatcctgccggacgcgctgctgccttatctgcatattgccatcggtgtgttgggcattccgcttgagttggttttgagtacggacgcttattatttcggactgtttccgattgtggagcagattacctcgcaggcgggcgtggcgcctgaagcagcaggttatgcgatgttgatcggcagtatcgtcggcacttttgttacgccgctttcgccggctttgtggatgggcttgggtttggcgaaattgtcgatgggcaaacacatccgttattcgtttttctgggcgtggggtttgtcgctggcgatattggccagttcgatagcggcaggaatcgtgcctctgccgtaa

SEQ ID NO: 38278 - DNA, 3291 bp, Neisseria meningitidis
atgaaaaaccaagtacgcggatcaggcatggatgcacgatccaatccggccaatgtttcagacggcctgcaaaacagttcgggtcatatcggtaccaacacgcgttaccgcctgaccaaactcggcgaacaaatggcgcgcctgcccatcgacccgaaaatcgcgcgcattttgttggcggcgaagaagcacgactgcatggcggaaatattggtgatcgcgtccgcgctgtcgattcaagacccgcgcgagcggccgctggaagcgcgcgatgccgccgccaaggcgcacgagcgttttaccgacaagcaatctgactttcttgcctatctgaacatttgggacagcttccagcgcgagcgcgacaagggcttgtccaacaagcagttggtgcagtggtgccgtcaatatttcctgtcgcacctgcggatgcgcgagtggcgcgagctgcaccaccagcttgcccaaaccgcgattgaaatgggtttgaccaccaaggaagcggctttcagacgactttccgaaatcaagcagcttacgtcgtctgaaaaccaaggcgatcaagacttatccgccaaacgcaaacaaaaacaactggataagaaacaacaccgcgcccaaatccgcgccgccaaagaagcgggctacgaacaaatccaccgcgccctgctcaccggccttatcgccaacgtcggcatgaaatcgcccgacggcaacgactataccggcgcgcgcggcagccgtttccaccttttccccgcctccgccctgttcaaagccaaacccaaatgggtgatggcggcagaactcgttgaaacgacaaaactttatgcgcgcgacgtcgccgttatccagcccgaatggattgagcaggaagccccgcacctcgtccgctaccactatttcgagccgcactgggaacaaaaacgcggcgaagtcgtcgccagcgaacgcgtgacgctttacggcctgaccgtattgccgcgccgccccgtgccttacggcaaagttgcgcccgaagaagcacgtgaaatctttatccgcagcgcgttggtggcgcaggaatgcgatttgaaagcggatttttttgtccacaataaaaagctgattaaagaaattaccgaactcgaacacaaatcgcgcaagcaagacgtattggtcgacgacgaagccctgtttgcgttttataacgaacgcctgcccgaaatggcttggaaagacgcgcaaggcagcgtttggggaagtgaagattccgtacggattattgaatctgacaaagccgagaggtcgtctgaaaatgagcgcaacgagtttcgtaaaaacaagcgtaatgggtctcgccaaaatgaaaatcacggcaacaccgtaggttgggttgaaaacccaacatcagccgcaactgcaaaaactgttgggtttgacaacccaacctacgctactcagcaacccaccccctcccccgcgagggagggtcggggagagggcaaaacagttgccgcacaaaccaacttttccgcaaccgcagcaaaccctctcccgcaggagagggagcagagtgccgcagcttcagcggtttcaaacgacctgcatcctgcaaatccccaacaaaccgccccctcccccgtgggggagggctggggagagggcaaaacagttgccacccaaaccaacttctccgcaaccacagcaaaccctctccctaaccctctcccacaggagggggaacagagtgccgcagcttcagcggtttcaaacgaccctcaaccccaaaagcagccagcaccccaaaaagaccgtctgaaacccctccccctcgccgacatccgcaccttccaagcctggctcaaaaccgccgaacgcgagaacccgcgcctgctgttcctcagccgcgacgatttgatgcaacacgccgccgcacacattaccgaagaacaattccccaaattctggcaaaccgcagacggcaagttcgaactcagctaccgcttcgagccgcaccacccgctcgacggcgttaccctcaccctgccgcttaccgtgctcaaccgcatcagccccgccgccctcgaatggctcgtgcccggtatgttgcgcgagaaaatccagctgctgattaaagcactgcccaagcaaatccgccgcatctgcgtgcccgtgcccgaattcatcacccaatttttaagccaaaaccccgaccgcaacgcccccatcctgccccaactcgcccaagccatcgccaaaaccgcaggcgacatccgcatattcgagcaaatcaaccaagacgaatgggccgcgttcaggctgcccgaacactgctatttcaacctccgcatcatcgacgacggcggacaagaattagccatagggcgcgatttaatccaaatccaacaacaactcggccaagccgccgccgttaccttccgcgacaacacccaagaattcgagcgcgacaacgtgaccacatgggacatcggcatcctgcccgaatccatcaaattcgcacgcggcaaacaacagcttaccggctatctcggcctgcaaaaagaaaaagacggccgcatcgccctgcgcctgttcgacacaatagaagccgccgaacaggcacaccgtcaaggcgtgatagaactcatgaaactacaactaaaagaacaagttaaagacctgaacaaaggcatccaaggcttcacccaagccgccatgctgctcaaacacatcaacgccgacaccctgcgcgacgacctcacccaagccgtctgcgaccgcgcctttatcggcgaagacgagctgccgcgtaacgaaaaagcctttaaagagcaaatcaaacgcgcccgcagccgcctgcctgccgtcaaagaagccctcagccgctacctgcaggaaaccgcagccgcctacgccgaactcaacagcaaactcggcaaacacccattgacccacctcctacgccaacgcctgcaaaccctgctcgccgccggcttcgccacccgcaccccgtgggcacaatggccgcgcctccccatctacctcaaagccatgaccctgcgcctcgaaaaatacagcagcaaccccgcccgcgacgcagcccgcgaagccgatatccaagagctggaacaaatgtggcaggaaaaaacagacagcctgattaaacaaggtctccccatttcagacggcctcgccgcgtttaaatggatgattgaagaattgagggtgtcgctgttcgcgcaggaattgaagacaccgtatccggtgtcggtgaagcggttgttgaagatgtgggaggatcttaattaa

SEQ ID NO: 38279 - DNA, 624 bp, Neisseria meningitidis
atgatgaaaccgcacaacctgttccaattcctcgccgtttgctccctgaccgtctccgtcgcttccgcacaggcgggcgcggtggacgcgctcaagcaattcaacaacgatgccgacggtatcagcggcagcttcacccaaaccgtccaaagcaaaaagaaaacccaaaccgcgcacggcacgttcaaaatcctgcgcccgggcctcttcaaatgggaatacacttcgccctacaaacagactattgtcggcgacggtcaaaccgtttggctctacgatgtcgatttggcacaagtgaccaagtcgtcccaagaccaggccataggcggcagccccgccgccatcctgtcgaacaaaaccgccctcgaaagcagctacacgctgaaagaggacggttcgtccaacggcatcgattatgtgctggcaacgcccaaacgcaacaacgccggctaccaatacatccgcatcggcttcaaaggcggcaacctcgccgccatgcagttgaaagacagcttcggcaaccaaacctccatcagtttcggcggtttgaataccaatccccaactctcgcgcggcgcgttcaagtttaccccgcccaaaggcgtggacgtgttgagcaactga

SEQ ID NO: 38280 - DNA, 1773 bp, Neisseria meningitidis
atgattccatccgacttcattgacgagcttttagccaaaaccgatattgtcgatattatcgacgagcaggttccgctgaaaaaaggcggggcgaactatatggcgtgttgcccgttccacaaggaaaaaacgccgtcgttttcggtcagtccaaccaagcagttttaccattgtttcagttgcggggcgcatggttcggcgattggttttgtgatggagcatcaggggctgtcgtttccggaggctgtgcagtttcttgccgaccgtgtgggcatggttgtgcctaaagtgcgtgggcagaacgataatcccgaagtccgtgccgaacgtaagaaaaaacagcagacgctggaagaaacgacggcggcggcggctgatttttacgcgcaacagctaaaattcaatccggcggcaaaagcttatttggacaagcgcggcttgagtgcagaagttatcgcgcattatggtttgggctacgcgcccgacggctggcagcctttggcgcaagtgttccaaccgtatccgaataccgcgttggtggatacggggatggtgattgacaatgaggggcggtattacgaccgcttccgccatcggattatgttccctatccgcaatccgcgcgggcaggtcatcggtttcggcggcagggtgctggacgactccaaacccaaatatctaaactctcccgatacacctttgtttgacaaagggaaaaacctttacggcttgtatgaggggcgtgccgctgtcaaggaagcggagcggattctggtggtcgaaggctatatggacgtggtcgcgctggcacagttcggcgtggactacggtgtggcggccttgggcacggcaacaacagcggaacacgtcaaaatcctgatgcgtcaggcagacagtatttatttctgtttcgacggcgacagcgcgggacggaaagcggcttggcgcgcgctggaaaacgcgttgccgcagttgaaagacgacaaatcactgcattttttgttcctgccggaagaacacgaccccgacagttacatccgtgcctacggcaaagcgcaatttgaagacgcgcttctgaatcaaagcaagcctttgtcggagtatttctgggaacacctttcagacggcattcatctcaatacgcaggaaggcaaggcggaattggtgaaaaccagttcgccgcttttggcgcagattaccgcgccggcattggcttatttgttaaaacaacggcttagcgaactggtcggcatcgaccccgacaacctcgcgcaactgctaggacaggaagcgccgaagcggcacgtcaaacaaaaaaactacaaactgcctccgatttccgtcaaacagcccgtcatgctgacgctggtacagcggcaaatccgcagcctcttgataaatccggattgggctgcatatatagacctgcccgattatctggcgttggacggtgatttcgcctgccttgccaatcttgccgaatcgattaaaaaccatgccgccgtacccgaaaccgctcaggttttagagtatatgcgcggctcgccttacgaagaaacgataacccgaatcttccattcaacgcaccaatcggaagaaatgaacagcagcagtgaagaagattgcgagaatttccaaatcggcatgaaaaaactgctcaatgagttaaaatacagccaaatcgaaacattaaaacaaaaaagcctgcaatccggcttaaatgaaagcgagaaaaaacttttgctgtcgctgctgaccgcaaaacaaaattga

SEQ ID NO: 38281 - DNA, 1005 bp, Neisseria meningitidis
atgcaacgacaaatcaaactgaaaaattggcttcagaccgtttatcccgaacgggacttcgatctgacttttgcggcggcggatgctgatttccgccgctatttccgtgcaacgttttcagacggcagcagtgtcgtctgcatggatgcaccgcccgacaagatgagtgtcgcaccttatttgaaagtgcagaaactgtttgacatggtcaatgtgccgcaggtattgcacgcggacacggatctggggtttgtggtattgaacgactttggcaatacgacgtttttgaccgcaatgcttcaggaacagggcgaaacggcgcacaaagccctgcttttggaggcaatcggcgagttggtcgaattgcagaaggcgagccgtgaaggggttttgcccgaatatgaccgtgaaacgatgttgcgcgaaatcaacctgttcccggaatggtttgtcgcaaaagaattggggcgcgaattaacattcaaacaacgccaactttggcagcaaaccgtcgatacgctgctgccgcccctgttggcgcagcccaaagtctatgtgcaccgcgactttatcgtccgcaacctgatgctgacgcgcggcaggccgggcgttttagacttccaagacgcgctttacggcccgatttcctacgatttggtgtcgctgttgcgcgatgcctttatcgaatgggaagaagaatttgtcttggacttggttatccgctactgggaaaaggcgcgggctgccggcttgcccgtccccgaagcgtttgacgagttttaccgctggttcgaatggatgggcgtgcagcggcacttgaaggttgcaggcatcttcgcacgcctgtactaccgcgacggcaaagacaaataccgtccggaaatcccgcgtttcttaaactatctgcaccgcgtatcgcgccgttatgccgaactcgccccgctctacgcgctcttggtcgaactggtcggcgatgaagaactggaaacgggctttacgttttaa

SEQ ID NO: 38282 - DNA, 1035 bp, Neisseria meningitidis
atgcaaaccctgaccattatccgccccgacgatatgcacctgcacctgcgcgacggcgacgcgctcaaagccgttgccccttataccgcccgccaaatggggcgcgccgtcattatgcccaacctcaaaccgcccgtcgtcagtgtagccgacgcgcttgcctacaaagcgcgcattatggcggtgttgcccgaaggcagcgcgtttgagccgctgatgacgctttacctgaccgaccaagccacgcccgagctggtgcgcgaagccaaagccgccggcatcgtcgccttcaaactctaccccgccggcgcgacgaccaattccgattccggcgtaaccgacctattcaagctcatccccgtgttggaagaaatggcaaaacaggacatcctgttcctcgttcacggcgaagtaaccgaccccgaaatcgacattttcgaccgcgaagccgcctttatcgagcgcgtgatgaaacccgttttggcgcaagtgccgaatcttaaagtcgtgtttgaacacattaccaccgccgaagccgcccgcctggttttggaagcaggcgacaacgttgccgcctctgtgaccccgcaacacctcctgctcaaccgcaacgacctcttggtcggcggcgtgcgcccccatcatttctgcctgcccgtcctcaagcgcgaaacccaccgtcaggcattggttgccgccgttaccggcgagaaggcgcacaaattcttcctcggcaccgactccgcgccgcacgccaagtccgccaaagaaaacgcctgcggctgcgccggtatgttcagcgcgatgaccgccgtcgagctttacgccgaagtgtttgaaaaagcaggcgcgttggacaaactcgaagcctttgcctcgaaaaatggcgcaaggttttacggcattccggaaaacgccggcacgatcaccctcgtcaaacaaagccaaaccgtccccgcaagtgttccctacggcgacggcgaacttgtcccgatgcgcgcgggcggcgaaatcggctggacggtgcagtattga

SEQ ID NO: 38283 - DNA, 291 bp, Neisseria meningitidis
atggcgaaatactttaccgagacgggtattagcgtccgtgagtattttgatttcttcggtgagtttgtcgttttgccggcagcacgttcgggtgatttggcacttgcttacggtttgaggctggaagcgggcgaagagggtttgagccttgccgagcttttcgataagcgttccgacagtcaggagccggtcgagtgcggccgtattgacatcggcggctttatgctgaccgcgaaggaggttgacggggacggcaatatcgggtctatggggctgaaagtaccgcgttag

SEQ ID NO: 38284 - DNA, 324 bp, Neisseria meningitidis
atggatattgtgcaacttgggtcggcggaattgaaggcgtggatggacgaagggcggatgttttgtttgttggacgtgcgtacggatgaagaaacggcggtttgttcgctgccaaatgcgctgcatatcccgatgaatctgattccgctgcggcagaacgagctgccggatgatgtgccgcttgtggtgtattgccaccacggtatccgcagcctgcatacggcgatgtatttggcggacgcgggttttgaaaacctgtacaaccttcagggcggcatcgatgcatgggcggccgagattgacggcaacatgatgcgttattga

SEQ ID NO: 38285 - DNA, 681 bp, Neisseria meningitidis
  misc_feature 662, 663, 664, 665, 666: 'n' is a, c, g or t
atgattaccctgccttccttaaacaatctgccgtcaaaatgggatgaaatccgctattggctcgaaacccgggtttgtgagtgcggcgttatgccgcatcccaatttgacggaatgcgaagccgggcagttcgatcgggatttttgggacaatatcggctgcgcgcctgaagaatatgtccgtatccgccgagccatccgtctgttggaagcgcgttatcccgacagtttgaatgagctggtgtgtgccgccattgccacgcctttgggcgagatgctggcggtgttcggaaataagggattgtgtctgctggagtttgtcggacagaagcatttggaacaggaaattgccgccgtccaaaaagccttgcgcggacggtttgtgtttcgggaggatgagcggacgcaacttttgcggcaggaattggacttatacttcaagggtcgtctgaaaacctttgccacgcctttggagcagattggcaccgagtttcaaaagcaggcatgggacgcgctcttggcgattccttacggcgaaacgcgcagctacaaggagcaggcgcagcgtttgggcaaccccaaagccgtccgcgccgttgccgccgccaacgggcagaacaaggtgtctgtcctgattccctgccaccgcgtcatcggcagcgnnnnncacacacttaattaa

SEQ ID NO: 38286 - DNA, 360 bp, Neisseria meningitidis; identical to SEQ ID NO: 37430

SEQ ID NO: 38287 - DNA, 969 bp, Neisseria meningitidis
atgactgccaaacctttttccctcaacctgaccaacctcctgctgctggcggtattgtttgccgtcagcctgtcggtgggcgttgccgatttccgctggtcggatgtgttttcgctatccgacagccagcaggtcatgttcatcagccgcctgccgcgcacgtttgcgattgtgctgacgggcgcgtctatggcggtggcgggcatgattatgcagattctgatgcgtaaccgttttgtcgagccttctatggcgggtgcgggtcagagtgcggctttgggtttgcttctgatgtccctgctgctgcctgccgcgccgctgccggtcaaaatgtcggttgccgccgttgccgcgctaatcgggatgctggtgtttatgctgctgatccgccgcctgccgccgacggcgcaactgatggtgccgctggtggggattattttcggcggcgtggttgaggcggtggcgacgtttatcgcgtatgaaaacgaaatgctgcaaatgctcggcgtgtggcagcagggcgatttttcgagcgtgctgctggggcggtacgagctgctttggattacgggcggtttggcggtgtttgcctatctgattgccgaccggctgacgattttggggctgggcgagacggtcagcgtgaatttgggtttgaaccggacggcggtgttgtggtcggggctgattattgtagcactgattacatcgctggtcattgtaacggtcggcaatattccgtttatcgggctggtcgtgccgaacatcatcagccgcctgataggcgacaggctgcgccaaagcctgcctgcggtggccttgttgggcgcgtctttggttttattgtgcgacattatcggacgcgtgattgtgtttccgtttgaaattccggtctctacggtttttggtgtgttgggtacggctttgtttttgtggcttttgttaaggaaacctgctcatgccgtctga

SEQ ID NO: 38288 - DNA, 2130 bp, Neisseria meningitidis
atggcctatcaagttctcgcccgaaaatggcgtccgaaaacctttgccgacttagtcggtcaggaacacgtcgtcaaagccttgcgcaacgcgctggacgaaggcaggctgcaccacgcctacctgctgaccggtacgcgcggcgtaggtaaaaccaccatcgcccgcatccttgccaaaagcctcaactgcgaaaacgcgcaacacggcgaaccttgcggcgtgtgccaaagctgcacccaaatcgatgccggacgctatgtcgacctgctcgaaatcgacgccgcctccaacacaggcatcgacaacatccgcgaagtcttggaaaacgcccaatacgcgccgactgccggcaaatacaaagtctatatcatcgacgaagtgcatatgctttccaaaagcgcgttcaacgctatgctcaaaacgctggaagagccgcccgaacacgtcaaattcatccttgccacgaccgatccgcacaaagtccccgttaccgtattaagccgctgcctgcaattcgtcttgcgcaatatgaccgcgcagcaggttgccgaccacctcgcccacgtcctcgacagcgaaaaaatcgcctacgaacccgccgccctgcaacttttgggacgcgccgccgccggatcgatgcgcgatgccttaagcctgctcgaccaagccatcgccctgggttcgggcaaagttgccgaaaacgatgtccgccaaatgatcggcgcggttgacaaacaatacctttacgaactgctgacaggcatcatcaaccaagacggcgcagccctgaccgccaaagcgcgggaaatggcggcgtgtgccgtcggctttgacaacgccttgggcgaactcgccatactgctgcaacaactcgccctgatacaggcagtgccgaatgccttggcgcacgacgaccccgattccgatattttgcaccgcctcgcccaaaccataggtggcgaacaaatccagctttactaccaaatcgccgtccacggcaaacgcgacttgggcctcgcccccgacgaatacgccggctttatgatgaccctgctgcgtatgctggcgtttgcgcccttggcggcagcttcgtgtgatgcaaacgccgtgattgaaaataccgaacttcaatccccatcggtacaaaccgccgaaaaggaagccgccgcaaaaaagccccaaccgcgccctgaagcggaaaccgcccaaacatccgttcagacggcatccgcagcggcaatgccgtctgaaagcaaaactgccgaacccgtttccaatcaagaaaacaacgatgttccgccttgggaagacgcgccggacgaagcccaaaccgcagccggcacggcgcaaacgtcggcaaaaagcattcagacggcatccgaagccgaaacgccgcccgaaaaccaagtttccaagaacaaggcagccgacaacgaaaccaatgcccccttgtccgaaacgccgtctgaaaaccccattcaggcaacaccgaataatgaagccgttgaaacggaaacatttgcacacgaagcccctgcagaacctttctacggttacggctttccggataatgactgccccgtagaagacaacgcagaaatcccgccgcccgattgggaacacgccgcccctgccgataccgcaggcggaggcgcggacgaagaagcagaagcgggcggcatcggcggaaacaacacgccgtccgccccgccgcccgaattttccaccgaaaactgggcagccatcgtccggcatttcgcccgcaaactcggcgcggcgcaaatgccggcgcaacactccgcgtggacggaataccatcccgacaccggcctgatggttttggcgatgaccgccgaagcacgcgccaccgccgacaaaaaacgcctcgacaaaatccgcgacacccttgcccaagcctacgggctgcaactcaccctgcaaacccaagactggcaggacgaagccggcagagaaacccccgcaatgcaggacaagcgcgtccaaatcgaagacaggcaaaaagcacaagcattgctcgaagccgaccccgccgcacaaaaaatcctccaagcattcggcgcgcaatggcagcccgaatcactggaattggcggcaaaccggccataa

SEQ ID NO: 38289 - DNA, 285 bp, Neisseria meningitidis
atgttcggcggtcgtctgaaaaactctccatccattaccgccaaacactttttgaaggaaaatatcatgaaatttattaacacctgccgtaaatacggcgcaaaactggctgttgtaacagctgctcccctggctttggccgcacatgcaaatgcaacgttgcccgatacggcaaaaaacgctttggaagccgcaaaagcggacggtatggaagccggttggattgtcgttggcgttttcgccgcgctttttgtattttccatcgttaagagagtgatgaagtaa

SEQ ID NO: 38290 - DNA, 897 bp, Neisseria meningitidis
atgcttaccttccaacaaatcatcttcaaactgcaaacattctgggcagacaaaggctgcaccgtcatccaacccttcgacatggaagtcggtgcaggtacttcccatcccgccacctgcctgcgcgcgctcgggcccgagccttggtttgccgcctacgtccaacccagccgccgccccaaagacggccgctacggcgacaaccccaaccgcctgcaacactattaccaattccaagtcgccctcaaacccgcccccgccaatatccaagacctttatctcgactccctgcgcgaattgggcatcgaccccaaagtgcacgacatccgctttgtcgaagacgactgggaaaaccccaccctcggtgcgtggggtttgggctgggaagtctggctcaacggtatggaagtaacccagttcacctatttccaacaagtcggcggcatcgactgcacccccgtactcggcgaaatcacctacggcatcgaacgcttggcgatgtacctgcaaggcgtggaaaacgtctatgacctcgtttgggcaaaaacgctggacggtaatacagtaacttacggcgacgtgtaccaccaaaacgaagtcgaacaatccacctacaacttcgaatacagcgatgccgattggctgctgcgccagttcaacgactacgaagcgcaagccaaacgcctgctcgccgttgaagaagcaagccttgcgctgcccgcctacgagctggttctcaaagcagggcatacgttcaaccttttagacgcacgcggcgcgatttccgtaaccgaacgcgccacctacatcgggcgcatccgcgcgttgagccgcgccgtggcgcaaaaatatgtcgaaagccgcgaaaaactgggcttcccgttgattaaaaaataa

SEQ ID NO: 38291 - DNA, 1281 bp, Neisseria meningitidis
ttgaaggattgttttcctcaaggtctgaatggaaaaaaaacagcggtggcattaagcggcggcttggattccgtggtcttgctgcacctgcttgtccgcgctgggaaacgggcaggatttgtgccggaggcattgcatatccatcacggcttgagcccccgtgccgacgattgggcggatttctgtcaaaactattgcgatatgctaggggtggggctggaaacggttaaggtctgcgtggaaaaaaacggtttgggcatcgaagcggcggcgcggcaaaagcgttatgccgcgtttgccgaaaaaggctttgacattttggcgttggcgcaccacagggacgatcaaatcgaaacctttatgctggcggtcgcgcgcggcggcggtttgcgcgctttggcggctatgcccgccgtccgcccttttggggaaaaaggcatcatttggcggcccttgctgcctttttcgcgccaagatatatgggattatgcccaaaaacacggtttgccgaatatcgaggatgaaagcaataccgatacggcttatttgcgaaaccgcttccggcaccgtattttgcccgaactttcggcgcagattccccatttcgggcgacatgtgctgaacaatgtccgcgctttgcaggaagatttggctttgttggacgaggtcgtcgttcaggactgccgttgggtttgcggggccggttatttcgatacggcgcggtggctgacgttttccccgcgccggaaaacccatattttgcggcattttctgaaggaaaacggcattcccgtgccgaatcagaatgcccttgccgacattgcccgggttttgacggaggcaaaaaccggacgttggaacttgcaaggctttgaattgcatcattatgcaggcaggctgtttgtgttccgacaggaaaaaacggataaactgcggtttttgaaagacaggcagataagcggaaatttaagggaaatattgacggggcagggatttgttttaaaacgtcatccgtttgggcttcctgagcatcttttggagcaggacggaattttgaggacggtagcggcatcggatacgttggctgtcggcggcatccataaggatgtgaaaaaaatccttcaggggaaacgggttttgcctgtcctgcgcccaatttggccgcttgttgccgacagcggaaaccgtccattggcgttggcaaactgttgtgcggatttccaatattcggtttcagacggcattttgcccgtccatcctgactttcccattttattttga

SEQ ID NO: 38292 - DNA, 1164 bp, Neisseria meningitidis
atgaacatcaccatagtcgccccttattgctcgctgccgtccgaaccgtatttcaactgcttttggtatctggcagaacgattgtcgcaatcgcacgacgtgttgctgattaccagccgtttccgccactacgacaaatcattcagacggcatgaagatgctgccgccacttcaaacggcaggctgcgcgtcaagctgctggacgaacctggctaccgaaaaaacgtctccctcgcccgcgtcgccagccaccgcgtattcgtccgcaatttggcacgctggctgcacagcccgcaggcggcggaacaggacatcgtctattctgcctatccgctgatggcgaccaacctgctgttgggcaaacacaaagcgcgtttgggctacaaactgattgtcgatgtgcaggacgtatggccggagtctttctcctcggtcgtaccatttttgaaaaaagtaccgcacaagctgctgccctttgcttcacgcgccaaccgtgcctaccgctgcgccgacgcgctggttgccgtatcgcagacttatctcgaccgcgccaaagaagccaatccgaacgtacccggcgaagccgtctatatcggtacggattttgccgccatcgcccccccgcgattccgctccaaaaccacccgccttttctacttgggaacgctcagttacagctacgacgtggaaaccgtgtgcaaaggtgttcggaaacttttagacgacggcgaaaacgtcgaattgcacattatgggcggaggacccgatttggagaaactcaaacaatatgaaaatcgcgccatcaagttttacggttatttaccctattctgaaatgatgtcgattgccaaaggctgcgacattgccgtcaacgccatccatagccacgccatgcagtcggttaccaacaaactctccgactatatggctttgcaaaaaccgattctgaacagccagaccaatgccgaagtccttagcctcttgaacctgctgccgcacgaaaactaccgttccggcgacgtggacagcttcgttcaagccgccaaagatattttgaaacgcaaaaacgaccccgttcagtccgaagaaatcgtccgccgtttcaagcgcgacgttgcctatcaaaaaatcgtcaacctgattgaaagattagctcatgaataa

SEQ ID NO: 38293 - DNA, 612 bp, Neisseria meningitidis
atggccgcccccgccggtgtggccaccgaatgccgccttaccgtacaaggcggcaccgaccgagaaagcgatgcctcactgctggcgcgtctgttggaaatcatccgccgaccgcccgcaggcggcaaccgttacgactataaaaactgggcgttgagtgttgacggcgtaaccagcgcatatgtttatccgctgcgccgcggcttgggtacggtggatattgccattacctccgccgacggtgtgccatcggaagaaactgtgcgccgcgtacaggcttatatcgacgagatgcgcccggtaacggcaaaaaatgcgctggtactcaagccaaccgtaacggcggtgcctgttaccgtgcaagtcaagctcgacggcatcgacttggacgaggccaagcgccgcatacggacggccctaaaagaatatttcgacaccctgatccccggcgacggcctgactgtgtcgcaaatcgaggcggctatcagcaatgtggatggtgtgatcgaccgccgtctgactgcgccgacggccaaccgtgccgccgatacggttaaccgcatcgagtggtttaaagcgggcgcgattaatgtaacggagatgccgtcatga

SEQ ID NO: 38294 - DNA, 450 bp, Neisseria meningitidis
  misc_feature 427, 428, 429, 430, 431: 'n' is a, c, g or t
atgtctcaactggcaaacgcaatccgcttcctctcggccgatgccgttcaaaaagccaattccggccaccccggcgcgcctatgggtatggcggaaatggcggaaacattgtggacgaaattcctcaatcacaaccccgccaaccccaaattctacaaccgcgaccgcttcgtcctctccaacggccacgcgtctatgctgttgtacagcctgctgcacctgaccggctacaacctaagcattgaagacttgaaaaacttccgccaactgcacagcaaaacccccggccatcccgaatacggctacaccgacggcgtggaaaccacgaccggcccgttggggcaagggattgccaacgcggtgggtatggcattggcagaaaaaatccttgccgccgaatttaataaagacggtttgaacatcgtcnnnnncacacacttaattaattaa

SEQ ID NO: 38295 - DNA, 1467 bp, Neisseria meningitidis
atggctgaagcgacagacgttgtcttggtgggcggcggcattatgagcgcgactttgggcgttttgctcaaagaactcgaaccgtcttgggaaatcaccctgattgaacgcttggaagatgtggcgttggaatcgtcaaacgcgtggaacaacgccggcacggggcattccgcgctgtgcgaattgaactatgcgccgttgggtgcaaatgggattatcgatccggcgcgcgccctcaatattgccgaacagtttcatgtcagccgccagttttgggcgacgttggtcgcggaaggcaagttggaagacaattccttcatcaatgccgtgccgcatatgtctttggtgatgaatgaagaccattgttcttatcttcaaaaacgttatgacgcgtttaaaacccaaaaactttttgaaaatatggaattttccaccgatcggaacaaaatttccgattgggctccgctgatgatgcgcggccgggacgaaaaccaacccgtcgccgccaactactccgccgaaggcacggatgtcgatttcggacggctgacgcgccaaatggtgaaatatttgcagggcaagggcgtaaaaaccgagttcaaccgccacgtcgaagacatcaaacgcgaatccgacggcgcgtgggtgctcaaaaccgccgatacccgcaaccccgacgggcagctcaccctccgtacccgcttcctcttcctcggcgcgggcggcggcgcgctgaccctgctgcaaaaatccggcatccccgaaggcaaaggctacggcggcttccccgtgtccggcctgttcttccgcaacagcacccctgaaaccgccgaacaacacaacgccaaagtgtacgggcaggcttccgtcggcgcgccgccgatgtccgtcccgcacctcgacacacgcaacgtggacggcaaacgccaccttatgttcggcccttatgcaggcttccgttccaacttcctcaagcaaggctcgcttatggatttgccgctgtccatccatatggacaacctctatcctatgctgtgcgccggctgggcgaatatgccgctgaccaaatacctgctgggcgaattgcgtaaaaccaaagaagaacgcttcgcctccctgctggaatactaccccgaggcaaaccccgacgactgggaactcatcaccgcagggcaacgcgtccaaatcattaaaaaagactccgaaaaaggcggcgtgctccagtttggtacggagattgtcgcccacgccgacggctcactcgccgcattgctgggcgcgtcgccgggcgcatcgactgctgtgccgctgatgatccggctgatgcaccaatgcttccccgagcgcgccccgtcttgggaaggccgtctgaaagagctggtaccgggttacggcatcaagttgaacgaaaaccccgaaagggcggatgaaattatcgcctataccgcgaaagtgttggatatttaa

SEQ ID NO: 38296 - DNA, 468 bp, Neisseria meningitidis
atgcaggtatttctgacgattcccggctatgatgttgaggcagaaatcgaaaaattcgtttggatggatgctgtgatttggcagatgccgagctggtggatgcacgagccttggacagtgaaaaaatacatagacgaagtattaaccgctggacacggcaaactctaccaaagcgacggcagacacagcgtcaatccgactgagggctacggcacaggcggcttgttgcaaggcaaaaaacatatgctttcactgacttggaatgcgccgattgaggcgtttacccgcgaaggcgatttctttgaaggcaaaggcgttgatgttttgtatatgcacttccacaaagccaacgagtttttgggtatgacccgcctgccgacattcttatgtaacgatgtggttaaaaatccgcaagtggaaaaatacttggcagattatcaggcacacttggaaaaagtgttcggctaa

SEQ ID NO: 38297 - DNA, 672 bp, Neisseria meningitidis
atgaaaaccgtttccaccgccgttgtccttgccgccgctgccgtttcactgaccggctgtgcgaccgaatcctcacgcagtctcgaggtagagaaagtcgcctcctacaatacgcaatatcacggtgttcgtaccccgatttccgtcggaacattcgacaaccgctccagcttccaaaaaggcattttctccgacggggaagaccgtttgggcagccaggcaaaaaccattctagtaacgcacctgcaacagaccaaccgcttcaacgtactgaaccgcaccaatttgaacgcattaaaacaggaatccggcatttccggcaaagcgcataacctgaaaggcgcagattatgtcgtgaccggcgatgtaaccgaattcggacgcagagatgtcggcgatcatcagctcttcggcattttgggtcgcggcaaatcgcaaatcgcctatgcaaaagtggctctgaatatcgtcaacgtcaatacttccgaaatcgtctattccgcacagggcgcgggcgaatacgcactttccaaccgtgaaatcatcggtttcggcggcacttccggctacgatgcgactttgaacggcaaagttttagacttggcaatccgcgaagccgtcaacagcctggttcaggctgttgacaacggcgcatggcaacccaaccgttaa

SEQ ID NO: 38298 - DNA, 621 bp, Neisseria meningitidis; identical to SEQ ID NO: 37903

SEQ ID NO: 38299 - DNA, 1464 bp, Neisseria meningitidis
atgcgtatcgtagaaaaagcctatactttcgacgatgttttgttggttcccgcacattcgaccgtgctgccgcgagacgttaaacttcaaaccaagctcacccgcgaaatcacacttaacctccccctgctttccgccgcgatggacactgttaccgaggcgcgcctcgccatttcgatggcacaggaaggcggcatcggcatcatccataaaaacatgccgcccgaaatgcaggcgcgcgccgtttccaaagtgaaacgccacgaaagcggcgtggtcaaagaccccgtaaccgttgcaccgacgacgctcatccgcgaagtcttggaaatgcgcgcgcagcgcaaacgcaaaatgtccggcctgcccgtcgttgaaaacggcaaagtcgtcggcatcgtaaccaaccgcgacctgcgttttgaaaaccgcgtcgatttgcccgtttccgccattatgaccccgcgcgaacgtctggttaccgtccccgaaggcacaagcatagacgaagcgcgcgaactgatgcacacgcacaaagtcgagcgcgttttggttctgaacgaaaaagacgaactcaaaggtctgattaccgttaaagatattttaaaaaccaccgagtttcccaacgccaacaaagactccgagggccgtctgcgcgtcggtgcggcagtcggcaccggcggcgataccgaagagcgcgtcaaagccttggtcgaagccggcgtggacgtgattgtcgtcgatactgcccacgggcacagccaaggcgtgattgaccgcgtgaaatgggtgaaagaaacctatccacacatccaagtcatcggcggcaacatcgccactgccaaagccgcattggatttggtcgccgccggcgcggatgccgtcaaagtcggtatcggtccgggatcgatttgcaccacccgtatcgtggcaggtgtcggcgtgccgcaactgaccgccattcacaacgttgccgaagccctcaaaggcacgggcgttccgctgattgccgacggcggcatccgcttctccggcgacatcgccaaagccctcgccgcaggcgcgtacagcgtcatgctcggcggtatgtttgcaggcacggaagaagcgccgggcgaaatcgaactctaccaaggccgctcgtacaaatcctatcgcggtatgggttccttgggcgcgatgagccaaggttctgccgaccgctacttccaagacaaaaccgacagcgcagacaaatacgtccccgaaggcatcgaaggccgcgttccttacaaaggcccgattgtgaacatcatccaccagctgaccggcggtctgcgttccagtatgggttacttgggttgcgccaatattgccgaaatgcacgaaaaagccgaatttgtggaaatcacttccgcaggtatgagcgaatcgcacgttcacgacgttcaaatcactaaagaagcaccgaactaccaccgctga

SEQ ID NO: 38300 - DNA, 174 bp, Neisseria meningitidis
ttgcgcctcaaaataaagctgccttccgttgtcggcattaccacgcaaaaaaatgaattgcttgatattccaatgttttttatatgtttttatattgtgatgcgatcagacaaacgcccccctgacatttgtttagacggcatcgtattgctaaatttctataagtatgtataa

SEQ ID NO: 38301 - DNA, 483 bp, Neisseria meningitidis
atgaaatacttgaatcttgccgcaatcacccttgccgccacatttgctgcacataccgcctcggcagacgaactggccggatggaaagacaacaccccacaaagcctgcaatcactcaaagcccccgtacgcatcgtcaacctttgggcaacctggtgcggcccgtgccgaaaagagatgcctgccatgtccaaatggtacaaagcgcagaaaaaaggcagcgtcgatatggtcggtatcgcgctcgacacgtccgacaatatcggcaacttcctcaagcaaacccctgtttcctacccgatttggcgttacaccggggcgaacagccgaaactttatgaaatcctacggaaacaatgtcggcgtactgccctttaccgtcgtcgaagccccgaaatgcggatacaaacaaaccattaccggggaagtgaacgaaaaaagcctgaccgacgccgtcaaactcgcccattcaaaatgccgttaa

SEQ ID NO: 38302 - DNA, 2157 bp, Neisseria meningitidis
atgcctgtccctcaacccaccgcaccttacgaccctctgaccgccgaagcgcgtaccctgcttttccatacagcctcctacctcaagcccgaggaacaggcggagcttgaaaaagccgtcgcctatgcgtttcgcgcccacgacgggcaaacccgcaaaagtggcgaaccatacattacgcatccgattgccgttgcgacacagcttgcggtttggcatatggacgtacagggtctttgtgcaggtgtaatgcacgacgtattggaagatacgggcgtgacaaaaggggaaatggcggcggtgttcggcaatacgattgccgagatggtggacgggctgtccaaactcgaaaaactcaaatttgaagatcatgcggaacatcaggcggagagtttccgcaaactgattttggcgatgaccaaagatgtgcgcgtcatcgtcgtcaaacttgccgaccgcctgcacaatatgcggacgctcggttcgatgcgcccggacaaacgccgccggattgcaagggaaacccttgaaatctatgcacagattgccaaccgtataggtttgaataacgcatatcaagagcttcaggatttatcgttccaaaacctgcatcccaaccgctacgagactttaaaaaaagcgatggacaagagccggaagaaccggcaggacgttgtcggcaaagtcttgcgcgcattcggccagcggctggtaggcgcgaatatagaggccaaaatcaaaggcagggaaaaaaacctgtacggcatccatcagaaaatgatggcgaaaaagctgcgctttgccgaggttatggatatttacggtttccgcgtcattgtcaacagcattccagcctgttatgccgcactcggcgcattgcacaccctctatcagcccaagcccgggcggttcaaagactatatcgccattccgaaaagcaacgggtatcaaagtctgcatacgactttggtcggcccttacggcttgccgattgaagttcagatacgtaccaaggaaatggatgctgttgccgaaggtggaatcgccggacattggagctataaatcatattctaagatggtcgatcaggcggtgcttcacacaaaccggtggctgaaaaatatcttagatttgcaggcaagcagtgccaatgccattgagtttctcgaacacgtcaaagtcgatttgtttccgaacgaaatctacatccttacgccaaaaggaaaaatcctaactttgcccaaaggggcaacgcctgtcgattttgcttatgcggtgcataccgatatcgggcacaaaaccgttgccgcacgtatcaacaatatcatgatgccgttgcgtacgaagctcaaaaccggcgattccgtcgaaattatcacatccgaacacgccaaacccaatcccgcgtggttgaatttcgccgtgtccggcagggcgcgaagcgccatacgccaatatattaaaaatcttaaccggcacgatgcggtcgttttgggagagagcctcttacaaaaagccctgtccagtttactgcccaaagatgtcctgctttcagacggcatcaaagaaaaataccttgccgatctcaacgacaaacagacttcatttgaggaagtgctgtacaacgtcggtatggggcataccctgcctgtttatgtcgccatgcacattgccgagttggcaggggagcatttcggtagcgaggtcaggctcagttccattaaagtcgatggtcaggaaagcgggcatattcattttgcagagtgctgccaccctgttcccggtgattccatccgtttgctgttggttaagggaaaaggcatgattatccatagggatacctgcccgacgttgttgaagtccgatcccgaacagcagctggatgcagactgggaaaatatgaacgggcagaactaccgtgtcgggcttcaagtccaatcggaagacagccacggcttgctggcattaatggcgcaagcgatttccgattccggtgcggacattgagtcggtcgaaacaccgtctaaatcccagtcgggaacggaaggttttgtcgaattcaaattcttattgaaagtcaagaatctgaatcaattgaatcagattattcaaaatctgcatagtattccatatatccgcaaagtcatcagaagttga

SEQ ID NO: 38303 - DNA, 282 bp, Neisseria meningitidis
atggaaaacgggcaacggaataaccggtttcctttggaaaaacgaattttttatctggagcattcggggcggtatctgatgatttgcgccttatcggattattcccaaaacaaacatactgtcgttatggcaaatttcatctatccggatgaaaaaacggattggcggaatttggatgatttattcaatgagttggttttagaggaattgcaggcttcatttatggattggcatccgactgttgaagaggcaatcagccgtcatttggaagacttttcgtaa

SEQ ID NO: 38304 - DNA, 987 bp, Neisseria meningitidis
atgaaacactttctttcccttttcgcttccatattgatgtctgccctgattgccgcgtggtttgcccaaaacccgatcaatgcctactggcagcagacctaccaccgcaacagcccgctcgaaccgcttgccgcctacggatggtggcggagcggtgcggcgttgcaagaaaacgcctacaccctttcagacggcatcaaagccttcctgtccggcgaaacgccgccgacggctcaagacggcggttcggcagatatgccgcctgaagccgccgcatccgaagccgcccctcaaaccggcgaaatccaagaatggaaacaggacaccgacaccgccgccgtccgcagcggcgacaaagtctttttcgccggcgactcgctgatgcagggcgttgcacccttcgtgcaaaaaagcctgaaacagcaatacggcatcgaatccgtcaacctcagcaaacaaagcacggggctgtcctacccctcattcttcgactggccgaaaacgattgaagaaaccctgaaaaaacatcccgaaatcagcgtgctcgccgtcttcctcggcccgaacgacccgtgggatttccccgtcggcaaacgctacctcaaattcgcttccgacgaatgggcgcaagaatacctgaaacgcgtcgaccgcatccttgaagccgcacacacgcaccgcgtccaagtcgtctggctcggcatcccctacatgaaaaaagccaagctcgacgggcagatgcgctacctcgacaaactgctttcggaacatttgaaaggcaaaatcatcctgattcccaccgcgcacaccctgagcggcgggaaagaccgctacacggactccgtcaacgtcaacggcaaacccgtccgctaccgcagcaaggacggcatacactttaccgccgaaggacaaaaactgctggcggcaaaaataatggaaaaaatcgtttttgaaccaagtacgcaaccatcaagtacacagccatga

SEQ ID NO: 38305 - DNA, 660 bp, Neisseria meningitidis
gtgcaggcggatttagcctatgccgccgaacgcattacccacgattatccgaaagcaaccggtgcaaacaacacaagcacagtaagcgattatttcagaaacatccgtgcgcattccatccacccccgggtgtcggtcggctacgatttcggcggctggaggatagcggcagattatgccagttatagaaaatggaaagaaagtaattattctaaaaaagttactgaatttaaacaccaaaacggcaccaaaaaagaagacaaaacagaacatcaaggaaacggcagcttccacgccgcttcttctctcggcttatccgccatttacgatttcaaactcaacgataaattcaaaccctatatcggtgcgcgcatcgcctacggacacgttaaacatcagattcattcagtggaaagcaaaaccacgactgttacctctaacaacggaggtcctatcccacaaggtccgacccccaaacctccctatcacgaaagcaacagcatcagcagcttgggtcttggtgtcatcgccggtgtcggtttcgacatcacgcccaagctgaccttggacaccggataccgttaccacaactggggacgcttggaaaacacccgcttcaaaacccacgaagtctcattgggcgtgcgctaccacttctga

SEQ ID NO: 38306 - DNA, 282 bp, Neisseria meningitidis
atgaaaaaatccctgtttgccgctgctttgttgtctttggttctggcagcctgcggcggtgaaaaagccgctgaagctcccgctgctgaagcacctgccgccgaagctcccgctaccgaagcacctgccgccgaagctcccgctgctgaagctgccgctactgaagcacctgccgccgaagctcccgctgctgaagctgccgctaccgaagcacctgccgctgaagctgccgctaccgaagcacctgccgctgaagctcctgctgccgaagctgcaaaataa

SEQ ID NO: 38307 - DNA, 1185 bp, Neisseria meningitidis
atggctaaggaaaaattcgaacgtagcaaaccgcacgtaaacgttggcaccatcggtcacgttgaccatggtaaaaccaccctgactgccgctttgactactattttggctaaaaaattcggcggtgctgcaaaagcttacgaccaaatcgacaacgcacccgaagaaaaagcacgcggtattaccattaacacctcgcacgtggaatacgaaaccgaaacccgccactacgcacacgtagactgcccggggcacgccgactacgttaaaaacatgattaccggcgccgcacaaatggacggtgcaatcctggtatgttccgcagccgacggccctatgccgcaaacccgcgaacacatcctgctggcccgccaagtaggcgtaccttacatcatcgtgttcatgaacaaatgcgacatggtcgacgatgccgagctgttggaactggttgaaatggaaatccgcgacctgctgtccagctacgacttccccggcgacgactgcccgattgtacaaggttccgcactgaaagccttggaaggcgatgccgcttacgaagaaaaaatcttcgaactggctgccgcattggacagctacatcccgactcccgagcgtgccgtggacaaaccgttcctgctgcctatcgaagacgtgttctccatttccggccgcggtacagtagtaaccggccgtgtagagcgcggtatcatccacgttggtgacgagatcgaaatcgtcggtctgaaagaaacccaaaaaaccacctgtaccggcgttgaaatgttccgcaaactgctggacgaaggtcaggcgggcgacaacgtaggcgtattgctgcgcggtaccaaacgtgaagacgtagagcgtggtcaggtattggccaaaccgggtactatcactcctcacaccaagttcaaagcagaagtgtacgtactgagcaaagaagagggcggccgccataccccgttcttcgccaactaccgtccccaattctacttccgtaccaccgacgtaaccggcgcggttactttggaagaaggtgtggaaatggtaatgccgggtgagaacgtaaccattaccgtagaactgattgcgcctatcgctatggaagaaggcctgcgctttgcgattcgcgaaggcggccgtaccgtgggtgccggcgtggtttcttctgttatcgcttaa

SEQ ID NO: 38308 - DNA, 711 bp, Neisseria meningitidis
atgcacgagacaactgacagactttttgagatagccaaagagcagggagttttaaagccggctgacatagcagagcgtctgaatatcagccaacaggctttgaaaaactgggaaagtcgtggcatagcggcaaaggcgctgcctgaagtagcaaaagcattcggtgtatctgaaacatggctgagaacaggtgaaggcagccgaaccgcgcccgtccttattgaccccgacctaccccacgaagtcaaagacatccaccgcccgatgacgtggagcagcaacgacccgctgcccgacgatgattatgttttcgtcccctacctcaaagagagctgcttcaaaggcggagtaggcacgtatgaaatccccgattacaacggctaccgcctgccgttcggcaaatccacgcttaaacgcaaaggcatcaatcccgacaacgtgttttgctgcaccctgaccggcgacagtatggaggaaaaaatcgcagaagacgcggcaattgccgtagatacgggcgaaaccgccatacgcgacggcaaaatctacgccttcgcccaggacggtatgttccgcgtgaagtacctgatacggcagcccggcaacagcgttctgatacgcagccacaacagcggtttctatggcgacgaaaacgcccccttggacagcctgaccgttatcggcagggtattttggtggagcgtgctggattga

SEQ ID NO: 38309 - DNA, 441 bp, Neisseria meningitidis
  misc_feature 426, 427, 428, 429, 430: 'n' is a, c, g or t
ttggagctgccggtattggaagccagcatcgggcacgatgtggttgacattcgggggctgacaaaaaatacaggtttgttttccttcgaccccggatttgtttcaaccgcaagctgtgagtctaaaattacttacatcgacggcgatcaaggcttgctttattatcgcggataccccatcgagcagctggccgaaaagtccgattatttggaagtctgctacctgttgatttacggcgaactgccgactcccgagcaaaaggcagaatttgacaataccgtccgccgccacacgatggtgcatgaacagctgacttggttcttccggggcttccgccgcgacgcgcatccgatggcgatgatggtcggcgtggtcggcgcactgtctgcgttctaccaagacagcttggacattagcaatcccgannnnncacacacttaa

SEQ ID NO: 38310 - DNA, 837 bp, Neisseria meningitidis
atgatagacctgcactgccattccatcgtttccgacggtatgctttcccccgccgaagtcgtgcgcctcgcgcatcaaaacggctgcacgctgctggcgttgaccgaccacgaccacaccggcggcatcgccgaagcgcgtgccgaagccgacaggctcggtttgcgcctgattaacggcgtggaaatctccgtaacgtggcgcgggcgtaccatacacgttgtcggcttagactttgacgaacaagacgaaaacctgcaaaacctgttggcgcaagtgcggcaaggccgtctgaaacgcctcgaagccatcgccgccaagctcgaaaagaaaggcatcggcggcgcatacgacggcgcgctcgcgctggcggcaaacaaagaaatggtcagccgcacccacgtcgccgagttcctcatccgggcgggacatgtcaaaaacaagcagcaggcgttcaccaaatacttgggcgacggcaaatcctgcgccgtccgacacgaatgggcgacgctggaagactgcgtctccgccgtcaacggcgcgggcggcatggcagtcatcgcccatccgatgcgctatgatttgtccgccaccgccaagcgcaatctgtttgaagaatttaaaaacctcggcggcgcgggcatcgaagtccacagcggaaactgttgcaaaaacgaccgcctcaactacgcgcttttggcagaacgcttcggtatgctcgccagcgcgggcagcgacttccaccgtttaaacgacttcagcggcggcatcctcggcgcgtgtcctgaactgccggaaaactgcaggccggtgtgggcgcatttttcccgacattga

SEQ ID NO: 38311 - DNA, 933 bp, Neisseria meningitidis
atgaagcagaaccgcacctttaccttccccgattttcgcaccgtttacagctatgcgcctttatatcggctgcaacatttaaaatacacattgcgaaaatttttcggaaaaaaagaaatttacgccttcgagcagtttgtcaacgcctcccctatccgtcaggggctgttcctccactgcccgcaaaatgcctatccgctgctgcgcgaatttgttgacaggcgttttaactgcaaacgccgtttagatgcgatgacggcagattttctcatggcggaaaaactgttcggcacagacatcctgcaccaaatggaagactaccgcttccatttggtcttggcgcacctttcagacggcatcagcttgtggctcaaccgcaacgacaactgcgtcgaagaaggcgcgtggtctttatctttgcgcgacgaagcaggcaaccggctgtatatggcgactttcgcctttgtcggcacacacctgctgacagcctccgtacaagggcctgcgggtgaagaagccaaagacactgtccgccgcataaccaaacaacttcacggcttgcgtccccaacaactgatggtaaccgccctgcaatatttcgccgccgtactcggcttggacggcgcaatgggcattgcacaaaaacatcaggtcaaactgcgctggaaacttaaaaagcgtgtcaaaatgaattacgacgcattctggcaggaatacggcgcaagtttggaacgggacggctactggcatctcccccaaacccccgcccgcaaagaccttgccgacatcgaaagcaaaaaacgctcgatgtaccgcaagcgttatgaaatgctggacaacatggttgcagagatgaaggacggtctgaaaacagaagcacgcggcatttcagacggcatccaaacggaaaaaccgctccgccggacagcctga

SEQ ID NO: 38312 - DNA, 1242 bp, Neisseria meningitidis
atgcccaccaaaaccccttcactgttcggctgcgcgatgattatcgccggcacggtcatcggcgcaggtatgctcgccaacccgaccgccacatccggcgtatggtttaccggctcgctggccgtgttgctgtacacctggttttccatgctctccagcggcctgatgattttggaagtcaacacccactacccccacggcgcgagcttcgacaccatggttaaagacctgctcggacgcggctggaacatcatcaacggtatcgccgtcgccttcgttttatacctgcttacttacgcttatatcttcgtcggcggcgacctgaccgccaaaggcatcggcaacgccttgggcggcaatgtttcgcttaccgtcggacaactcgtcttcttcggcatcctcgccttttgcgtatgggcatccgcacgcttggtcgaccgattcaccagcgccctcatcggcggcatggtattaacctttatttgggcaaccggcggcctgattgccgatgccaaaatgcctgttttgtttgacacccaagcccctgccggcaccggctactggatttacgccgccaccgccctgcccgtctgcctcgcttccttcggcttccacggcaacgtttccagcctgctcaaatactttaaaggcgacgcgcccaaagtggctaaatccatctggatgggcacactgattgcgctggtaatttacgtcctctggcaaaccgccatccaaggcaacctgccgcgcaacgagttcgcccccgtgattgccgccgaagggcaagtctccgtcctcatcgaaaccctgtccaaattcgcccaaaccggcaatatggacaaaatattgtccctgttttcctatatggcgatcgccacctcgtttttaggcgtaacgctcggactcttcgactacatcgcagacatcttcaaatggaacgacagcgtgtccggccgcaccaaaaccgccgcgctgaccttcctgccgcccctgatttcctgcctgctcttccccaccggcttcgttaccgccatcggctacgtcggcctggcggcaaccgtctggacaggcatcatccccgccatgctgctctaccgttcgcgcaaaaaattcggcgcaggcaaaacctataaagtttacggcggcttgtggctgatggtttgggtcttccttttcggcatcgtcaacatcgccgcacaggtattgagccaaatggaactcgtccccgtatttaaaggataa

SEQ ID NO: 38313 - DNA, 1050 bp, Neisseria meningitidis
atgcaaaacaacaacgaatttaaaattggtaatcgttcagtaggttacaaccacgaaccattgattatctgtgaaatcggcatcaatcatgaaggctctttaaaaacagcttttgaaatggttgatgctgcctataatgcaggcgctgaagttgttaaacatcaaacacacatcgttgaagacgaaatgtctgatgaggccaaacaagtcattccaggcaatgcagatgtctctatttatgaaattatggaacgttgcgccctgaatgaagaagatgagattaaattaaaagaatacgtagagagtaagggtatgatttttatcagtactcctttctctcgtgcagctgctttacgattacaacgtatggatattccagcatataaaatcggctctggcgaatgtaataactacccattaattaaactggtggcctcttttggtaagcctattattctctctaccggcatgaattctattgaaagcatcaaaaagtcggtagaaattattcgagaagcaggggtaccttatgctttgcttcactgtaccaacatctacccaaccccttacgaagatgttcgattgggtggtatgaacgatttatctgaagcctttccagacgcaatcattggcctgtctgaccataccttagataactatgcttgcttaggagcagtagctttaggcggttcgattttagagcgtcactttactgaccgcatggatcgcccaggtccggatattgtatgctctatgaatccggatacttttaaagagctcaagcaaggcgctcatgctttaaaattggcacgcggcggcaaaaaagacacgattatcgcgggagaaaagccaactaaagatttcgcctttgcatctgtcgtagcagataaagacattaaaaaaggagaactgttgtccggagataacctatgggttaaacgcccaggcaatggagacttcagcgtcaacgaatatgaaacattatttggtaaggtcgctgcttgcaatattcgcaaaggtgctcaaatcaaaaaaactgatattgaataa

SEQ ID NO: 38314 - DNA, 642 bp, Neisseria meningitidis
atgaaactgtatatttacgaccattgcccgttttgtgtgcgtgcgcggatggctgccgggctgtttggcgcggacgttgaagaagccgtgctggcaaacgacgacgaggcaacgccgatcggtatgatcggtgcgaaacaagtgcccgtcctgcaaaaagaagatggttcgtttatgggcgagagtttggacattgtgcggcatttcgaccgcgaagaccgtctgaaagacgaagtccgccccgagatacgggcgtggctggacaaggtgggcggatacaacgacaaactggtgcagccgcgcgtgatcaaaatcgggctgcccgaatttgcaacgccggaagcggtaaaatattttacagacaaaaaagagaaaagcatcggcagcttttccgccaatttgaataaaaccgcccaatatctcgaacgcataaacgcagatttgcaagagttggagaatttgatggacggtgcttcagacggcatcaacggcggaatcggcatggaggatattttggttttccccgttttgaggaatctgaccgtggtgcgcggtatcgaatggcctcaaaaggtgatgggttatttgatgacgatgagtgaaaaatcgggcgtgccgctttattttgacagggcattgtaa

SEQ ID NO: 38315 - DNA, 279 bp, Neisseria meningitidis
ttgcgcggcaaaaccaaagtgatgacgacccagatgtgtgcttcccgcgatgtcagcaaaagcgccaaaggttggagtgtcggtatcggtctgaatgtaggcaaacagttgaccgacagcgtcggtctcgagtttgatccatactaccgtcacaaaacaatctgcaaaccccgtgagattgttttggacggcgacaaaaccaaaatgggccgctccaaatccaacgagtacggcttccgcgtaaccgcaacgttctatagtcaattaaaatcaaagtag

SEQ ID NO: 38316 - DNA, 798 bp, Neisseria meningitidis
atgaaagccttgcataaaacatcattttgggaatctttagccattcaaaggcgcgtaatcggtgcgctgttgatgcgggaaattatcacccgttacggtcgcaataatattggctttttatggctgtttgttgagccgttgctgatgacattcgttatcgtcttgatgtggaaatttttaagggcagaccgatattcaactttgaatattgtcgcatttgcgattactggctatccgatgttgatgatgtggcgtaatgcctcaaaacgggcagttgggtcgatttcttcaaatgccagcttgctttatcaccgcaatgtaagagttttggataccatcttggcgcgcatgattttggaaattgctggtgcaaccattgcgcagattgtgattatggcggtattgattgcgattggctggattgaaatgccggcagatatgttttatatgctgatggcttggcttttgatggctttttttgcgattggtttgggtttggtgatttgttcgattgcctttaatttcgagccgtttggcaagatttggggcacattgacttttgtgatgatgccgttatccggtgcgttcttttttgtgcataatttgccgcccaaggtacaagaatatgcattaatgattccgatggtgcatggcacagaaatgttccgtgccggatattttggcagcgatgtaattacctatgaaaatccttggtatatcgtattgtgcaatctggtgttgttgttgtttggcttggcgatggtcagtaaattcagtaaaggagtcgagccgcaatga

SEQ ID NO: 38317 - DNA, 1794 bp, Neisseria meningitidis
atgaaaaatatccgaaatttctccatcattgcccatatcgaccacggcaaatcgacgcttgccgaccgcttcatccaatattgcggcggcttggatttgcgcgaaatgagtacgcaggtgctcgattccatggacatcgaaaaagagcgcggcattaccatcaaagcgcaaaccgccgcgctcaactacaaagcacgcgatgggcaggtgtatcaactcaacctaattgacacgccgggacacgtcgacttctcttacgaagtttcccgttcgctgtcggcttgcgaaggcgcgcttttggtcgttgacgcgtcgcagggcgtggaagcgcaaactgtggcgaactgttacaccgcgattgatttgggcgttgaagtcgtgcctgttttgaacaaaatcgacctgccagccgccgaccccgaacgcgtggagcaggaaattgaagacatcattggtatcgatgccgtcggtgcggtgcaatgttccgccaaaagcggcatcggcgtggaagacgttttggaagaaatcgttgccaaaatccccgcgccgaccggcgatgaaaacgcgccgctgcaagccgtgattgtcgattcgtggtttgacaactacgtcggcgtggttatgctgattcgagtgaaaaacggcaccatcaaactgaaagacaaagtccgctttatgagcaccaaggcggaaacgcaagtcgagcaactgggcgtattcacaccgaaatcggttcaaaaacaagaactaaaagccggcgaagtgggctttttgattaccggcgtaaaagaattgggacaggcgaaagtcggcgatacggttactttggttgccaaccccgcttccgagccgctgcccggcttccaagaagtacaaagccaagtattcgccggactttatcccgtggaaagccacgactacgaagccttgcgcgatgctttggaaaaattgcagctgaacgatgcttcgttgaaattcgagcctgaagtttcccaagcattgggcttcggcttccgttgcggcttcttgggtctgttgcacttggaaatcgtgcaggaacgcttggagcgcgagttcgatatggatttgattaccaccgcgccgacggtggtttatgaagtcgtgttgaaaagcggcgaaaaaatcgaagttgaaaacccgtccaaactgcccgacatcggcagcatcgaaaccattcttgagccgattattaccgcgaccatccttgtgccgcaggaatatgtcggcaacgtcatgactttgtgcaaccaaaagcgcggcgtgcaagtcaatatgcagtacatgggccgccaagtgatgctgacttatgatttgccgatgaacgaagtggtgatggactttttcgacaaactcaaatccacttcgcgcggttatgcttcgttggactaccatttcaaagagttccaaccgtctgatttgattaagctggatattatggtcaacggcgaaaaagtcgatgccttaagcctgattgtgcaccgtcaaagcgcggttcaccgaggccgcgagctggcatcgaaaatgcgcgagctgattccgcgccaaatgttcgacattgccgtccaagccgccatcggcagccagattatcgcccgcgaaaacgtcaaagcactgcgtaaaaacgtcttagcgaaatgttacggcggcgatattacgcgtaagaaaaaactgcttgaaaaacaaaaggcaggtaaacgccgtatgaaacaagtgggcaatgtggaaattccgcaaagcgcgttcttggcgattttgcaggtgagcgacaaataa

SEQ ID NO: 38318 - DNA, 516 bp, Neisseria meningitidis
atgtacacttgcacttcctgcggcgaaaaacatgaagatatgcccgcaatcggctttaccgcccccgatccctataatcaactcagtgaagaagaacgcattgcttatcaagcagaatgcgattctgatttctgcatcatccgctatcccgaccaaaccgaccgctttatccgcgcggtgctgccgattccgattatcgggcatcaggaaacgctggaatatggggtgtgggtgtccgtcagcgaaaagagttttaacgactatcaaagccactttcacgacaatccggaaaatgtcgtttatttcgggatgatctgcaaccggctgcccccttacgaatccgacaccttcggtttgcattgcaatgtcgttacccaacccgatggtcaacgccctttgctgcaacttcatcaaagcggcggacatccgctggtacgcgacttttatcacggcatagaatatgccgaggcacaggcaaggataggggcggtatccgaatcggattgctcaggataa

SEQ ID NO: 38319 - DNA, 1407 bp, Neisseria meningitidis
atgaaactgttccaacgcattttcgccacattttgcgcagttatcgtctgtgcaatctttgtggcgagtttttctttttggctggtgcagaacacccttgccgaaaaccagttcaaccaacgccgcaccatcgaaaccactttgatgggcagcatcatttccgcattccgggcacgcggggacgcgggcgcgcgcgaaatcctgacggaatggaaagacagccccgtctcatcgggcgtgtacgttatacagggcgacgagaaaaaagatatcctgaaccggtatatcgacagctataccatcgaacgcgcccggcttttcgccgccggacacccgcattccaacctcgtccatatcgaatacgaccgcttcggcgaagaatacctgttcttcaccaaagactgggacaaactccaagcccgccgcctgcccagccccctgttgatccccggcctgccgctcgccccgatttggcacgaactcatcatattgtccttcatcatcgtcgtcggactgctgatggcgtacatcctcgccggcaatatcgccaaacccatcagaatcttaggcaacggcatggacagggtggcaaacggagaacttgaaacccgtatctcccaacaggtcgacgaccgcgacgacgaattgtcccatcttgccatccaattcgacaaaatggtggaaaaactcgaaaaactcgttgccaaagaacgccacctgctccaccacgtttcccacgaaatgcgctccccgcttgcccgtatgcaggcgattgtcggactgattcaggcgcagccccaaaaacaggaacaatatctcaaacggctggaaggcgaactgacccgcatggatacgctggccggggaactgttaaccctgtcccgtctcgaaacttccaatatggctttggaaaaagaaagcctgaaactcctgcccttcctgggcaacctggtagaagacaatcaaagcattgcccagaaaaacggacaaacggttaccctgtctgccgacggaaaaatccccgaaaacacaaccatccttgccaacgaaagctacctgtaccgcgccttcgacaacgtcatccgcaacgccgtcaactacagtcccgaaggcagcaccatcctgatcaacatcggacaagaccacaaacactggataatcgacgttaccgacaacggccccggcgtggacgaaatgcagctcccgcacatcttcaccgctttctaccgtgcagactccagtgccaacaaacccggaacaggactggggcttgcattgacccaacatattattgaacagcactgcggcaaaatcatcgccgaaaacatcaaaccgaacgggctgcggatgcgcttcatcctacccaagaaaaaaaccggttccaaaacagaaaaaagtgcgaactga

SEQ ID NO: 38320 - DNA, 1257 bp, Neisseria meningitidis
atgaaagtgcttgttttaggtgcgggtgttgccggcgtgtcttccgcgtggtatctggcagaggcaggacatgaagtaacggtcatcgaccgcgccgagggtgtggcgatggaaaccagttttgccaacgcaggccagctttcttacggctataccacgccttgggctgcacccggtatcccgaccaaagcgctgaaatggctgtttaaaagccatccgcctttgctgtttcgccccgacggcagcctgtatcaaatcgaatggctgtggcaaatgctgcaaaactgcacggcagcgcactatcaaaccaataaagagcgcatggtcaggatttccgaatatagccgtgaaatgttccgccgttttgaagcgcaaaccggcatgaattttgaggaacgcaaaaaagggacgttgcagattttccgccaaaccaaagaagtcgaagcggcagaacaagacattgccgttttggaacgctacggcgtgccgtaccgccgtctgaaacccgaagaatgtgcagaatttgagcctgcgctggcacgcgttaccgccaaaattgccggcggcctgcacctgcctgcagatgcgaccggcgactgccacctcttcactgaaaacctatacaaattgtgtcaggaaaagggcgtacagtttcatttcaaccaaaccatcagccgcatcgaccataacgggctgcgcatcaaagccgttgaaaccgaaacagggcggtttgaagcagatgccgttgtctgtgcgctcggctgcttcagtaggactgtgttggcgcagttggatctcaatctgcccatttatcccgtcaaaggctattccttgaccctgccggtcaccaattcagacggcgcaccggtgtccaccgttttagatgaaagctacaaagtcgccatcacgcgctttgacaacagaatccgcgtcggcggtatggcggaattgtcgggctacgaaatcaaactgcccgaaaaacgccgcgaaaccttggctttggtcgtcaacgacttgttcccggaaggcggcgatttgagccaagcatcgttctggagcggcctcagaccgatgacgcccgacagcacgccgttaatcggccgcacccgctttgaaaacttattcttgaatacaggccacggcactttgggctggaccatgtcgctgggttcggcaaaattaaccgccgatatcgtgagcggcaaagacaccgaaatccgaagcgacgatttgagcctgtcgcgctatcaggcttaa

SEQ ID NO: 38321 - DNA, 405 bp, Neisseria meningitidis
atgaccgcccaaccctgccccatctgcacggcacaagatgaagatattttgctgcaaacccccaagctgcgcgtcatcgccgtccataacgacagcggttcgcctgcattctgccgcgtcatttggcgtaagcatattgccgaaatgaccgacctttcggcagcggaacgcggcgaattgatggaaatggtgtacaaagtcgaagccgctatgcgccaagtgtttcaacctgccaagattaacctcgccagcttgggcaatgtcgtgccgcacctgcattggcatattatcgcccgctttgaaaacgatgcgtccttccctgcgccgatttgggcaaaccccgtccgaaaacacggtatgaccctgccgcaagattggacggaacagcttaaaaagctgctttaa

SEQ ID NO: 38322 - DNA, 492 bp, Neisseria meningitidis
atgaaataccgtcgtttttaccgcaatggcggcacttacttttttacggttgtaaccaataaacggcagaagattttgaccgatgatgcggtgcgtttggctttgcggcaggcggtaatggcggtgcgcgaacggtatccgtttgaaattttggcatgggtgttgatgcccgaccatctgcataccatatggcggctgccggacaatgattctgcttattcggaacgctggcggcaaatcaagcggcacagccaatatttaatcggcggcaatctcaggctttggcaaaaacgcttttgggaatatactatccgcgatgaggccgattttgcctggcattttgattatctgcatttcaatccggtcaaacatggctatgtaggacaaatttccgattggcggttttctacgtttcaccgttatgtcaaacagggtatttatccgcataattggggtggcggcaatgcggacttttctattggatacgattga

SEQ ID NO: 38323 - DNA, 696 bp, Neisseria meningitidis
atgaaagcgatgatactggcggcaggacgaggcgagcgtatgcgtcctttgaccgataccactccgaagccgctgctcgatgtggcgggtaagcctctaatcggttggcacctatgccgtctgaagcaggcagggtttaccgaaatcgtcatcaaccacgcttggctgggccggcagatagaagatgttttgggcgacggctcggcttatggcgtgaacatcgcctattcgcccgaacccgcaggcggtttggaaacggcgggcggtatcgcgcaggcattgccgctgttgggtgggcagccgtttttggtggtcaacggcgacgtgctgaccgacatcgattttaccgccgcgtttcagacggcatcgtccctgccagaacatatttccgcccatctgtggctggtggaaaatccgccgcacaaccccgacggcgatttttccctgctgcccgacggcagcgtgcggccggaagtaaatggcggcaacggattgacattcagcggcgtgggtatttaccgtcctgaaatgtttgacggaatcgaagcgggcagtgtggcgaaactcgcgcccgtattgcgtggcgaaatgcggcaaaaccgcgtgagcggtcagaagcatacgggcttgtggctggatgtcggcacggtatgccgtctgaaagaggctcaagcccttgcaggggcttggaagtga

SEQ ID NO: 38324 - DNA, 384 bp, Neisseria meningitidis
atggaaccttcctcctacgcggcagaaaaaaaaggcaaaggcggcatcaggcgcgtcattaacgcattcggctattcgatagacggcatcgccgccgcctaccgttacgaagcggcattccgtcaggttttgtggctgaacgtactgctggtgtgcgcggcatttttttgggtttccgaaaccgccgtccgcctgccgttgattatcgcgtcttttgtgtcggtcattgtcgaactgttcaacaccgccgtcgaagctgccgtcgatcatacttcgaccgaaaaacacgagctggccaaacgcgccaaagacgcaggttctgccgcacaattgttcgcgatgctgatgttggcggcggtttggctgtctgccctgttcgggtaa

SEQ ID NO: 38325 - DNA, 147 bp, Neisseria meningitidis
atgatttacggctcaatgccgtctgaaaagctcacaatttttcagacggcatttgttatgcaagtaaatattcagattccctatatactgcccagatgcgtgcgtgctgaagacaccccctatgcttgctgcagaactttcgggtaa

SEQ ID NO: 38326 - DNA, 1422 bp, Neisseria meningitidis
atgaccaccatctacaacacccttacccgccaaaaagaaccctttgcccccatcgaccctgaaaacgtgcgtatgtacgtttgcggcatgactgtttacgattattgccacttaggccatgcccgtgtgatggttgtgttcgacatgattgcccgttggttgcgtgagtgcggctatccgctcacttatgtacgcaacatcaccgacatcgacgataaaatcattgcccgtgcggctgaaaacggcgagaccatcggcgagctgactgcgcgtttcattcaggctatgcacgaagatgccgatgctttgggtgtgttgcgtcccgatatcgagccgaaggcgacggaaaacattccgcaaatgattgccatgattgaaaccctgattcaaaacggcaaggcatatcctgccgcaaatggcgacgtttactacgccgtgcgtgagtttgccgcttacggacaactgtcgggcaaatcgttggacgacctgcgcgcgggcgaacgcgtggaagtggacggtttcaaacgcgatccgcttgattttgtattgtggaaagcggcgaaagcaggcgaaccggcgtgggaaagcccgtggggcaacggccgtccgggttggcacattgaatgctctgccatgagtgaaaacctgttcggcgataccttcgacatccacggcggcggcgcggatttgcaattcccgcatcatgaaaacgaaatcgcccaaagcgtcggtgccagcggtcatacctgcggccacgaccacgcacaaacccaccacggtcaaagcattgccagccacgtcaaatattggctgcacaacggctttatccgcgtggacggcgaaaaaatgtccaaatcgttgggcaacttcttcactatccgcgaagtgttgaaacaatacgaccccgaagtcgtgcgcttcttcatcctgcgcgcccactaccgcagcccgttgaactattccgacgcgcatttggacgacgcaaaaggcgcgttgacccgtctatacaccaccttgaaaaatacgccacccgccgatccgatgccgtctgaagccgacgatgactacacgcgccgcttttatgttgcgatgaatgatgattttgatacggtgaaagcggtggcggtgttgttcgaacttgccggcgaagtgaacaaaaccaatgacgcgcaactggcaggctgcctgaaagccttgggcggcatcatcggactgctgcaacgcgacccgaccgagttcctgcaaggcggcgcggcttcagacggcctctccaacgaagaaatcgaagacttgattgcccggcggaaacaggcgcgctccgataaaaactgggcggaatccgaccgcattcgcgaccttctgaacgaacacaaaatcattttggaagacaacgccggcggcacgacttggcggcgcggttga

SEQ ID NO: 38327 - DNA, 1620 bp, Neisseria meningitidis
atggacaatctcgtatgggacggcgttcccgacatccgcacactcgaccaaaccatccgcaaacacgcacacccgctcaacctgattgtctgcctccccgataatcagattcccgattttcaaaccgcacaagatgcttcggacgcggaatgccgtctgaagcaccgtttggatcaggcaacgcagtgcctccagttcgacagcatcaacctcatcgaacacatcctgcacgatgtccgcttctggctggttcccccttcacgcacccgccgcctgcacgaacacttccaccacatttcctggcagaccgaagccatcccgcaaaccgaaagtaagcccgacaaaccctggtttgcacttccacaaacatccgaacggcaaaaaccggaacacatcctcgttatcggagcgggcatatccggcgcggcaaccgcccacgccttagcatcatacggcatttccgttaccgtattggaagcccgaaaagccgcccaagccgccagcggcaaccgccaagggctgctctacgccaaaatctcgccgcacgacaccgaacaaaccgaactgctgcttgccggctacggctacaccaaacgcctgctcggacacatcctgcccgaatccgaaacctggggcggcaacggcatcatccacctcaattacagccgcaccgaacaacaacgcaatcacgaattgggtttgcaaaaacaccataaccacctctaccgcagcatcacgcaggcagaagccgaaaaaatcgccggtatcccactgtccgtcccatacgaccacccttcatgcggactctactggcaacacggcgtatggctcaatccacccgcattcgtccgcaccctcctcaaccatccgctcattggactacacgaagacacaccgttaaccgacatttcccacgacggggaaaagtggattgcaagcacgccaaacggcatattttccgccacacacatcatctactgcaccggcgcgcacagcccccgcctgcccgaaaccaacctcgccgccctgcctctcaggcaaatacgcggacaaaccggcctcacaccgtccaccccgttttccgaacaactgcgttgcgccgtttcaggcgaaagctacatcagcccgtcgtggcacggactgcactgctacggcgcgagttttattcccaacagcagccataccggatggaacgaagccgaagaagcctcaaaccgccaagcattggcacaccttaaccccgccctttccgaatcattgtttgccgccaacccaaacccccaaaaacaccaagggcacgccgccatacgctgcgacagccccgaccaccttcccctagtcggcgcactcggcgacattgccgctatgcaacaaacttacgccaaactcgcgctggacaaaaactatcgcatcgatgccccatgcccatatctgcctaatgcctacgccaacaccgcccacggcacacgcgggcttgccaccgcccccatctgcgccgccgccgttgcagcccaaatcctaggcttgccccatcccttttcacaacgcctgcgccacgccctacaccccaaccgcaccatcatccgcgccatcgtcagaaggaaggatctaaccccttaa

SEQ ID NO: 38328 - DNA, 1587 bp, Neisseria meningitidis
atggcacttttcctcagcatattccccatcgtcctgctgatttggctgatggtgaaaaaaaacagtatgccctcctacgtcgcgctgccgattaccgcagtgctgatttacgccatcaaacttttctacttcgacgatgcgggcatgctgctcaacgccaccgccgcttccggcctcgtcaaaacgctcacgccgattaccgtgattttcggcgcgattatgttcaaccgtatgatggaaaccacgggctgcatcgatgtcatccgcaaatggctggcgaccatcagcccgaaccccgtagcgcaactgatgattatcggctgggcttttgcctttatgattgaaggcgcatccggcttcggtacgcctgccgcgattgccgcgccgattctgatgagcttgggcttcaacccgttgaaagtggcgattttcactttggtgatgaactccgtccccgtctctttcggcgcggtcggtacgccgacctggttcggtttcgcaccgctgaacctgagtgccgaagacatcctcgccatcggcaggcagaccggcgtaatgcacttcttcgcaggtttcgtcatccccgtcatcggcttgggcttcatcgtaccttggtctgaaatccgcaaaaacttgggcttcgtcgccattgccgtcttctcctgcaccattccttatgtcgcattggcgatggtcaacgaagaattcccgtcgctcgtcgccggcgcgatcggcctgatggtgtccgtattcgccgccaaccaaggctggggcttgagcaaagaccacgccaaagacccgaatgccgaaaaagtgccgttcgcccaagtcgccaaagcactcgcccctttgggtatgctgatcggcatgctggtggttacgcgcatcaaacagctcggcatcaaaggcattttgaccagcaaagaagaatggttcagcttccaactgccgtttgatttgtccaaaatcaccgtcagcgactccctgacgattaccttcggcaatattttcggacaagatgtcagcgcgtcttaccaaacgctgtacgtcccggcttggattccgtttgtgctgaccgtttggatttgcatcctgctgtataaaaccaaattcaaagatgcctggacgatttattccgtaaccttcaatcaaaccaaaaaaccgctgcttgccctgatgggcgcgctgattatggttcagctgatgctggtcggcggcgacaattcgatggtgaaaatcatcggtaaggaatttgccgcaatggcgggcgaacactgggtttatttctcgccgtatctgggcgcgatcggtgcgttcttctccggctccaacaccgtgtccaacctgaccttcggcccgattcagcagcaaatcgccttggataccggcctgtccgttaccctgattctggcgttgcagtccgtcggcggcgcgatgggcaatatggtgtgcctcaacaacatcatcgccgtatgtaccgtattggatgtgaaaaattccgaaggtgcgattatcaagaaaaccgttatcccgatggcgatttacggcgtgattgccgtcgtcgcggcaatgattttcttcctctag

SEQ ID NO: 38329 - DNA, 219 bp, Neisseria meningitidis
  misc_feature 6, 7, 8, 9, 10: 'n' is a, c, g or t
gtgtgnnnnngtttggttgtccgcctgaaaccttccaacgaccaacgccgcgtttttctgaagctgactgccgagggcgagaagctgtatgaggaaatcggcgaagaagtggacgagcgttacgacgctatcgaggaagtgctgggccgcgagaaaatgctgctgcttaaagacctgttggcagaacttgccaaaatcgaggatgcgttgaactcgtaa

SEQ ID NO: 38330 - DNA, 366 bp, Neisseria meningitidis; identical to SEQ ID NO: 37248

SEQ ID NO: 38331 - DNA, 903 bp, Neisseria meningitidis
atggacagcctgatgacgttgctttcggtattgataccgatgtttgccggattttttatccgtgtgcccaagccttacctgcccgctttggataaggtgctatcggtcttggtgtatgctgtgctgctgctgatcggcgtctcgttgtcgcgcgtggaggatttgggttcgcggttggacgatatggcgttgacggttctgtggctgtttgtttgtacggtcggggcgaacctgcttgctttggcagtgttgggaaagttattcccgtggcggataaaggggaaagggaagggcgtttcggtcggtgtgtcgggcagtgtggggcagctcggatgcgtgctgctcggatttgcatccggcaaactgatgcgcgatatttggatgccgtctgaaaacgcgggtatgtattgtctgatgctgctggtgctcctcatcggcgtacagctcaaaagcagcggcgtatcgttgcggcaggttttggtcaaccgcaggggtattcggttgtcggtctggtttatgctttcatctctttcaggcgggctgctgtttgccgcatcggcagacggtgtgtcgtgggtgaaaggtttggcgatggcttccggcttcggttggtattccctctcgggtttggtgatgaccgaggcttacggcgcggtatggggcagtatcgcgcttttgaacgatttggcacgagagctgttcgcgctggcatttattccgctgctgatgaagcgttttcccgatgcggcagtgggggtcggcggcgcgaccagtatggatttcacattgcccgtgattcggggtgcgggcggcttggaagccgtaccggtagcggtcagcttcggcgtggtggtcaatatcgccgctccgtttctgatggtggtgttttccgctttgggctga

SEQ ID NO: 38332 - DNA, 984 bp, Neisseria meningitidis
atgagtgaaatcaaaaccgacgaccccaaacgcggcatcaaactcagaggcgcggacaaaaccgcccgcatccccatcaaagtcgtcccccttcaggaaaaattaaaaaagcccgaatggatacgcgccaaacttccatcgcgcaaattctttgaaatcaaagacattttgcgcgaacaaaaaatgcacaccgtttgcgaggaagcctcctgccccaacatcggcgaatgcttcagcaaaggcacggcgaccttcatgattatgggcgacatctgcacccgccgctgcccgttctgcgacgtgggacacggccgcccgaatatgctcgaccccgacgaaccgaaaaacctcgccgaatccgtcaaagccatgaacctgcgttacgtcgtcatcacctccgtcgaccgcgacgacctgcgcgacggcggcgcacagcatttcgccgactgcatcaaagccatccgcgaaaccagcccgaacaccaaaatcgaaatcctcgtccccgacttccgaggacgcttggacatcgcactcaaaatccttgccgaaaccccgcccgacgtgatgaaccacaacctagaaacccatccgagcctgtacagaaaagcccgtcccggtgccaattatcaacattctttagacttattaaaacgttataaagaaatgatgccgcacatcccgaccaaatccggcatcatggtcggcttgggcgaaacagacgaagacgtgcgtgaaattatgcgcgatatgcgggcgcacaatatcgaaatgattaccatcggacagtacctccagccttcagacggacacctgcccgtcctgcgctacgttacgcccgagcagttcaaaatctttgaaaaagaagcatacgaactgggcttcagcaatgccgccatcggcgcgatggtacgttccagctaccacgccgacgaacaggctgccgaagccttacgcgaaagccacggcggttgcgggcatcattaa

SEQ ID NO: 38333 - DNA, 2391 bp, Neisseria meningitidis
atgactgaacaaaaacacgaagaatacggcgccgacagcattcaggtgctcgaaggcttggaagcggtacgcaaacgccccggtatgtacatcggcgacacgcaggacggcagcggcctgcaccacatggtgttcgaagtattggacaacgccattgacgaagcactcgccggacattgcgacaaaatcacggtaacgatacacgccgaccattccgtcagcgtcgccgacaacgggcgcggtatgcccaccggcatccacccgaaagaaggacgctccgccgccgaagtcatcatgaccgtattgcacgcgggcggtaaattcgacaacaacagctacaaaatctccggcggcctgcacggcgtgggcgtatccgtcgtcaacgcgctgtccgactgggtaacgctgaccatctaccgcgacggcaaagaacacttcgtccgcttcgtacgcggcgaaaccgaagagccgttgaaggttgtcggcgattccgacaaaaaaggcacgaccgtacgcttcctcgccagcgcggaaaccttcggcaacgtcgaatacagcttcgacatccttgccaaacgtatccgcgaactttccttcctgaacaacggcgtggacatcgaattgaccgacgaacgcgacggcaaacacgaaagcttcgccctttccggcggcgtggccggcttcgtgcaatacatgaaccgcaaaaaaacaccgctgcacgaaaaaatcttctacgcgttcggcgagaaagacggcatgagcgtcgaatgcgcgatgcaatggaacgacagctaccaagaaagcgtgcaatgtttcaccaacaacattccgcaacgcgacggcggtacgcacttgaccgcgctgcgccaagtgatgacccgcaccatcaacaactatatcgaagccaacgaagtggccaaaaaagccaaagtggaaaccgccggcgacgatatgcgtgaaggtttaacctgcgtgttgtccgtcaaactgcccgatccgaaattctcgtcccaaaccaaagacaaactggtttccggcgaaatcggccccgtcgtcaacgaagtcatcagccaagccctgaccgacttcctcgaagaaaacccgactgaagccaaaatcatcaccggcaaaatcgtcgatgccgcccgcgcgcgcgaagccgcccgcaaagcccgcgaaatcacccgccgcaaaggcgtgatggacggcttggggctgcccggcaaactcgccgactgccaagaaaaagaccctgccctgtccgaactctacctcgtcgagggcgactccgcaggcggttccgccatgcaaggccgcgaccgcaaattccaagcgattttgccgctcaaaggtaaaattttgaacgtcgaaaaagcacgttttgaaaaaatgctggccagccaagaagtcgccacgctgattaccgctttgggcgcgggcatcggcaaagaagaattcaatgccgaaaaactgcgttaccaccgcatcatcatcatgaccgatgccgacgtggacggcgcgcacatccgcaccctgctcctgaccttcttctaccgccaaatgcccgagctggtcgaacgcggctacatctacattgcccagccgcctttatacaaagccaaatacggcaaacaagaacgatatctcaaagacgaattggaaaaagaccaatggctgctcggtttagccttggaaaaagccaaaatcgtttcagacagccgcaccatcgaaggcgaagagcttgccaataccgccaaacaattcctgttggccaaaaccgtcatcgagcaagaaagccgcatcattgacgaactcgtcctgcatgccatgctacatgcttcgccggtcgatctcagcacagcagaaagcgcagaccgctccgttgccgaattgagcggcctcttggacgaaaaagaagtcgcgctcgaacgtatcgaaggccacgaaggacaccagttcatcaaaatcacacgcaagctgcacggcaatgtggtggtgagctacctcgagcctaagttcctcaacagcaaagcctatcaaacccttacccaaaccgccgccgcacttaaaggcatggtcggcaaaggggcgaagctctacaaaggcgacaacgaatacgacatcgacagctttgaaggcgctttggacatcttgatgagcgttgcccaaaaaggcatgtccatccaacgatacaaaggcttgggcgagatgaatccggaacaactttgggaaaccacgatggatcctaccgtccgccgtctcctgaaagtccgcattgaagacgctatcgccgccgacgaagtgttcgtcaccctgatgggcgacgaagtcgagccgcgccgtgcctttatcgaaaacaacgcgctgattgcccaaaatatcgacgcataa

SEQ ID NO: 38334 - DNA, 402 bp, Neisseria meningitidis
atgaacacaacccgactgccgaccgccctcgtcttgggctgcctctgcgccgccgcttctgccgccgacaacagcatcatgacaaaagggcaaaaagtgtacgaatccaactgcgtcgcctgccacggcaaaaagggcgaaggccgcggaaccatgtttccgccgctctaccgctccgacttcatcatgaaaaaaccgcaggtgctgctgcacagcatggtcaaaggcatcaacggtacaatcaaagtcaacggcaaaacctacaacggattcatgcccgcaaccgccatcagcgatgcggacattgccgccgtcgccacttatatcatgaacgcctttgacaacggcggcggaagcgttaccgaaaaagacgtaaaacaggcaaaaggcaaaaaaaactaa

SEQ ID NO: 38335 - DNA, 1080 bp, Neisseria meningitidis
atgaaaacactgaccgtacacaccccgtcccacagctaccccatctttatcggcaacggactgctgccgcaggcaggaagcctgctcaaaccgcatttgggcaaacgcgccgccatcatcgccaacgaaaccgtcgccccgctctacctcggcacgcttcagacggcattggatgcggcaggcgtatcccatttcagcatcatcctgcccgacggcgaggcgcacaaaaactggcagacgctcaacctcatctttgacgggctgatgcaaaaccgcgccgaacgcaaaaccacattaatcgcactgggcggcggcgtgatcggcgacatggtcggctttgccgctgccacctaccagcgcggcgcaccgttcgttcaaataccgaccacgctgttgagtcaggtcgactcatcggtgggcggcaaaaccgccatcaaccacccgctcggcaaaaatatgattggcgcgttttaccagccgcaggcggtgcttgccgacttggacacgctgcacaccctgcccgcccgcgaattgtccgccggtatggcggaagtcatcaaatacggcgcgctcggcgacatcggcttttttgaatggctggaacagcatatgcccgaactgatgacgctcgatcgggaaaaactcgcccaagccgtgtaccgctgctgccaaatgaaggcagacatcgtcgcccaagacgaaaccgaacagggcatacgcgcatggctcaacctcggacacaccttcggacacgccattgaaaccgagatgggttacggcacttggctgcatggagaagccatcgccgccggctgcgtgttggcggcgcgtttgtccgaacaactgggcaaaacctccgccgcagataccgcgcggctcgccgccctgctcgaagccgctggactgccgtccgcgccacccgtgtttgcctttgaaaaatggctggaacacatgagccacgataaaaaagtcagcggcggcatcatgcgctttatcggtctgaaccggctgggcgaagccaacatcaccgaaattaccgacacggacatcctccgccgcaccctgcaaccgtatctctga

SEQ ID NO: 38336 - DNA, 1662 bp, Neisseria meningitidis
atgacagaatccatcacccgcgacagtatgcaatacgatgtcgtgattgtcggcgcaggcccatcgggtttgtccgccgccatcaaactcaagcagcttgccgaacaaaatgggcgcgaaatcagcgtttgcgtggtggagaaaggttcggaggcgggtgcacattcgctggcgggcgcggttatcgatccgattgcgctgaatgagttgattcccgactggaaagaaaaaggcgcgccgctgacgcgtacggtaacgcaggacaaagtgttgttcctgactgagaaaaaagcgttcaatctgcctattaccccaaatttcgacaatcacggcaactacatcgtcagcttgggcgaagtcgtgcgctggttggcggagcaggcggaaaatttgggcgtggaaatttatccgggctttgccgctgccgaagtgctgtatcacaaagacggttcggtcaaaggcattgcaaccggcaatatgggcgtgggcaaaaacggcgagccgaccgattcattccagcccggcatggagctttgggcacggcaaaccctgtttgccgagggctgccgaggttcgctttccaaacaaatcatcgaacgcttcaaactcgaccaaaacagccagccgcaaacttacggcttgggcattaaagaagtttgggaagtgccgtccgaacagcatcagcccggtttggtggtgcacagcgcaggctggccgctggacagcaaaacctacggcggcgcgtttgtttaccatttcgacgacaacaaagttgccgtcggcttcgtggtcggtttggactatcaaaatccttatctgtcgccgtttgaagagttccaacgtttcaaaacccatcccgaaatccgcaaaacctttgaaggcggccgccgcattgcttacggtgcgcgttcgctgattgaaggcggttttcaaagtttgccgaagctctcgttcaaaggcggcgttttggtcggcgatgcggcgggtttcctcaatatgccgcgcatcaaaggcattcataccgcgatgaaatccgccatgctcgccgccgaagccgtgttccccttgttggaaaaccttgaagaagtggaaaacttcgacagcggcaaagaggcggcggattatcagcaacgttttgaacaaagctggctgtatcaagagctttacgccgcgcgcaatgtccgtccgtcattcaaatggggcgtttacctcggctcaatctacaccggcatcgatcagatgattttcagaggcaaagccccgtggaccttgaaacatcacggcaaagacaacgagcagcttaaaaaagccgccgcgtgcaagccgattgcttatccgaaacccgatggcgtgttgaccttcgaccgcttgagcagcgtcttccttgccaatctcgcgcacgaagaaaaccagcccgaccatttggtgctgaacaatccgcaaacgatgataaacgtgaactacaaagaatacgcctcgcccgaaacgcgctattgtccggcgggtgtgtacgaaattattgaagaaaacggcaatccgcgcctgcaaatcaacgcggcaaactgcgtgcactgcaaaacctgcgacatcaaagacccgacgcaaaacatcacttggatttgccccgaaggcgcgagcgggccgaattacggcgggatgtaa

SEQ ID NO: 38337 - DNA, 1044 bp, Neisseria meningitidis
atgcagattaccgacttactcgccttcggcgctaaaaacaaagcatccgaccttcacctgagttcgggcatatcccctatgattcgggttcacggcgatatgcggcgcatcaaccttcccgaaatgagcgcggaagaggtcggtaatatggtaacttcggtgatgaacgaccaccagcggaaaatctaccagcaaaacttggaagtcgacttctcgttcgaactgcccaacgtcgcccgattccgcgtcaacgccttcaacatcggccgcggtcccgccgccgtattccgcaccattcccagcaccgtcttatcgctggaagaattgaaagccccgagcattttccaaaaaatcgcagaatcgccgcgcggcatggttttggttaccggccctaccggttcgggcaaatcgaccacgcttgccgcaatgatcaactacatcaacgaaacccagccggcacacatcctgaccatcgaagacccgatcgaattcgtccaccaaagcaaaaaatccctgattaaccagcgcgagctgcaccagcacaccctcagcttcgccaacgcgctgcgttccgcattgcgcgaagaccccgacgttatccttgtcggcgagatgcgcgacccagaaaccatcggcttggcgctgaccgccgccgaaaccggacacttggttttcggcacgctgcacacgaccggcgcagcaaaaaccgtcgaccgtatcgtggacgtattcccagcgggagaaaaagaaatggtgcgctctatgctgtccgaatcgctgaccgccgtcatctcccaaaacctgctgaaaacgcacgacggcaacggccgtgtcgcctcgcacgaaatcctgattgccaaccccgccgtccgcaacctcatccgcgaaaacaaaatcacgcagattaactccgtcctacaaaccgggcaggcgagcggtatgcagacaatggaccaatcgctgcaatcgctggtgcgccaagggctgatcgcaccggaagtcgcacgcagacgcgcgcaaaacagcgaaagtatgagtttctga

SEQ ID NO: 38338 - DNA, 399 bp, Neisseria meningitidis
atgtccgattgctgcaaccgtatccaaccggttttgctttctgttttgcgtatcgtaaccgcctacctgtttttgttgcacggtacgtcgaaaatcttcgccttccccattgaaatgggcagcggttcgcccggcgggctgttgctgcttgccggtattttagaaattgtcggcggcattttgctggtgttgggcctgtttgcgcgccctgccgcgtttgttttgtccggtcagatggcggttgcctattttatggcgcacgcttccggaaatgctttgttcccgattgccaacggcggcgagtccgcagtgctgttctgcttcgtattcctctatatcgcggcagcgggcggcggagcatggtcgctggacaggctgtttttcaagcgtaaagcctga

SEQ ID NO: 38339 - DNA, 552 bp, Neisseria meningitidis
gtgaactattgcgaatttgccgcctcacttcccgaaaacaccgataacccgaacaaacattaccacgacacgcaatacggttttccgattgacagcgacaacggactgtttgaacggctggtgttggaaatcaatcaggcaggattaaactggacgctgatgctgaagaagcagcaggcatttcagacggcatttgaaggtttcgacatcgatacggttgccgccttcgacgacaccgaccgcgaacgcctgcttgccgacgcgggcattgtccgcaaccgcctgaaaatcgatgccgccattttcaatgcacggcaaatccaagcgttgcaacaagaatacggctcgttcaagaactggctcgacacgcaccatccgcgaagcaaagacgaatgggttaaactctttaaaaaacatttcaaattcgtcggcggcgaaatcgtcggcgaatttctgatgagtaccggctacctcaaaggcgcgcacgccgaaagctgtccggtttaccgtgaaaccctgaaataccacccgaaatggctcgatgccatctga

SEQ ID NO: 38340 - DNA, 1914 bp, Neisseria meningitidis
atgaacccaagccccctactcgacctgattgacagcccgcaagatttgcgccgtctggacaaaaaacagctgccgcgccttgccggcgagttgcgcgcctttctgctggaatccgtcggtcaaaccggcggtcatttcgccagcaacttaggtgcggtcgagctgaccatcgccctgcactatgtgtacaacacgcccgaagacaagctggtgtgggatgtcggacaccaaagctatccgcacaaaatccttaccggacgcaaaaaccagatgcacaccatgcgccaatacggcggtttggcgggttttccgaaacgttgcgagtccgagtacgacgcgttcggcgtggggcattcctccacctccatcggcgcggcgttgggcatggcggcggcagacaaactcttgggcagcgaccgccgcagcgtcgccatcatcggcgacggcgcgatgacggcggggcaggcgtttgaagccttgaattgcgcaggcgatatggatgtggatttgctggtcgtcctcaacgacaacgaaatgtcgatttcccccaacgtcggcgcgctgccgaaataccttgccagcaacgtcgtgcgcgatatgcacggcctgttgagtaccgtcaaagcgcaaacgggcaaggtattagacaaaatacccggcgcgatggagtttgcccaaaaagtcgaacacaaaatcaaaacccttgccgaagaagccgaacacgccaaacagtcactgtctttgtttgaaaacttcggcttccgctataccggccccgtggacggacacaacgtcgaaaatctggtcgatgtattggaagacctgcgcggacgcaaaggcccgcagcttctgcacgtcatcaccaaaaagggcaacggctacaaactcgccgaaaacgatcccgtcaaataccacgccgtcgccaacctgcctaaagaaagcgcggcgcaaatgccgtctgaaaaagaacccaagcccgccgccaaaccgacctatacccaagtgttcggcaaatggctgtgcgaccgggcggcggcagattcccgactggttgcgattacccccgccatgcgcgagggcagcggcttggttgagtttgaacaacgattccccgaccgctatttcgatgtcggtattgccgagcagcacgccgttacctttgccggcggtttggcttgcgaagggatgaagcccgtcgtggcgatttattccacctttttacaacgcgcctacgaccaactggtgcacgacatcgccctgcaaaacctacccgttttgtttgccgtcgaccgcgcgggcatcgtcggcgcggacggcccgacccatgccggtctgtacgatttgagctttttgcgctgcgtgccgaacatgattgtcgccgcgccgagcgatgaaaacgaatgccgcctgctgctttcgacctgctatcaggcagacgcgcccgccgccgtccgctatccgcgcggcacgggtacgggcgtgccggtttcagacggcatggaaaccgtggaaatcggcaagggcattatccgccgcgaaggtgggaaaaccgcattcattgccttcggcagtatggtcgcccccgcattggcggtcgccggaaaactgaacgccaccgtcgccgatatgcgctttgtcaaaccgatagacgaagagttgattgtccgccttgcccgaagccacgaccgcatcgttacccttgaagaaaacgccgaacagggcggcgcaggcggcgcggtgctggaagtattggcgaaacacggcatctgcaaacccgttttgcttttgggcgttgccgataccgtaaccggacacggcgatccgaaaaaacttttgaacgatttgggtttgagtgccgaagcggtggaacggcgtgtgcgcgcgtggctgtcggatcgggatgcggcaaattaa

SEQ ID NO: 38341 - DNA, 570 bp, Neisseria meningitidis
atggtacggcgtttgataatcggcatcagtggggcgagcggtttccaatacggcgtgaaggctttggaacttttacgcgcgcaagatatcgaaacgcaccttgtggtatcgaaaggtgcggagatggcgcgcgcttcggaaacggcttatgcgagagatgaggtatatgccttggcggacttcgtgcatccgatcggcaatatcggggcgtgcattgccagcggtacgtttaaaacggacgggatgctggtcgccccctgttcgatgcggacgcttgcctcggtcgcgcacggcttcggcgacaacctcttgacgcgtgcggcggatgtggttttgaaggaaaggcggcggctggtgctgatggtgcgcgaaacgccgctgaaccttgcccatttggacaatatgaagcgggtaacggaaatgggcggcgtggtgtttccccctgttcctgcgatgtaccgcaaaccgcagacggcggacgacatagtggcgcacagtgttgcacacgctttgtcgctgttcggaatcgatacgccggattcggcggaatggcagggaatggcggattaa

SEQ ID NO: 38342 - DNA, 4416 bp, Neisseria meningitidis
atgtattcgaataatgctataactaataatagaaacaatattacactaggtgcgtatagggatgctattattttcatattttctgatgaaaatgtggttagggcgattggtacgattaactcaatgtacgaagaatatttgacccgttcgcacaagatagatcaaaaagaatttttaagggagggtgagcgtctgtctgctaaggcaagagaattccaacgcacagcagaagaggcacaaaaaagcttaaaagaaggaattggaagagctgctagtaaatttcgtggtaattcaaaggaggcatttgttgcaagaaaagtacaaagtgatttgcaaaaagcattgaatgctagcaactataacaagcagcaatatgcaagacgtgcggcaacagcgttagagaatgcttcaaaatcaaaagttatggcagcgaatttgggtaagtttacttatggggcaactgttgccatgggaactttgagtatgggaagtgcttggtggaaagccttggatggagaaggaaattggagtgatgttggtctctcatcagcttcttttttgggtgggctaatgggcgtccaatggggtgcggctttgggtgttggggcttttggtttacttactggtggcgcaggttggctagtagttggagctatacttggaggtggcgcaggagcttggtggggatcattaggagctgaaaaagcttggagatggtttgaggatttcttaaatcttaaccgcagcgacaaataccacgtttacgaccccctcgccctggatttggacggtgacggtatagaaaccgttgccaccaaaggctttgcaggtgcattgttcgaccaccgcaatcaaggcatccgcaccgccaccggttgggtttctgccgatgacggtctgcttgtgcgcgatttgaacggcaacggcatcatcgacaacggtgcggaactcttcggcgacaacaccaaactggcagacggttcttttgccaaacacggctacgcggctttggccgaattggattcaaacggcgacaacatcatcaacgcggcagacgccgcattccaatccctgcgtgtatggcaggatctcaatcaggacggcatttcccaagctaatgaattgcgtacccttgaagaattgggtatccaatctttggatctcgcctataaagatgtaaataaaaatctcggtaacggtaacactttggctcagcaaggcagctataccaaaacagacggtacaaccgcaaaaatgggggatttacttttagcagccgacaatctgcacagccgcttcaaagacaaagtggaactcactgccgaacaggcaaaagccgccaatcttgcgggcattggtcgtctgcgcgatttgcgcgaagctgccgcattgtccggcgatttggccaatatgctgaaagcttattctgccgccgaaactaaagaagcacagttggcattgttagataatttgattcacaaatgggcggaaaccgattcgaactggggcaaaaaatcgccaatgcgactttcaaccgattggacgcaaacggctaatgaaggtattgcactgacaccatcccaagtagcacaactaaaaaagaacgctttagtttccctttctgataaagctaaagcagctattgacgccgcccgcgaccgcattgccgtgcttgatgcctacacggggcaggattccagcacgctctattacatgagcgaggaagatgcgcttaatatcgtcaaagtaaccaacgatacatacgaccatctcgccaaaaacatctaccaaaacctgttgttccaaacccgtttgcagccatatttgaatcaaatcagtttcaaaatggaaaatgatacgttcactttggattttagtggtcttgttcaagcatttaaccatgtcaaagaaactaatccgcaaaaagcttttgtggatttggccgagatgcttgcatatggcgaacttcgttcttggtatgaaggccgaagactaatggccgattatgtggaggaggcaaaaaaagcaggtaaatttgaagattaccagaaagtgttgggtcaggagaccgttgcattattagctaaaacatcgggtacgcaagcagatgatatcctgcaaaatgtaggctttggtcataataaaaatgtttctttatatggtaatgacggcaacgacactctaatcggcggtgccggtaatgattacttggagggcggcagcggttcggatacttatgtcttcggcaaaggcttcggtcaggatacggtctataattacgactacgctaccggacgcaaagacatcatccgctttaccgacggtattacagccgatatgctgacttttacccgagagggcaaccatcttcttatcaaggcaaaagacggcagtggacaagtgactgttcagtcctatttccagaacgatggctcaggtgcttaccgtatcgatgagattcatttcgataacggcaaagtactggatgttgccactgtcaaaaaactggtacagcaatccaccgacggttcggacagattgtatgcctaccaatccggaaataccttaaatggcggattgggcgatgactatctgtacggtgccgacggggatgacctgctgaatggtgatgcaggcaacgacagtatctacagtggcaatggcaatgatacgctcgatggaggagaaggcaacgacgccctgtacggctataatggtaacgatgtactgaatggtgccgaaggcaatgatcatttgaacggcgaagacggtaacgacactctaatcggcggtgcaggcaatgattacttggagggcggcagcggttcggatacttatgtcttcggcaaaggcttcggtcaggatacggtctataattacgactacgctaccggacgcaaagacatcatccgctttaccgacggtattacagccgatatgctgacttttacccgagagggcaaccatcttcttatcaaggcaaaagacggcagtggacaagtgactgttcagtcctatttccagaacgatggctcaggtgcttaccgtatcgatgagattcatttcgataacggcaaagtactggatgttgccactgtcaaaaaactggtacagcaatccaccgacggttcggacagattgtatgcctaccaatccggaagtaccttaaatggcggattgggcgatgactatctgtacggtgccgacggggatgacctgctgaatggtgatgcaggcaacgacagtatctacagtggcaatggcaatgatacgctcgatggaggagaaggcaacgacgccctgtacggctataatggtaacgatgtactgaatggtggcgaaggcaatgatcatttgaacggcgaagacggtaacgacactctgatcggcggtgccggtaatgattacttggagggcggcagcggttcggatacttatgtcttcggcaaaggcttcggtcaggatacggtctataattacgactacgctaccggacgcaaagacatcatccgctttaccgacggtattacagccgatatgctgacttttacccgagagggcaaccatcttcttatcaaggcaaaagacggcagtggacaagtgactgttcagtcctatttccagaacgatggctcaggtgcttaccgtatcgatgagattcatttcgataacggcaaagtactggatgttgccactgtcaaaaaactggtacagcaatccaccgacggttcggacagattgtatgcctaccaatccggaagtaccttaaatggcggattgggcgatgactatctgtacggtgccgacggggatgacctgctgaatggtgatgcaggcaacgacagtatctacagtggcaatggcaatgatacgctcgatggaggagaaggcaacgacgccctgtacggctataatggtaacgatgtactgaatggtggcgaaggcaatgatcatttgaacggcgaagacggtaacgacactctaatcggcggtgccggtaatgattacttggagggcggcagcggttcggatacttatgtcttcggcgaaggcttcggtcaggatacggtctataattaccatgtggataaaaactctgacactatgcactttaaaggatttaaagcagcagatgttcattttatccgttccggaagtgatttggtgcttagcgcttctgaacaagacaacgtacgtatttccggattcttctatggtgaaaaccatcgtgtagatacatttgtctttgatgatgcagctatcagtaatccagattttgccaagtatattaatgctggcaataatttggtacagtctatgtctgtgttcggttctaatactgctgcgacaggaggaaatgtggatgccaatatacaatccgtacagcagccgttattggtaacgccatctgcataa

SEQ ID NO: 38343 - DNA, 948 bp, Neisseria meningitidis
  misc_feature 6, 7, 8, 9, 10: 'n' is a, c, g or t
gtgtgnnnnnccgacaaggtttttttctgcaactcgggctcggaagcgaatgaggcggcgttgaagctggcgaggaaatacgcccgcgaccgtttcggcggaggaaaaagcgaaatcgtcgcctgtatcaacagttttcacggacgcacgctgtttaccgtgtccgtcggcggtcagccgaaatacagcaaggattatgcacccctgccgcaaggcattacgcacgttccgttcaacgatattgccgcgctggaagctgccgtcggcgaacagacctgcgcggtcatcatcgagccgatacagggcgaaagcggcatcctgcccgccactgcggaatatttgcaaaccgcgcgccgtctgtgcgaccggcacaatgcgttgttgattttggacgaagttcaaaccgggatggggcatacgggcaggctgtttgcctatgaacattacggcgttgttcccgatattttgagttcggcaaaagccttgggctgcggctttccgatcggcgcgatgctggcgacagaaacgattgccgccgccttccaaccgggcacgcatggctcgactttcggcggcaacccgatggcgtgtgcggtcggcagccgcgccttcgacatcatcaatacgcccgaaactttaaaccatgtccgtgaacaggggcagaaacttcagacggcattgctggatttgggcaggaaaacaggcttgttctcacaggttcgcggcatgggactgctgctcggctgcgtgttggacgaagcctatcgcggacgcgcatccgaaatcaccgccgccgccttgaaacacggcgtgatgattttggttgcgggtgcggacgtattgcgtttcgcgccttcgctgctgttgaacgatgaagatatggcggaaggtttgcggcgtttggaacacgcgctgacggaatttgccgcgacatcagacaatccgtaa

SEQ ID NO: 38344 - DNA, 1386 bp, Neisseria meningitidis
  misc_feature 6, 7, 8, 9, 10: 'n' is a, c, g or t
gtgtgnnnnnttctttgggactacctgctgatttacgcgcttttgggtatcggcctgttttttacgctgtatctcggtgcgccgcagattaccaagctgggtgcgggattcaaatctgtattcggcggcttgtttgccaaaggcgataaagacgataagtctttatcgcagtttcaggcgttggcggttgccatatccgcgcaaatcggtacgggcaacgtcgccggcgtggcgaccgccatcaccgcaggcgggccgggcgcgattttttggatgtgggtttctgccgttttggggatgtccacgatttttgcggaggcactgctggcgcagaaataccgcgtcgtcagccacggcaaatacatcggtgggccggcgttttatattacgcacggtctgactccgaaaatcggcaggggcgcggcgcgtttcctgtcgggctttttctccattgcgttgattatcgcattgggctttatcggtaatgcgacacaggcaaactccattgcttctgccgttaccattgcatttgatgtgccttctttggcagtcggtattgtgcttgccgtccttgcgggcatggttgtgattggcggcgtgaaccgtattgccaatattgcccagtttgtcgtgccgtttatggcggttgtttatattttgtgcgccgtcgttatcctgtttgaattttccgactatattgtgccgatgttcaaccacatctttaccgccgccttcaatcctgaagccgttttgggcggtgctgcgggtatcggtatgcgtgaagcgatacgtttcggcgtggcgcgcggtctgttttccaacgaagcaggtatgggttctaccccgcatgcacatgcaaccgctgatgtgaagcatcctgtgcagcaaggtatggcggcatttgtcggtgtgtttatcgatacgattttggtatgtacggctacggcattgattatcctgctgactgatgccaacctttcgggcgaacagggcgcggcggttactcaatttgcctttaacaaggcatttccgggcttcggttcgcaattgcttgccgtgtgtctgacctttttcgccttgacgaccattatcggctggtattatttcggtgagtccaacatccgttttcttttcaggggaagacacttgggcatctatcgcgcattggttctgcttgccatcgttttgggtacgctcggcaaagtcgatttggtttggagcctgtccgatatgttcaacggctttatggttatcccgaacttgatagccctgtttttgttgcgtaaggaaatccgtgccatttatgatgattatttggcacagaaaaaagcgggtcgggatttgtcctatcagtatgaatttcacgagttccacgacaagggctga

SEQ ID NO: 38345 - DNA, 651 bp, Neisseria meningitidis
atgatttcggttgaacatgtttccaagcagtatcaaatgcgcggcggtatgcggacggtgttagacgatatcaatttttcgctgcaaaagggtgagaaagttggtattttgggtcgaaacggtgcaggtaaatcgacgttgatccgtttgattagtggtgtcgagccgccgaccacgggtgaaatcaagcggacaatgagtatttcttggcctttggcattctccggtgcgtttcaaggtagtctgaccggtatggacaatttgcgtttcatctgccggatttacaatgtcgatatcgattatgtgaagaactttaccgaagagttttccgagttggggcaatatctttacgagccggtcaagcgttattcttcaggtatgaaggcgcgtttggcatttgctttgtcgttggcggtagagtttgattgctatttgattgacgaagtgattgcagttggtgactcgcgctttgccgataaatgtaagtacgagttgtttgaaaagcgcaaagaccgttccatcatcttggtgtcgcacagccacagcgccatgaagcaatattgcgataatgcgatggtgctggaaaaagggcatatgcaccagtttgaagatatggacaaagcctacgaatattataattcgctgccttaa

SEQ ID NO: 38346 - DNA, 966 bp, Neisseria meningitidis
atgagctacacgcaactgacccaaggcgaacgataccacatccaatacctgtcccgccactgcaccgtcaccgaaatcgccaaacagcttaaccgccacaaaagcaccatcagccgcgaaatcagacggcaccgcacccaagggcagcaatacagcgccgaaaaagcccagcggcaaagccggactatcaaacagcgtaagcgacaaccctataagctcgattcgcagctgattcagcacatcgacacccttatccgccgcaaactcagtcccgaacaagtatgcgcctacctgtgcaaacaccaccggatcacgctccaccacagcaccatttaccgctaccttcgccaagacaaaagcaacggcagcacgttgtggcaacatctcagaatatgcagcaaaccctaccgcaaacgctacggcagcacatggaccagaggcaaagtccccaaccgtgtcggcatagaaaaccgacccgctatcgtcgaccagaaatcccgtatcggcgattgggaagccgacaccattgtcggcaaaggacagaaaagcgcattattgaccttggtcgaacgcgttacccgctacaccatcatctgcaaattggatagcctcaaagccgaagacactgcccgggcagctgttagggcattaaaggcacataaagacagggtgcacaccattaccatggataacggcaaagagttctaccaacacaccaaaataaccaaagcattgaaagcggagacttatttttgtcgcccttaccattcttgggagaaagggctgaatgagaacaccaacggactcatccggcaatacttccccaaacaaaccgatttccgtaacatcagtgatcgggagatacgcagggttcaagatgagttgaaccaccgaccaagaaaaacacttggctacgaaacgccaagtgttttattcttgaatctgttccaaccactaatacactag

SEQ ID NO: 38347 - DNA, 642 bp, Neisseria meningitidis
atgaaagcctttaccaaaattaccgccatcgtcgccccgctcgaccgcagcaacgtcgataccgacgccatcatccccaaacaatttctgaaatccatcaaacgcagcggtttcggccccaatgcctttgacgaatggcgttacctcgaccacggcgaaccgggcatggacaacagcaaacgcccgttgaaccctgatttctcgctgaaccagccgcgttaccaaggcgcgcaaatcctgttgacgcgtaaaaacttcggttgcggctcttcacgcgaacacgccccttgggcattggacgactacggcttccgcgccgtcatcgcccccagcttcgccgacatcttcttcaacaactgctacaaaaacggccttttacctatcgtgttgaccgaagaacaagtcgatcggcttttcaaagaagttgaagccaacgaaggctatcagctctccatcgaccttgccgaacaaaccctgaccacccctggcggcgaaacattcacattcgacattaccgaacaccgcaaacactgcctcttaaacggcttggacgaaatcggactgaccctgcaacatgccgatgaaattcacgcctttgaagaaaaacgccgccaaagccagccttggctgtttaacggttaa

SEQ ID NO: 38348 - DNA, 1362 bp, Neisseria meningitidis
atgctgaaaaaagttttaatcgccaaccgaggcgaaatcgcattacgcgtactccgtgcctgccgcgaaatgggcattgccaccgtcgccgtgcattccgaggccgacaaagacagcctgcacgtcaaactcgccgacgaatccgtgtgcatcggccctgccgcttccgcgcaaagctacctcaacgtccccgccattatcgccgccgccgaagtaagctgcgcggacgctgtccacccgggctacggtttccttgccgaaaacgccgatttcgccgaacaggtcgagcagtccggctttacctttatcggcccgaaacccgacaccatccgcctgatgggcgacaaagtatccgccaaacacgccatgatcgaagcgggcgtgccttgtgttcccggctctgacggcgcattgcccgacgacggcgaagaaatcctcaaaatcgccgataaagtcggttatcctgtcattatcaaagcctctggcggcggcggcggtcgcggtatgcgcgtggtcgagaaaaaagaagacctcctccaatctgtcgaaatgaccaaggcagaagcaggcgcggcattcggcaacccgatggtttacatggaacgctatttgcaacgtccgcgccacgtcgaaatccaagtgattgccgacgaacacggcaacgccgtctaccttgccgaacgcgactgttcgctacaacgccgccaccaaaaagtcatcgaggaagcaccggctccgttcatcactgaaaaagaacgcgccaaaatcggcaacgcctgtgccgacgcctgcaaacgcatcggctatcgtggcgcaggtacgtttgaattcctgtacgaagacggcgaatttttctttatcgagatgaatacgcgcgttcaggttgagcatccggttaccgagctcatcaccggcgtggacattgtgcaggagcaactccgcatcgcatccggcctgccgctgcaatacaagcagaaagacatcaaaatcgaaggccacgcgtttgagtgccgtatcaacgccgaagacccatacaacttcatccccagcccgggcccgattgaaagctgccacctgcccggcggcttcggtatccgcgtcgacagccacatttaccaaggctaccgcatcccgccttactacgacagcctgatcggcaaaatctgcgtacacggcaaaacgcgtgaacaggcaatggcgaaaatgcgcgtcgcactcgccgagctggcgattaccggcatcaaaaccaatacgccgcttcaccgcgacttgttcaacgacccaggtttccaaaaaggcggcgtcagcatccactatttggaacactggctggaagatcgcaaagccaaacaggacaaataa

SEQ ID NO: 38349 - DNA, 999 bp, Neisseria meningitidis
ttgcagtctttagtcagcgtattgatttgcgcctacaacgtagaaaaatatttcgcccaatcattagccgccgtcgtgaatcagacttggcgcaacttggagattttgattgtcgatgacggctcgacagacggtacgcttgccattgccaaggattttcaaaagcgggacagccgtatcaaaatccttgcacaagctcaaaattccggcctgattccctctttaaacatcgggctggacgaattggcaaagtcaggaatgggggaatatattgcacgcaccgatgccgacgatattgccgcccccgactggattgagaaaatcgtgggcgagatggaaaaagaccgcagcatcatcgcgatgggcgcgtggctggaagttttgtcggaagaaaaggacggcaaccggctggcgcggcatcacaggcacggcaaaatttggaaaaagccgacccggcacgaagatattgccgactttttccctttcggcaaccccatacacaacaacacgatgattatgaggcgcagcgtcattgacggcggtttgcgttacaacaccgagcgggattgggcggaagattaccaattttggtacgatgtcagcaaattgggcaggctggcttattatcccgaagccttggtcaaataccgccttcacgccaatcaggtttcatccaaatacagcatccgccaacacgaaatcgcgcaaggcatccaaaaaaccgccagaaacgattttttgcagtctatgggttttaaaacccggttcgacagccttgaataccgccaaataaaagcagtagcgtatgaattgctggagaaacatttgccggaagaagattttgaacgcgcccgccggtttttgtaccaatgcttcaaacggacggacacgctgcccgccggcgcgtggctggattttgcggcagacggcaggatgcggcggctgtttaccttgaggcaatacttcggcattttgcaccgattgctgaaaaaccgttga

SEQ ID NO: 38350 - DNA, 942 bp, Neisseria meningitidis
atgccgaccccgaaagcctttgccctgctcgggccgaccgccggaggcaaaaccgcgctcgccctcaaaattgccgaaaccctgcctgtcgaaatcatcagcctcgattccgcgctggtctataccggtatggacatcggcacggcgaaaccgtccgcctccgaacgcgcctttgtcccgcaccaccttatcgacatcattacgcctgttcagacatacagtgccgcccgttttgtcgaagactgcacgcgcttggtcggggaaatttcctcacgcggcaggtttgcccttattgtcggcggcacaatgatgtatttccgcgccctgacccaaggtttgaacgatttgcccgaagccgatgcctgcctgcgtgccgacttggacgaacaaaaacaaatgtacggcttggatttcctctaccgcaccctgcaacaggtcgaccctgaaacagcatgccgtctgaaaccgaacgacagccagcgtatcggacgcgctttggaagtttattatttaaccggcaaaccgatgagtacgcatctcggcagcccaacctcccatacgctccccttcgatttgcataccgccgccctgattcccgaaaaccgcgcccgcctgcatgaaaacatcgccctgcgtttccacctgatgcttgaacagggctttatcggcgaagtagaaaacctgcgccgcctctatcccagcctgaccgccgactcccctgccatacgctgcgtcggctaccgtcaggcatgggaatatctggacggaaaaaccgatttcccggcatttgtcgagaaaggcattgccgccacgcgccaacttgccaaacgccaactgacttggttgcgcaaaacacctttagactgcgttaccgacccgttttcagacggcaattcatgcacacgcctgattgaggcggcaaaacggtttttcggcgcataa

SEQ ID NO: 38351 - DNA, 531 bp, Neisseria meningitidis
  misc_feature 6, 7, 8, 9, 10: 'n' is a, c, g or t
gtgtgnnnnnccgatccgcgctggagcgtgattttgttgcgttatttcaatccgattggggcgcacgaaagtggtttgattggcgagcagccaaacggcatcccgaataatttgttgccttatatctgccaagtggcggcaggcaaactgccgcaattggcggtatttggcgatgactaccctacccccgacggcacggggatgcgtgactatattcatgtgatggatttggcagaagggcatatcgcggcaatgaaggcaaaaagtaatgtagcaggcacgcatttgctgaacttaggctccggccgcgcttcttcggtgttggaaatcatccgtgcctttgaagccgcatccggcttaaatattccctatcaaatccaaccccgacgcgccggagacttggcgtgttcctttgccgacccgtcccataccaaacaagagacaggttgggaaaccaaacgcagccttgcgcaaatgatggaggattcgtggcgttgggtcagccgcaaccccaacggatatggggattaa

SEQ ID NO: 38352 - DNA, 177 bp, Neisseria meningitidis
atgggcggtgttttcttttctgttgctttccgacaagctcaaatccatatttatagtggattaaatttaaatcaggacaaggcgacgaagccgcagacagtacaaatagtacggcaaggcaaggcaacgctgtactggtttaaatttaatccactatattgcccgaaaaccgcataa

SEQ ID NO: 38353 - DNA, 747 bp, Neisseria meningitidis
atgaaaagcagcacgcaggccgttttggaacacaccgccattcccaagcatatcgccgtgattatggacggcaacggccgttgggcgaaaaaacgtttcctcccgcgcataatgggacacaaacgcggtttggacgcattggaaaatatggtgaggcattgcgccaaattgggcgtgcaatatctgaccgtatttgccttttcgaccgaaaactggcgccgccccgaagacgaagtttcgttcctgatggggctgtttttacaggctttgcaaaaacaggtacgccgcctgcacgaaaacaatatgcgcctgaaaatactgggcagccgcgaacgctttaatcggcagattctgcaaggcatcgaagaggcggaagccttgacggcaaacaataccggcctgaccctgagcattgccgccgattacggcggacgttgggatattttgcaggcggcaaacaaactgattgccgaaggcgtatccgagattacggaagacacgctggcaaaatacctgatgctgggagacgcgcccgagccggatttgttcatccgcaccggcggcgaaacgcgcatcagtaatttcctgctctggcagatggcttatgccgaactgtatttcaccgatattttgtggcccgattttgacggcaaggctttggacgatgccgtcgcttcgttccaaaaacgcgaacggcggttcggacgcacctccgagcaactgcctatcgaacagcaaaggaactga

SEQ ID NO: 38354 - DNA, 360 bp, Neisseria meningitidis
atgcagcaattattgatttcaatccttgaagatttaaacaatacatctacggatattatcgcgtctgccgttatctcaaccgacggattgccgatggcgacaatgcttccttcacatttgaattcggacagggtaggggcgatttctgccactttgcttgctttggggagtcgctcggtgcaggaactcgcctgcggggaattggaacaagtgatgattaaaggaaaatcaggctatatccttttaagtcaggcgggtaaagatgccgtgttggtgctggtggcaaaagaaaccggcagacttggtttaatcctattggatgccaaacgtgcggcaaggcatattgcggaagccatataa

SEQ ID NO: 38355 - DNA, 345 bp, Neisseria meningitidis
atgaacatcatccgcgcgctcctcatcatcctcggctgcctcgccgccggcgaaaccgccgttttcctagcaggcatcaaactgcccgacagcatcgtcggcatgggcgtgctgtttgcgcttttgcaggcaggttgggtcaaaacgtcttggctgcaacagcttaccgacgcgctgatggcgaatctgacgctgtttctcgtgccgccctgcgtggcggtcatcagctatttggatttgattgccgacgattggttttcgatactggtttccgcctccgccagcactttgtgcgtactgctggttacaggcaaggttcaccgctggatacggagcattatctga

SEQ ID NO: 38356 - DNA, 423 bp, Neisseria meningitidis
atgaatttggaacagttgggcaggcgggacgcgctgctttccggacttttgaaacaggcgggacagtggcggcggttggatgccgccgtgaaaaaactgctgcctgccaacctgcacccgcattttcagacggcatgtatcgaagacggcaggcttgtccttttggcggcaaacaatatggcggcatcgcgtttgaaaatgattgcaccgtcggtattgccgcagttggcagggcttgatgtttcgatacgctctgtttcggtcaggctggtcccgaaaccggaaaaaccgccgaaaaccaataccctgcatttgagtaaggctgcgctggagagtttcggttcggcggcggcaaagttggaaaaacggcatcccgaattggcggaggcattggcaaacttggttagaaggcatggcgcataa

SEQ ID NO: 38357 - DNA, 171 bp, Neisseria meningitidis
atggcgcaatatatgtgcggcccctgcggctggatttacgatgaagaacacggcgaccccgaacacggcatcgcccccgggacaaagtttgaagacatccccgacgactggaaatgccccgaatgcggcgtgggcaaagaagatttctacctgttggatttcgtgatatag

SEQ ID NO: 38358 - DNA, 780 bp, Neisseria meningitidis
atgaaactggtaaggcctcagaaaatcagcgatcaggtattgtcggtattggaggagcgcattgcggaaggggtttacgcggaagggggcaagattccgcccgaacgcgttttggcggaagagttcggcgtttcgcgcccgtcggtccggtcggcattgaatgttttggttgcccgtcaggttttggaagcgaggcagggagacggttattatgtttcggtcaagccgcagcaggattttttgcaaagttggcaggagcttttgggcaagcattccaattgggaacaggatgtttttgatttcagctgccacatcgagggctgtatggcggcattggcggcagaacgccggacggatgccgatttgaagcggattgggttttggcttgaaaagtttgaggaggcgtgcgaaagcggcaatctggaacatcagagcgaagccgatgtcagcttccatcagacgattgcggatgcggcgcacaatttgttgttcagccatttgtcgggcggtttgttgaaaatgctgtaccggcagacgcgcagcagccttatttatctgaatcaggaagaagatccgcgtccgaaactgatggcgcagcaccgcgtgctgtatgaggcgatatcgaaccgtcggccgggcgaggcttcggaggcggcaaaggcacatttgaattatgtggcaagcagcatcatgaaagacagggaatatcagagccgtaaccgccacgcggatactttggcgcaaaacgatttgaagcgcgtgcaggattgggaggtatga

SEQ ID NO: 38359 - DNA, 117 bp, Neisseria meningitidis
ttggaattgaaatactgcaatcgggaggctaaggcttccgttgtaacgtttaccatatatttcattattttaatttcatcaaaaaaagaaattcaagattatacataccgccaatag

SEQ ID NO: 38360 - DNA, 1188 bp, Neisseria meningitidis
atgactgaacactataaaacccttccggaacacgagctgctgattcagaagtctttgatcagcaatctgaatctttgggattgggtatttgccgtgctggtttttgcggctacggttttcgtacagacccgttccggtatgcatatggacatttacgaaacggtcatgttgtgggcaagtgccggtattgccgtgtttttgggttggtttttcaaaccgatgcgctggtttgttcctttaagcgtattgcttgcctatgccgccgtcggtttgtatggcggcaacatcaaatcggcagagattttcctgttgcggtatttcctcagcagccagtcggcgattatgtggcagtgcgcctttgtcttcttcgccctgttcgcctatatttcgggcgcggttttggcaagcgtaaaaaatgtgccgaccaacacgctgttgggtatgggaaccgtgtttgcatgggtgtctgccgtagcaggctttaccggtctgctggtacgttggcacgaaagctatctgctccgtcccgatgcggggcatattccggtttccaacctgtatgaagtgttcatcctgtttttggtgattaccgcgctgatgtatctttattatgaaggtaagttcgccatacagaaattgggcggcttcgtgttcggctttatggcggtcgtggttggatttgtcttgtggtacagcgtgtcccgcgaggcgcataccatccagccgctgattccggcattgcaatcttggtggatgaaaatccacgttccggcaaactttatcggttacggcgcgttttgcatttccgcgatgctcggtattgccgaactggtttccctgcgtgcggaagaaaaaggcgggaaatcgtggctgccgcaatccgtgttgattgaggaagttatgtataaggcgattgccgtcggctttctgttctttaccattgccaccattttgggtgcgctgtgggcggcggatgcttggggacgctattggagttgggacccgaaagagacgtgggcgttcatcgtctggctcaattacgccgtttggctgcacttgcggctggttgccggttggcgcggcaaagtgctggcgtggtgggcgattatcggtttgttcgtaaccgcatttgcctttatcggcgtgaatatgtttttgagcgggctgcattcttacggaacgctttga

SEQ ID NO: 38361 - DNA, 546 bp, Neisseria meningitidis
atgaaaaaacaaatcaccgcagccgtaatgatgctgtctatgattgcccccgcaatggcaaacggcttggacaatcaggcatttgaagaccaagtgttccacacgcgggcagatgcaccgatgcagttggcggagctttctcaaaaggagatgaaggagacagagggggcgtttcttccattggctatcttgggtggtgctgccattggtatgtggacacagcatggttttagttatgcaacgacaggcagaccagcttctgttagagatgttgctattgctggcggattaggcgcaattcctggtggtgtaggcgccgcaggaaaggttgtttcctttgctaaatatggacgtgagattaaaatcggcaataatatgcggatagcccctttcggtaatagaacaggtcatcctattggaaaatttccccattatcatcgtcgagttacggataatacgggcaagactttgcctggacagggaattggtcgtcatcgcccttgggaatcaaaatctacggacagatcatggaaaaaccgcttctaa

SEQ ID NO: 38362 - DNA, 1431 bp, Neisseria meningitidis
atgacctgggaaaccgtaatcggcttggaaatccacgtccaattgaacaccaaatccaaaatcttcagcggcgcatcgaccgcattcggcgcagaacccaacgcgcacgccggcgtggtggaatgtgctttgccgggcgtactgccggtaatgaaccgtgaagtcgttgaaaaagccatcaaattaggcttggctttggatgcgaaaatcaaccggaaaaacgtgttcgaccgtaaaaactacttctatcccgacttaccaaaaggctatcaaatcagccagttggacttaccgattgtcgaacacggcaaattggaaatcgtagtcggcgacgatgtgaaaaccatcaacgtaacccgcgcccatatggaagaagacgcgggcaagtccgtacatgaaggcttgaacggcgcgaccggtatcgacctgaaccgcgccggcacgcctttattggaagtggtgtccgaacccgaaatgcgctccgccgccgaagccgttgcctacgccaaagccttgcacagcttggtaacctggctgaacatttgcgacggcaatatggcggaaggttcgttccgcgtcgatgccaacgtatccgttcgcccgaaaggtcaagcagagttcggcacgcgccgcgagattaaaaacctcaattccttccgctttttggagcaggcaattaattacgaagtggaagcgcaaatcgagattttggaagacggcggcaaagtacagcaggcaaccatgctgttcgaccctgaaaaaggtgaaacccgcgtgatgcgcttgaaagaagacgcgcacgactaccgctacttccccgaccctgatttgctgcccgtcatcatttcagacgcccaaatgcaaaaagccaaagcagaaatgcccgagctgccgaaagaaatggcagcgcgtttcgtggcggattacggcgtgtccgaatacgacgcgcgcctgctcaccgcaagccgcgcacaggccgcctattttgaagaagccgccaaagagagcggacaaggcaagccgactgccaactggatgaacggcgaactcgccgccacgctgaacaaagccggcctggaacttgccgacagcccgattaccgccccgcgcctcgccgcgctggtaggcaaaatcgccgacggcacattaagcggcaaactggcgaaaaaagcctttgaagccatgtgggcagaacccgaagccaccattgccgaaatcatcgaaaaacacggtttgcaacagatgaccgataccggcgcggttgaagcgatggtggacgaagtgctagcaaacaacgccaaagccgtggaacagtttaaatccggcaacgaaaaagccctgaatgcgattgtgggacaagtgatgaaagccagcaaaggcaaagccaaccccgcgcaagttcaagaactgattaaagccaaacttgcctga

SEQ ID NO: 38363 - DNA, 1260 bp, Neisseria meningitidis
atgcacgtctccgaattacaaaccctgcacatttccaaactcttagaattggcggaagaacacggcatcgaaaacgccaaccgattccgcaaacaagacctcgtatttgccatcgtccgccagatgatgaaaaaaggcgagggtttcacctgctccggcacgcttgaaatcctgcccgacggcttcggcttcctccgcagcgcggacacgtcctatcttgccggccccgacgacatctatgtctcgcccacccaaatccgccgcttcaacctgcatacgggcgacaccatcgaaggcagcgtccgcgtcccaaaagacaacgaacgctattttgccctggtcaggcttgataccatcaacggcgaccacccggaagtatgccgccataaaatcctgtttgaaaacctgaccccgctgtttccgaccgaacagttgaagctggaacgcgacttaaagtccgaagaaaacctgaccggacgcgccatcgacctgatttcccccatcggcaaaggtcagcgcgccctcttggttgccccgcccaaaagcggtaaaaccgtgatgctgcaaaacattgcccacgccgttaccgcaaactatcccgaagtcgaactcatcgtcctcttgattgacgaacgtcccgaagaagtaaccgaaatgagccgctccgtccgtggcgaagtggtttcctccacctttgacgagccggctcaacgccacgtccaagttgccgaaatggtgcttgaaaaagccaagcgtatggtggaacacaaaaaagacgtggtcatcctgctggattcgattacccgccttgcccgcgcctacaataccgtcgtccccacctcgggcaaaatcctgaccggcggtgtcgatgccaacgcgctgcaccgccccaaacgtttcttcggtgcggcgcgcaacgtggaagaaggcggttcgctgaccattatcgccaccgcattggttgaaaccggcagccgtatggacgatgtgatttacgaagaattcaaaggcaccggcaatatggaattgcaccttgatcgccgtatggcggaaaaacgcctcttccccgccatcaacatcaacaaatccggcacgcgccgcgaagagctgcttgtgccgaacgaccagttgcaacgtatgtggctcttacgcaagttcctgcacccgatggatgaaatcgaagctaccgagttcttaaacgggaaaatcaaagcctctaaaaacaacgacgatttctttgaactgatgcgcggcaaataa

SEQ ID NO: 38364 - DNA, 960 bp, Neisseria meningitidis
  misc_feature 4, 5, 6, 7, 8: 'n' is a, c, g or t
gtgnnnnnagaccaactccaaatcgtcgccgtcaacgccagcggcagccttgaaaccaacgcccacctcaccaaattcgacaccgtgcacggacgctttgaagccgacgtatcccacgacggcggcaacctcatcgtcaacggcgacaaaatccccttcttctcgacccgcaaccctgccgaactgccgtggaaagaactcggtgtcgatttggtcatggaatgcaccggcgcgttcaccagcaaagaaaaagccaaagttcatctggaaagcggcgcgaaaaaagtcctcatttccgcaccgggcggcgacgatgtcgatgcaaccgtcgtgtacggcgtgaacgacagcatcctgaccgccgacataaccgtcgtttccaacgcttcctgcaccaccaactgcctctcgccggttgccaaagtgttgagcgaaagcgtcggcatcgtcaaaggcgcgatgaccaccatccacgcgctgaccaacgaccaaaccgttaccgacgtgcgccacaaagacctgcgccgcgcccgcagcggcgtggaaaacatgattccgaccaaaactggcgcggcaaaagccgtcggactggtactgcccgaattgaaagacaaactcgacgggcttgccatccgcgtgccgaccgtcaacgtatcattggtagatttgaacttccaagccgcgcgcgacacgacaatcgaagaaatcaacgcactgatgaaagccgcctcggaagcaggcgcgctcaaaggcgttttaggctacaacaccctgcccttggtttccatggacttcaaccacaccaccgaagccagccacttcgacgcaacactgaccaaagtcgttgacggcaacatgattaaagtcttcgcatggtatgacaacgaatggggcttcagctgccaaatgctgaacaccgcacgccgtatgttcggacttgaagtgcgcccgctcaaataa

SEQ ID NO: 38365 - DNA, 1011 bp, Neisseria meningitidis
atgaacgacaatacacacacccttcccccgcgccacctgtccgtcgccccgatgttggactggacggacaggcactaccgttatatggcgcgccagattacccgcaatacttggctgtacagcgaaatggtcaacgccggcgcgattgtttacggcgacaaagaccgctttttgatgttcaacgaaggcgagcagcccgtcgccctgcaactgggcggcagcgatccgtccgatttggcgaaagccgccaaagccgccgaggcatacggttacaacgaggtcaacctcaactgcggctgccccagtccgcgcgtgcagaaaggctcgttcggcgcgtgtctgatgaacgaagtcgggctggttgccgactgcctcaacgccatgcaggacgcggtcggtattcccgttaccgtcaaacaccgtatcggtgtggacaggcagaccgaataccaaaccgttgccgatttcgtcggcacgctgcgcgacaaaaccgcctgcaaaaccttcatcgtccacgcccgcaacgcttggctggacggtctttcccccaaagaaaaccgcgacgttcccccgttgaaatacgattacgtttaccgcctcaagcaggagtttcccgggctggaaatcatcatcaacggcggcatcaccaccaacgaagcaatcgccggacacctgcaacacgttgacggcgtgatggtcgggcgcgaggcgtaccacaacccgatggtgatgcgcgaatgggacagattgttttacggcgatactcgcagcccgatcgaatacgccgatttggtgcagtgcctctacacatacagccaagcccagatccaagccggacgcggcacaatcttgcgccacatcgtccgccacagcctcgggctgatgcacggtttgaaaggtgcgcggacttggcggcgtatgctttccgacgcaacgctcttgaaagacaacgacggcagcctgattctcgaagcgtggaaagaggttgagcgggcaaatacgcgcgaatag

SEQ ID NO: 38366 - DNA, 2853 bp, Neisseria meningitidis
atgaaactatctgaattgttcaacccgaacgaatttgccgcgcgccatttgagtttcggcgacgaagcggcgttgcttgccgctgtcggcgagaaaagcatggacgaatttgtcggcaataccgtgccgcaaagcatccgtatgccgtccgaactcgatttgcccgatgccctgaccgaagcggacgcgttggcgaaattgaaaggcattgcgtcgaaaaacgtgatcaacaagtcctatatcggtttgggctattacccgacccgcgtgccgaacgtgattttgcgcaacgtgttggaaaatccgggttggtacaccgcctacacgccgtatcaggcggaaattgcccagggtcgtttggaagcgttgttaaacttccaacaagtgtgtatcgatttgaccggtttccctgtggcgggcgcgtctttgctggacgaggcaactgctgcggctgaagcgatggcgatggcgcaccgcgtgggcaaggtgaaatccgagcgtttctttgtggatgcgcgcgtgtatccgcaaactttggacgtgatgaaaacccgcgccaaatatttcggcttcgagctggtggtcagcgattttgccaaagcggatgacggcgaatacttcggcgcgctgttccaatacgtcggcaaagacggcgatgtgcaagacttgcaggatgttatcggtcgtctgaaagcaaaaggcacgatcgttgctgttgccgccgacatcatgagcttggttttactgaaatcacctgccgaattgggagcggatattgctttgggcaacacccaacgtttcggcgtgcctatgggcttcggcgggccgcacgccgcttatttcgcgtttaaagacgcgttcaaacgttccgcccctggccgcatcatcggcgtatccaaagacgcatcaggcaaacctgccttgcgcatggcgttgtccacccgcgagcaacacatccgccgcgaaaaagccacgtccaatatttgtaccgcacaagcattgctggcgaatttggcgggtatgtatgccgtttaccacggccctgaaggcgtgaaacgcatcgccaaccgcattcacgcgctggcttctgcttttgccgatgcgctggtttcagacggcattaatgtggttcacaaagtcttcttcgataccgttaccgtcgatttcggcaacaaagagaaagcagaccaagtgtttgccgctgctttggaatcgggctataacctgcgccgcgttaacgatactcaagttgcggctgcattccacgaaacatcggcatgcgaagatttggttgatttgtaccgcgcgtttaccggcaaggatacgttcgcatttgccgatgatgtcaaaggccgtctgaacgccgaactgctgcgtcaagacgacattctgcaacatcctgtgttcaacagttaccacaccgaacacgaaatgttgcgttatctgaaaaaactcgaagaccgcgacttggcgatgaaccgcagtatgatttcattgggcagctgtactatgaaactcaacgcgactgcggaaatgttgccgattacttgggccgagttcaccgacatccatccttacgctcccgaagcgcaaaccgccggctaccgcgaattgctcgccgatatggaaaacagcctgaaagccatcaccggctttgacgcgatttccctgcaaccaaattccggcgcacaaggcgaatacaccggtatgctcgccatccgccgctatcaggaatcccaaggcgaagcgcaccgcaacatctgtctgattccaaaatcagcccacggtaccaaccccgccaccgccgccatgctcggtttgaaagtcgtcgtcgtcgacaccgacgaacacggcaacgtcaacattgacgatttgaaagccaaagccgagcaacaccgcgacgctttgtctgccatcatgattacctatccgtccacccacggcgtgtacgaagaaggcatccgcgacatctgccgcattattcacgaaaacggcggacaggtttacatggacggtgcgaacctcaacgcccaaatcggcatcatgcagcctgccgaagtcggtgcggatgtgttgcacatgaacctgcacaaaaccttctgtatccctcacggcggcggcggcccgggcatgggtccgattggcttgaaagcccatttggctccgtttgccccgggccataccttgaccgacacccacaacgcggctgccgatcaaaccgccgtggctgccgcagcatatggttctgcatccatcctgccgattacttggatgtacctgaccatgatgggcaaacaaggcatggaacaggcaacgcgctgggcattgctcaacgccaactacgtcgccaaagccttgggcgaggattatccgattctctacaccggcaaaaacggccgcgtcgcgcacgaatgtatcgtcgacttgcgtccgctcaaagccgaaagcggcattaccgaaaccgacatcgccaaacgcctgatggactacggcttccacgccccgaccgtctccttccccgttgccggcacgctgatgatcgaaccgaccgaaagcgagagcaaagccgaactcgaccgcttcatcgccgccctgaaacaaatcaaacaggaagtgctgaaagtcgggcgcggcgaatggccgaaagacgacaacccactggtcaacgcgccgcacaccgccgcagatataaccggcaactgggcgcatccgtattcccgcgaagaagccgtcttcccgttgccgttcgtccgcgaacacaagttttggcccttcgtcaaccgcgtggacgacgtgtacggcgaccgcaatctcgtgtgcagctgcccaccgatggaaaattatgaagactga

SEQ ID NO: 38367 - DNA, 444 bp, Neisseria meningitidis
atgccgttccgcctgtttttagggatattatgcggcctgtcaatggttgcccccgtatatgcacaggggcaaccggatgcggtcaacgcttatattcaaaagaaaaaagtcatcgtaaacacatccaaagcggaactctgttttgccgatgacaggcagtgccaccccgtcctcatcggtgttgccacgcccaaggggacgttcgggctgacgctgaacagtaccgacaagcctggatacggcggcgaagtcatcggtttcaagcaggagggtgattttcttttcgccctgcaccgcgtttggaatcagataccgtcggaaaggcggaacgaacgcatcgcctccccgtccgtgtccgacaggattatgaccaacggctgcatcaacgtcagcgatgcggtgtacgaaaaactgcgtcattattttgtgttggaagtgatttga

SEQ ID NO: 38368 - DNA, 1338 bp, Neisseria meningitidis
atgagtaaccatacttcttggtcgtccaaaatcggtttcgtgcttgctgcggcaggttcggccatcggtttgggcgcgatttggaaatttccttatacggcaggcaccaacggcggcgcggtgtttttcctgctgtttttgatatttaccgtcttggtcgccctgcccgtccagcttgccgagttttatatcgggcgcacaggcggtcaaaacgccgtcgattccttcagggctctgcgtccgagtacgcaatggctttgggtcgggcgcatgggcgtttccgcctgctttattttgctgtcgttttacagcgtggtcggcggatgggtattaaattatgtcgtccacagtttcacgggggcggttcataccggcgcggactttgaagccttgttcggcgcgacgatttccaatccggcaggttcgctgtcctatcaggcactgtttatgctgattacggtctgggtggtcaaaggcggcatttcagacggcattgaaaaggcaaaccgttatctgatgccggggctgtttatcctctttattgcgctggcaatccgttcgctgacgctgccgggtgcaatggagggcgtgtctttcctgctcaaaccgaattggtcgtactttaaagccgatacgatgattacggctttaggccaggcgttttttgccttgagcatcggcgtttccgctatgattacctatgcttcgtatttgggaaaagatcaggatatgttccgctcggggcatacgattatgtggatgaacctcttggtttcgctgttggcaggtttggtgatttttccggcggtgttcgccttcggttttgaaccgagccaggggccgggattgatttttatcgtattgccggcagtgtttatgaagatgccgttcggtacggttttgtttgcggtatttatgctgctggtcgttttcgccacgctgacttcggcgttttcgatgttggaaacggtcattgcctcaaccatccgccaagacgagcgcaaacgcaaaaaacacacttggcttatcggcacggctattttcattgtcggcatcccgtccgcgctgtctttcggcatctggggtgagtttaaggttttcggcaaaaccatttttgatttgtgggactatgttatttccgccgtcattatgcctgtcggcgcgttgggcgttgccgtatttaccgcctggattcaggacaagcagtctgtgttaaaagatgccggcgcgggcagcaccgtaccacgggcagtgctgctgctgtggctgaataccttgcgctacctcgccccgattgccattattattgttttcgtcaattctttggacatcctttaa

SEQ ID NO: 38369 - DNA, 408 bp, Neisseria meningitidis
atgaagcggcaggctttcttcaaaccaattgcgtgtgcggcatttctgtctgccgtttcgctgcgcctccccgtattgggcgcgtgttacgcaatattgtccctctatgcgtttgcactttacagcatcgacaaacggcgtgccgtgcggggaaaacgccgcattcccgaacaccgcctgctgctgcctgccttgttcggcggttgggcgggcgcatacttgggcagcaggatattcaggcataaaacggcgaaaaagcgttttgttgtgctgttccgtctgactgtttcaggtaatgtcctggcgaccctcatcctgatttatagtggattaaatttaaaccagtacggcgttgcctcgccttgccgtactatttgtactgtctgcggcttcgtcgccttgtcctga

SEQ ID NO: 38370 - DNA, 534 bp, Neisseria meningitidis
atggcagacttcaaccaaatcctgacccccggcgatgtggacggcggcatcatcaacgtcgtcaacgaaatccccgccggcagcaaccacaaaatcgagtggaaccgcaaactcgccgcattccaactcgaccgcgtcgaacccgccatcttcgccaaaccgaccaactacggcttcattccccaaactttggacgaagacggcgacgaattggacgtgctgctcgttaccgaacaacctttggcaaccggcgtattcttggaagcgcgcgttatcggcgtgatgaaattcgttgacgacggcgaagtggacgacaaaatcgtctgcgttcctgccgacgaccgcaacaacggcaacgcctacaaaactttgtccgatttgccgcaacagctcatcaaacaaatcgagttccacttcaaccattacaaagacctgaaaaaagcaggtacgaccaaagtcgaatcgtggggcgatgcggaagaagcgaaaaaagtcattaaagaatccatcgaacgttggaacaaacaggcataa

SEQ ID NO: 38371 - DNA, 1644 bp, Neisseria meningitidis
atgaatgcttttacccgtgcatggtatgcgctcgaacgccattatcaggatacgcgtcatgtccttttgcgcgaccgctttgcctgcgaacccgaccgttttgaccgtatgcatgagcgtttggacgggatgttgttcgattacagcaagaaccgtttgggcgaagatacgctgcaactgctctgcaatcttgccgacgcggcggatttggaagggaaaatgcgtgctttgcggacgggtgcgaaggtcaacaacagtgaggggcgtgccgcgctgcatacggctttgcgcctgcccgacggtgcgggtgccgtttatgcggacggcagggacgtgttgcccgaaatccgccgcgagttaaatcgtgcgttgaagtttgcacacagtttggacgacggttcgtatcaggggacaaccggaaaacggattacggattttgtccacatcggcataggcggatccgacctcgggccggcaatgtgcgtgcaggcacttgagccgttcagacggcatatcgccgtccattttgccgccaacgccgatcctgcctgcctggatgaggtcttatgccgtctgaaccccgaaacgacggtgttttgcgttgccagcaagtccttcaaaacgcctgaaaccctgctcaatgcagaggcggtcaaggcttggtatcgtggtgcggggttctcggaatcggaaacgggatgtcatttttgcgcggtatctgccgatacggaagcggcgcaaagtttcggcattgcggcggaacgcgtgtttgcgatgtacgactgggtgggcggacgctattccgtctggtcgcccgtcggtttgcccgtgatggttgcggtcggcggggcgcgtttccgcgagttgttggcgggggcgcacgcgatggacagccattttttccacacgccgccgcgccgcaacattcccgttctgatggcactgattgccgtgtggtataacaatttccaacacgcggacgggcagaccgccgttccgtacagccacaacctgcgcctgctgccggtgtggctgaaccagctcgatatggagagtttgggcaaaagccgcgcttcagacggcagtcccgccgtgtgcaaaacgggcggcatcgtgttcggcggtgaaggggtcaactgccagcacgcctatttccaactgctccaccaaggcacgcgcctaattccctgcgactttatcgtcccggtgacggcgcagggcgtggaggacggacgcagccgttttaccgttgccaacgcctttgcccaagcggaagccctgatgaagggcaaaaccttggacgaagcacgcgccgaactggcagatttgcccgaagcggaacgcgaacgcctcgcgccgcacaaagagttccccggcaaccgccccagcaacagcatcctgctcgaccgcctcacgccctacaatctgggtatgctgatggcggcttacgaacacaaaacctttgtgcagggtgtaatttgggacatcaatcccttcgatcagtggggggttgagtacggcaaacagttggcgaaaaccatcatcggcgaactggaaggcggcacgtccgtacacgatgcctcgaccgaagggctgatggcgttttaccgcgaatgccgtctgaaaggcggcggcgcggcataa

SEQ ID NO: 38372 - DNA, 465 bp, Neisseria meningitidis
atgtttaccatcgttttataccagccggaaatcccgccgaacacgggcaacatcatccgcctgtgcgccaataccggcgcggatttgcaccttgtcaaaccgctcggcttcccattggattccgccaaaatgaaacgcgccgggctcgactaccacgaattcgccagcctgacggtgtacgaaaacttcgacgactgcctcaaggcactcgcaggcaggcgcattttcgccctgaccaccaaaggcacggcgcgccccgatgaaaccgcgtttcaaaaaggcgacgttttactgttcgggccggaaacgcgcggactgcctgccgacatcctcgacagcctgcccgccgcgcaaaaaatccgcctgcccatgcagcccggcagccggagtatgaacctttccaataccgttgccgtgattctctttgaagcgtggcggcaacacggttacgcaggcggcgtttga

SEQ ID NO: 38373 - DNA, 1050 bp, Neisseria meningitidis; identical to SEQ ID NO: 38313

SEQ ID NO: 38374 - DNA, 504 bp, Neisseria meningitidis
atgtcagaccctaatttgattgacttggaaatttttgccgccgaagggcagaacctgcaaggcagttttctgctggaagaattggatgaacgcgtcagttcgcacgattatcccgccgacaggcagaccaaaatatcgtttacactgaccggcggtcgcgaccggctgcaacgcctgttcctcgacctgaacgtcaaagccgatatgcccctgatttgccagagatgtatcaaacccatgccgttcatgcttgatgaaagcagccgtatcgtcctgttttccaacgaagagtccttggacgaatccatgcttgccgacgaagaactcgaaggcatactgattgaaaaagaactcgacgtgcgcacattggtagaagaccaaatcctgatgtccctgcccttttcgccgcgacacgaagactgcggcgacaatgggacactggaagaagtcaatcgggacaaacccaacccctttgctgttttggcaggtttgaaaagcaattga

SEQ ID NO: 38375 - DNA, 342 bp, Neisseria meningitidis
atgccgtccgaacctcttaaaggcttgccggaacaaaacgtcgtccggctgaccggcaagcatcccaacgacttggaagccgtcagcggcaaatgcatggaaaccgacgataagggcggtccggtaggctgggcggaaaacggcgtgtgccataccttgtttgccaaactggtgggcaatatcgccgaagacggcggcaaactgacggattacctgatttcgcattccgccctgcaaccctatcaggcaggcaaaagcggctatgccgccgtgcagaacggacgctatgtgctggaaatcgacagcgagggggcgttttatttccgccgccgccattattga

SEQ ID NO: 38376 - DNA, 789 bp, Neisseria meningitidis
atgaatccgcaggacaaatgttggcaggttcaccgccatcttgccgaacataccgaccaacggctgacactcgtccgcaacgcgcccaaacatatcctgcttgccggggcggatgcggacatcagccgcagcctgctggcgaaacgatatccgcaggcggtatttgaagaatacgattcccgtgcggattttttggcggctgccgcagccgtgcgcaagggcggtttttggcaaaggtttacgggtaagggcgtggtgcaacactgccaatccccgaccgcgccgctgcccgaagcgtgtgccgatatgttgtggtcgaatctcggactgttggcggcggaacaaatccttcctgtgctgcacaactgggcgcgcgccttgaagacggacgggctgctgttttttacctgcttcgggcgcgacacttttaccgaactgaaatgccgtctgaaagaaaacggcattgaaagccgcagcgcgcttttccccgatatgcacgacttgggcgatatgcttgctgaaaacgggttttacgaccccgttaccgatacggcgaagctggtgttggattacaaaaaggcggaaacgttttgggcggatatggacacgctgggcgtttggcgggcgatgtcgtggaacgatgaaaacgccgcgcgttcgtgtgtcgggacaatatttgagcgggaaggcggtttgggcattacgctggaaacggtgtacggacacgccgtgaaaaaactgatgctgccgcaaggggagaacgtggtgcagttttttccgaagagatga

SEQ ID NO: 38377 - DNA, 279 bp, Neisseria meningitidis
atgcatacagaactcaacaacggaacactgcacatcagcggcgacatcaccgtcaaaaccctgaccggggaggcttttgagcgtttccagcagcaatgccgtctgaaagaaaccattgccgtcgatttcggcggtgtcaaacgtgccgattccgcctgcgtgtcgctgctgctcgaagtgctgcgcggctgcaaaggcagcgtcaggctgaccggcattcccgaatccgtgcgcgcgctgtccgaactgtacgaaatcaaagactggctgaaatcatga

SEQ ID NO: 38378 - DNA, 2691 bp, Neisseria meningitidis
atgtccgacaaccgcctcgacaccgcccgccgccattccctcttcctcgcccgccagctcgacaacggcaaactcaagcccgaaattttcctgcctatgctggacaaggttttgaccgaagcggatttccaagcctttgccgactgggacaaaatccgtgcggaagaaaacgaggaagaattggcgcggcagttgcgcgggttgcgccgttatgtggtgtcgcagattatcgtgcgcgatatcaaccgcatcagcgatttgaacgaagtaacccgcacgattacgctgtttgccgattttgccgtcaataccgcgctggattttgcctacgcctattatcgggacatgtacggcacgccgatcgggcgttataccaaatcgccgcagcatttgagcgtggtggcgatgggcaaggcgggcggccatgagttgaacgtgtcttccgacatcgatttgattttcacctatcccgaatcgggcgacaccgacggcaggcgcgaacggggcaatcaagagtttttcaccaaagtcgggcagaaactgattgcgctgctgaacgacatcaccgccgacggacaggtgttccgcgtcgatatgcggctgcggccggacggtgattcgggcgcgttggtattgagcgaaaccgcgctggagcaatatttgattacgcaggggcgcgaatgggaacgctacgcgtggtgcaaaggccgcgtggttacgccgtatccgaacggaatcaaatcgctggtgcgccctttcgtgttccgcaaatatttggattacagcgcgtatgaggcgatgcgtaagctgcaccgccaaatcagcagcgaagtcagcaaaaaaggcatggcggacaacatcaaactcggcgcgggcggcatccgcgaagtcgaatttatcgcccagattttccagatgatacgcggcggacaaatgcgcgcgctgcaactgaaaggcacgcaggaaacgctgaagaagcttgccgaaaccgggatcatgccgtctgaaaacgtcgaaaccctgcttgccgcctaccgcttcctgcgcgatgttgaacaccgcctgcaatactgggatgaccagcaaacccaaaccctgccgacctcgcccgaacagcggcaactgctcgccgaaagcatgggtttcgacagttattccgctttttcagacggtctcaacattcatcggaacaaagtcaatcagttgttcaacgaaattttgagcgaacccgaagagcaaacgcaagacaacagcgaatggcaatgggcatggcaggaaaagcctgatgaagaagaacggctaggccgtctgaaagaatatgggtttgatgccgaaaccatcgccacgcggctcgaccaaatccgcaacggccataaataccgccacctttccgcccacgcccagccgcgttttgacgccattgtgccgttgttcgtacaagcggcggcagagcaaaacaaaccgaccgatacattgatgcggctgttggattttctcgaaaacatcagccgccgatccgcctatctcgccttcctcaacgaacatccgcaaaccttggcgcaactggcgcagattatgggccaaagttcttgggtggcggcgtatctgaacaaatatccgattttgttggacgaactcatcagcgcgcagcttttggataccgcgtttgattggcaggcgctcgccgccgccctttcagacgacctcaaagcctgcggcggcgatactgaagcgcaaatggacaccctgcgccgcttccagcacgcccaagtcttccgtctcgccgtccaagacctcgccggactgtggacggtagaatccctctccgaccaactctccgccctcgccgacaccatcctcgccgccgccctgctgtgcgcatgggcggacatgccaaaaaaacaccgcgacacaccgcaattcgccatcgtcggctacggcaaactcggcggcaaagaactcggctacgcctccgacctcgacttggtctatctttatgacgacccgcatcccgatgcaggcgacgtgtacagccgccttgcccgccgcctgaccaactggctttccaccgccaccggcgcaggcagcctctacgaaaccgacctgcgcctgcgccccaatggcgatgcaggtttcctcgcccacagcatcgccgcctttgaaaaataccagcgcgaaaacgcctggacgtgggaacaccaatcccttacccgcgcccgcttcatctgcggcacgtccgaaattcagacggccttcgaccgcatccgcaccgaaatcctcaccgccgaacgcgaccaaaccgccttggcaggcgaaatcatcgaaatgcgcgaaaaaatgttccccacccacccgcctgccgacagcaacgtcaaatacgcgcgcggtggcgtggtcgatgtcgaatttatcgtccaatatctgatacttgcccatgcccgccagtatccgcaactcttggacaactacggcaacatcgccctcttaaacatctccgccgactgcggtttgattgacaaaaccctcgccggacaaagccgcaccgcctatcgcttctaccgccggcagcagcacaacaccaaactgcgcgacgcggcaaaaaccgaagtaaccggcgaactgttggcacattacggcaatgtcaggaaattgtggcgggaagtgttcggcgaagaagcggcaaccgtctga

SEQ ID NO: 38379 - DNA, 126 bp, Neisseria meningitidis
atgcaggttctgtcttcactcaaaaccgccaaacaacgccaccgcgactgccaaatcgtcaggcgcaggggcaaagtttacgtcatctgcaaaagcaatccgcgttttaaagcgcgccaacgctga

SEQ ID NO: 38380 - DNA, 768 bp, Neisseria meningitidis
atgagaccatatgctactaccatttatcaactttttattttgtttattgggagtgtttttactatgacctcatgtgaacctgttaaagaacaaaccagtttcaacaatcccgagccaatgacaggatttgaacatacggttacatttgattttcagggcatcaaaatggttatcccctatggctatcttgcacggtatacgcaagacaatgccacaaaatggctttccgacacgcccgggcaggatgcttactccattaatttgatagagattagcgtctattacaaaaaaaccgaccaaggctgggtgctcgaaccatacaaccagcaaaacaaagcacactttatccaatttctacgcgacggtttggatagcgtggacgatattgttatccgaaaagatgcgtgtagtttaagtacgactatgggagaaagattgcttacttacggggttaaaaaaatgccatctgcctatcctgaatatgaagcttatgaagataaaagacatattcctgaaaatccatattttcatgaattttactatattaaaaaaggagaaaatccggcgattattactcatcagaactatcataggtatggagagaacgattacagtactgatataggttcctgtattaacggtttcacggtacagtattacccgtttattcgggaaaagcagcagctcacacagcaggagttggtaggttatcaccaacaagtagagcaattggtacagagttttgtaaacaatccaagtaaaaaataa

SEQ ID NO: 38381 - DNA, 456 bp, Neisseria meningitidis
atggtcgacgcggtcgttaaaactcccgaatttttaccttttacttctgtaggaatattccgttttggtgctgatataacacagtacaaaaacatactggaaacttttatgtatgaacctcctgatgagtttagaacagaatattatgaatctcccgactcaaatttactcatttccgtcaaaaaaaacaaaattatttcgatattttgttatcaggagctatattttatgggcgttaatataataggtctgaattttgaagattttaaacagcttttccatcaccctaaatcatacggtgttgataaatattatttatcaaatgaatcttatccgacatatgtctatgagtttgatgaaataggagtacaagcttgggaagcaaaagggaaaattgttactatcattgccgggggcaaagacaattattcaacagaaccttactacgatgaataa

SEQ ID NO: 38382 - DNA, 288 bp, Neisseria meningitidis; identical to SEQ ID NO: 36767

SEQ ID NO: 38383 - DNA, 417 bp, Neisseria meningitidis
atgcttaaacatctcgcattcctactgcccgccatgatgttcgccctccccacttcggccgccgttctgacttcctatcaagaacccggctgcacctacgaaggcgatgtcggcaaagacggtaaacccgccggcaaaggcacatggcgctgccaagacgggcgcaactataccggttcgtttaaaaatggcaaattcgacggacaaggcgtttataccgttgccgccaaccgcgaaatatttatcgaaccgttcaattccgacagtaccaaattccgcaacatggtactctcgggcacattcaaaaaaggcttggcacacggcagatttaccgtctcgcaaaacggcgaaaccctcttcattatgaaatgcgaaaacggcatgattaaagaagtgaagctgcccaaaaacaaataa

SEQ ID NO: 38384 - DNA, 987 bp, Neisseria meningitidis
atgcaataccgaatcagaagagaaaacgaagcacccgaagcaaaaaatgcgggggaaaccttatgggagcgcgatatgatgcgcgaagtgctgttgtccgcctatcaggacaggcgcagggagcggatgtggaaaaacatctggcgcgccgtcagcaccctgattctggttgccctgattgcaggcattttccaaaaagacgaagccgcattgcagttggcgggcaacacgccgcataccgcagtcgtcaacctgtacggcgaaatcggcaacggtgtagaagaccaggtcaaaaaactcaaagacggtatggaggccgcctacaaaaacccgcaggcaaaagccatcgtcatccgcgccaacagccccggcggttcgcccgtcgtctccaacaccgcttttgaagaaatacgccgtctgaaagcgcaacatcccgacattcccgtttatctcgtggcggaggatatgtgtgcatccggctgctactatattgcggcggcggcagacaaaatttatgcggactcgtccagcatcgtcggcagcatcggcgttatcggcagcagttttgatgctactgaattaatggaaaaaatcggcgtgaaacgcagggttaaaattgcaggcagcaacaaaggcatgggcgatccgttttcgcccgaaacgcccgaacagtcgaaaatctgggaagaaatgctgaccggcatacacggcgagttcatcaaagccgtcaaaaccggacgcggcggccgcctcaaattccgacaatatcccgacgtgttcagcggtcgcgtgtacacaggcgcggatgcgctgaaagtcgggctggtggacggactcggcaatatttacagcgtggcgcgagacgtggtcaaagcccccgatgtggtggattacactccgaaggacgatttcggcagaatcttgggcagacgcttcggcgcagaactcaaagcaagcgtgcgcgaagccctgcaggccgtccggtag

SEQ ID NO: 38385 - DNA, 165 bp, Neisseria meningitidis
atgggacaggttgcgttttacgaaaagatgattgggctgtggtcggccaaaagccgtgaggcaagcgaacaggcagacttggcggcgtttgaatttgcggagggcgaactggccaattatcaggaaatgctgaaacggcacctgcaaaccaaaagtgtggaatag

SEQ ID NO: 38386 - DNA, 876 bp, Neisseria meningitidis
atgccgaccgtccgttttaccgaatccgtcagcaaacacgaccttgatgccctgttcgagtgggcaaaagcaagttacggtgcagaaagttgctggaaaacactgtatctgaacggcctgcctttgggcaacctgtcgccggaatgggcggagcgcgtcaaaaaagactgggaggcaggctgctcggagtcttcagacggcatttttctgaatgcggacggctggtcagatatgggcggccgcttgcagcacctcacccgcacatggaacaaggcggggctgcttcacggatggcgcaacgagtgtttcgacctgaccgacggcggcggcaatatcttgttctcacttgaacgcgccgctttccgcccgttcggactactcagccgcgccgtccatctcaacggtctgaccgaatcggacggccgatggcatttctggataggcaggcgcagtccgcacaaagcagtcgatcccggtaagctcgacaatactgccgccggcggtgtttccggcagcgaaatgccgtctgaagccgtgtgccgcgaaagcagcgaagaagccggtttggatgaaacgctgtttccgctcatccgtccggtatcgcggctgcacagcctgcgccccgtcagccggggtgtgcacaatgaaatcctgtatgtattcgatgccgtcctgcccgaaaccttccggcctgaaaatcaggatggcgaagtggcgggttttgaaaagatggacattggcggcctgtcggatgctatgttgtccggacgcatgatgcacgatgcccaactggttacgctggacgcattcgaccgttacggattaatcgccccgaaccacccgctgtcgggctggcttcgcggcatcaggacttag

SEQ ID NO: 38387 - DNA, 390 bp, Neisseria meningitidis
atgaacccgcacgagaaactcttgaccaccgacaaccccatcttgcgccaacgcgccaaagccatgcgccaagaaatgagcggggcggaagcaaaattgtggcagcacctgcgggcaggtcgtctgaacggctataaattccgccgccagcagccgatgggaaactatattgttgattttatgtgcgtaacgcccaagttgattgtcgaagcagacggagggcagcacacagaacaagccgcatacgaccacgcgcggacggcatatctcaacagcttgggctttaccgtactgcggttttggaatcacgagattttacagcagacaaacgatgtgctgacagaaatcctgctcgtgttgcaagaattggaaaagcaagctgcacgatag

SEQ ID NO: 38388 - DNA, 1356 bp, Neisseria meningitidis
atgaaagcacccgaactcttattgcccgccggcggattggaaagaatgcgcgccgcctacgattacggcgcagatgccgtttacgccggcagcccgcgttactccctgcgcgcccgcaacaacgaatttgccaaactcaacgtccttgagcaaggcattaaagaagcgcacgagcgcaacaaaaaattcttccttaccgtcaacaccctgccgcacaactccaaactcaaaacctttgtttccgatatggaacccttgattgccatgaaacccgacgcgctgattatggcggatccgggtttgatcatgaccgtgcgcgaaaaatggccggaaatgccgatccacctgtccgtacaagccaacaccaccaactactggggcgtgaaattctggcagaatatcggcgtcgaacgcatcatcctgtcgcgcgaattgagtatggaagaaatcgccgaaatccgccaacaatgccccgacatcgaactcgaagtcttcattcacggcgcattgtgcatcgcctactccggccgttgcctactctccggctacttcaaccaccgcgaccccaaccaaggcacctgcaccaactcctgccgttgggattacaaggttcacaatgccacggaaagcgatgcaggcgatgcccagcttctgcaaggtttcaactttgaaaaagcccaagaagaagccaaccaaaactttgaaggcatcaacggtcaaaaacgccatccctacgccgacaaagttttcctgattgaagaatccaaccgcccgggcgaaatgatgccgattatggaagacgaacacggcacctacatcatgaattccaaagaccttcgcggtatcgaagtcgtcgaaaaactcgccaaaatcggcgtggacagcctcaaagtcgaaggccgtaccaaatcgctctattatgttgcacgcgtcgcccagtcctaccgcaaagcgattgatgatgccgtcgcaggccgtccgtttgattacagcctgttgagcgaactcgaaggcctcgccaaccgcggctacaccagcggcttcctcgaacgccaccaaactcaggattatcaaaactacctgaccggccattccaccgccaaacaaagccaatacgtcggacacgttaccgaaatcgatgaaaacggctgggcaacagtggaagtcaaaaaccgctttgccgtcagcgattcactcgaaatcatccacccgagcggcaaccaaaccatcaaattggaacaaatgacccgcaaaggccagcctgtcgatgttgccccgggcaacggcattcaggtcaaaatccccaatatgcagggtaaagaaaaagccctcatcgcacgcgtgttgaacccctaa

SEQ ID NO: 38389 - DNA, 684 bp, Neisseria meningitidis
atgcaacacgacgtttacgactacaccgcgcatacggtttctaaaaacaccgtcctgcagaaaacctaccgcctgctcggattttcatttattccggctgccgcaggcgcggcacttgccgccaatgccggtttcaatttttacgccgccttcggttcgcgctggatagggtttgccgtcgtgttggcgtttttctacggtatgatccacttcatcgagaaaaaccgttacagcaataccggcgttaccctgctgatggtattcacattcggtatgggcgtattgatcggccccgtgctgcaatacgcgctccatattgccgacggtgcgaaaatcgtcggcattgccgccgcgatgaccgccgccgtctttttaacgatgtccgccttggcgcgccgaacccggctcgatatgaacgcgctcggacgcttcctgaccgtaggtgcggtcattctgatggtcgccgtggttgccaatctgtttttgggtattcccgcactcgccctgaccatttccgccggttttgtcttgttcagttccttaatgattatgtggcaggtacgcaccgtcatcgacggcggcgaagacagccacatcagcgcggcactgacactgtttatctcgctttacaacatcttcagcagcctgctgaacatcctgttgtctttaaacggcgaggattga

SEQ ID NO: 38390 - DNA, 279 bp, Neisseria meningitidis
gtggcattgtgggttcaagtgtttgaaaccgatgttttaaaaccccctaatgccttatccgataacgaatggagttttcccatgcctaaaatgaaaaccaagtctagcgcgaaaaaacgctttaaagtactgggtaacggcggtgtgaaacgcgctcatgcgttcaaacgccacatcttgactaaaaagaccaccaaaaacaaacgccaattgcgcggtacctctatggtaaatgatcgcgatttggcttctgttgctaaaatgttaccctacgcttaa

SEQ ID NO: 38391 - DNA, 2712 bp, Neisseria meningitidis
atgctatatcatcatagttatgccgaagatgcagggcgcgcgggcagcgaggcgcagatacaggttttggaagatgtgcacgtcaaggcgaagcgcgtaccgaaagacaaaaaagtgtttaccgatgcgcgtgccgtatcgacccgtcaggatatattcaaatccagcgaaaacctcgacaacatcgtacgcagcatacccggtgcgtttacacagcaagataaaagctcgggcattgtgtctttgaatattcgcggcgacagcgggttcgggcgggtcaatacgatggtggacggcatcacgcagaccttttattcaacttctaccgatgcgggcagggcaggcggttcatctcaattcggtgcatctgtcgacagcaattttattgccggactggatgtcgtcaaaggcagcttcagcggctcggcaggcatcaacagccttgccggttcggcgaatctgcggactttaggcgtggatgacgtcgttcagggcaataatacctacggcctgctgctaaaaggtctgaccggcaccaattcaaccaaaggtaatgcgatggcggcgataggtgcgcgcaaatggctggaaagcggagcatctgtcggtgtgctttacgggcacagcaggcgcagcgtggcgcaaaattaccgcgtgggcggcggcgggcagcacatcggaaattttggcgcggaatatttggaacggcgcaagcagcgatattttgtacaagagggtgctttgaaattcaattccgacagcggaaaatgggagcgggatttacaaaggcaacagtggaaatacaagccgtataaaaattacaacaaccaagaactacaaaaatacatcgaagagcatgacaaaagctggcgggaaaacctggcaccgcaatacgacattacccccatcgatccgtccagcctgaagcagcagtcggcaggcaatctgtttaaattggaatacgacggcgtattcaataaatacacggcgcaatttcgcgatttaaacaccaaaatcggcagccgcaaaatcatcaaccgcaattatcaattcaattacggtttatctttaaactcatatgccaacctcaatctgaccgcagcctacaattcgggcaggcagaaatatccgaaagggtcgaagtttacaggctggggacttttaaaggattttgaaacctacaacaacgcgaaaatcctcgacctcaacaacaccgccaccttccggctgccccgcgaaaccgagttgcaaaccactttgggcttcaattatttccacaacgaatacggcaaaaaccgctttcctgaagaattggggctgtttttcgacggtcctgatcaggacaacgggctttattcctatttggggcggtttaagggcgataaagggctgctgccccaaaaatcaaccattgtccaaccggccggcagccaatatttcaacacgttctacttcgatgccgcgctcaaaaaagacatttaccgcttaaactacagcaccaataccgtcggctaccgtttcggcggcgaatatacgggctattacggctcggatgacgaatttaagcgggcattcggagaaaactcgccgacatacaagaaacattgcaacccgagttgcgggctttatgaacccgtattgaaaaaatacggcaaaaagcgcgccaacaaccattcggtcagcattagtgcggacttcggcgattatttcatgccgttcgccggctattcgcgcacacaccgtatgcccaacatccaagaaatgtatttttcccaaatcggcgactccggcgttcacaccgccttaaaaccagagcgcgcaaacacttggcaatttggcttcaatacctataaaaaaggattgttaaaacaagatgatacattaggattaaaactggtcggctaccgcagccgcatcgacaactacatccacaacgtttacgggaaatggtgggatttgaacgggaatattccgagctgggtcagcagcaccggacttgcctacaccatccaacaccgcaatttcaaagacaaagtacacaaacacggttttgagttggagctgaattacgattatgggcgttttttcaccaacctttcttacgcctatcaaaaaagcacgcaaccgaccaacttcagcgatgcgagcgaatcgcccaacaatgcgtccaaagaagaccaactcaaacaaggttatgggttgagcagggtttccgccctgccgcgagattacggacgtttggaagtcggtacgcgctggttgggcaacaaactgactttgggcggcgcgatgcgctatttcggcaagagcatccgcgcgacggcagaagaacgctatatcgacggcaccaacgggggaaataccagcaatttccggcaactgggcaagcgttccatcaaacaaaccgaaactcttgcccgccagcctttgatttttgatttttacgccgcttacgagccgaagaaaaaccttattttccgcgccgaagtcaaaaatctgttcgacaggcgttatatcgatccgctcgatgcgggcaatgatgcggcaacgcagcgttattacagctcgttcgacccgaaagacaaggacgaagacgtaacgtgtaatgctgatggcttgtgcaacggcaaatacggcggcacaagcaaaagcgtattgaccaattttgcacgcggacgcacctttttgatgacgatgagctacaagttttaa

SEQ ID NO: 38392 - DNA, 753 bp, Neisseria meningitidis
gtgcctgtcggcgaagcccgcattccttcaaatccaaaagcggtaaaaggaacaaccgttaccctgtcgcaggaacaacgcctagccaacggagagctgataccgaaaggctctgtggtaacgtggtcggacaatgcggtgaaggttgtgcggcctgatgggaaaaagcggagatttaatagtcgggattgggaacagaaggcattgccgaaaccgcaactaccgaaagattacagagatgacatcaacataggtggaaataatcctagatttaatcagcaacggcatgaaaaaatcgaatcccacaacccaaacagaatagaggagatacgccaacgtaatgccgtttcttctgcagaaaggcaggctgatgcattaaaaaggatgcaaacgtctggccgcacccgcctgcctgggcagccacaaaaaggaaaacccggcgctgctagagaaatgtcctcttcagacaatccgaatcaaacagccgaggcttttgcacgtcgatatttaggcaggaaacctacactaatggaacgagtcgaaggtgaaaaattatacggaggtaaatgtgtgggctgttggaaagcgcaaatgccggacggaacctttgtggtgtataggccagcaggtaatgcttctatgaccaagggaactactgcgtctgttgatattaataacccaacattaaataacttaaatattaatttaaaaggcaagccaacagagttaaaatttaaattccctgctagataa

SEQ ID NO: 38393 - DNA, 987 bp, Neisseria meningitidis; identical to SEQ ID NO: 37169

SEQ ID NO: 38394 - DNA, 588 bp, Neisseria meningitidis
atgaacaatatgtttgccgcaaaattgtccaaactggtttataccgcttccgaccatcctgattccctgtcggagatggaggagtttgaccgcctgattctgctgatacgcaaactgtatcaaatattggacgggcaacatatcctctccagagtaacggtttgccttcactaccggagcaggcgcggtctgattgccttggataaagcggctgccggttgcgatgcggcaatgttgcgcgcccaacgttggcgcatctacacgcagattgcggaacgccttgccgggtcgggcggcggcttcacggttacggcagaaagcgtgtccgccgcctgtccggagcttgaaggacgctatctcgagcttgtccgccgcaccgccacctctttcggtttcgtgcaagtacaggaatatccggcaggcgggcaggaagaaacacaagccgtcccggatgccgcatcggatcattccgtcagaaaaccaatcaaaatcaatatagaagcgaaagtggaacgctatccggcataccgcccgaccgccgccctgaaagtaacccgccggcggtttttccggctgcaaaaccgataa

SEQ ID NO: 38395 - DNA, 1128 bp, Neisseria meningitidis
atgagcaactggaaacccgatattccctataacgatttaccacccctgccgccaaaacaggatattgaaagcaaaaccatcctgaaacgttgtatagccgcccgtgcatcccttgcccgtttaaagcaggcggcagaactgataccgaatcaagccatgctgattaacacccttcctgttatggaagcccgtgcaagttcggaaattgaaaacatcgtaaccacaacggataagctgtttcaatccctgcaaatggatacggaacggcaagaccctgccacgaaagaagccctgcaataccgcaccgccctgtttgcaggctatgaatcactgacgagccgccctttatgcacacaaaccgccatcatggtctgcaacgccatcaagcacccctacgaaatggccatccgcaaaacaggcggcacagccctaaaaggaggcaacagcggaaatgttgtctataccccgcccgaaggagaagaaaccatacgcggcaagctggcaaattgggagcggtttattcacgaaagcggcgatttagacccgcttatcatcatggcggcggcacattaccaatttgaagccatccatccgtttacggacggcaacgggcggacggggcgcatattgaacagcctgctattgattgaaaaagggcttttggatttgcctattttgtatttgagccgctacatcatcgaaaacagggcggactattaccgcctgcttttaggcgtaaccgaacggcaggattgggaaagctggataatctacatcttagacggcgtagccgacaccgccgattggacggtatcgaaaatagatgcgatacgccgcctgttcgagcagacacgtcaacacatacggacacacgcacaaggaatctacacgcacgaactggtaaatcttctgtttgagcagccatatacacgcattgccaacctagaagcggcagggatagccaaacggcagacggcctctaagtacctgaaagagcttttagacataggtgtactgcaagaaatcgtcatcggcagggacaaactattcattcatccgcgcctaatggaactattgcggggagagggcaacagctttacttcattccaatccctcgttaaagcatag

SEQ ID NO: 38396 - DNA, 552 bp, Neisseria meningitidis
  misc_feature 6, 7, 8, 9, 10: 'n' is a, c, g or t
gtgtgnnnnncccatcacgaactggaaacccgtttcggcttacccggcggcggctatgacaacatacagcggctgctgtttcccgacatccgccctgaagatcccgactaccatcagaaaatcatactggcaattgaagacttgcgttacggaaagcgcacgatcagccggcaggcacaagatgccttgatggaacaggaacgccgcctccgagaagcgacgctgttgctgatacagggcagtcaagaaacccgcggacaaggcgaggagccgaaacgcacgcgttattttgaagtttcggcaacccctgcctattcgagccggcacaacaacggacttggcggcaatttccaatacatcggccaattgcccggctatctgaaaatacacggagaaatgcttgaaaaccaatcactcttccggctgtccaaccgtgaacgcaatcccgacaaaccgtttttagacatccattttgacgaaaatggcaaaatcacgcgtattgtcgtttacgaaaaaaacatctacttcaatccaaacttggggcgaagataa

SEQ ID NO: 38397 - DNA, 1305 bp, Neisseria meningitidis
atgaagccgtttgccgaaaatatcccccacagccttcgcggcaactgctgcgacgaagccctgccgccgcatacggtagattgtccggaatgcggctgccgcgcggatgtaccccggttggacagtggagaagcggcgttctgtccccgttgcggacacaaactcttcagggtgggcaggcatcctttttccgccccgcccgcctatgcggcggcttcgctgattttaatggcgtttgcttacggtatgacgtatatcgaggtcgggataccgggtgcggcatccgtcctttcgctgcccgagatgatgcgcctgatggtgtttcaggattatggttttttggccgaagtgatgtttgtgctgactttcggcgcgccggttctgtttctgctgctgtgcctgtatgtctatgccgcgctgatacggaaacaggcgtatcctgcgctgcgtttggcaacgcgtgtgatggtgcgcttgagacaggcgatgatggtggatgtgttttttgtttccactttggtggcgtatatcaagctctcgtctgtggcagaggttcgcttcgggccggcgttttatctgatgttcgcgctgtcggttatgctgattcggacttcggtatcggttccccagcattgggtgtattttcaaatcgggcggctgacgggggataatgcggttcagacggcatcagaaggcaaaacctgttgcagccgctgcctgtatttccgcgacagtgccgaatccccctgcggcgtgtgcggtgcggaactgtaccgccggcggccgaaaagtctgagtatttcgtcggcgtttctgacggcggcggttattttgtatttccctgccaatatcctgccgattatgatttcgtccaatcctgccgccacggaggtcaataccatccttaacggcatcgcttatatgtgggacgagggcgacaggctgattgcggcggttattttcagcgcgagtattttggtgccggtactgaagattgcggcaatgtcggttttgattgcgtccgcccgcttcgctttgccaacgggtgcaaagaaattgtcgcacctctaccgcatcaccgaagcggtcggccgctggtcgatgattgatatttttgtgattattattttgatgtgttcgttccacacttatgccgcgcgcgtcattccgggcagtgcggcagtctatttctgcctggtcgtgattctgacgatgctgtccgcctattatttcgacccgcgcctgctttgggacaaacgcgcttcagacggcattgctttcaatgaaacggaaaaacatgactga

SEQ ID NO: 38398 - DNA, 2226 bp, Neisseria meningitidis
atgactcaaaaatccaccattgtttatacccataccgacgaagcccccgcgctggcgacccaatcgctgctgccgattgtgcaggcgtttgcccgccacgccgatattgatgtcaaaactgccgacatttccctgtccggccgtattttggcggcattccccgaatatctgaccgaagcgcagcgcgtacccgacgcgcttgccgaattgggcgaactggtgaaacagcccgatgcaaacgtaatcaaactgccgaacatcagcgcgtccgtacctcaactgaccgccgcgattaaagaattgcagtctaaaggctttgccgttcccgattatcctgccgaccctcaaaccgatgaagaaaaagccgtacgcgaacgctacgaccgcatcaaaggcagcgcggtaaaccctgtcctgcgtgaaggcaactccgaccgtcgcgcccctaaagcggtgaaaaactttgcgaaaaaaaatccgcacagtatgggcgcgtgggcgaaagactccaaaacccacgtcgccactatgcaaagcggcgattttttccataacgaacaatccgttaccgtacccgaagcgacttccgtatccatcgtgttcaccgacaaacaaggcaacaaaaaagagctgcgcgcgcctgttgccctgaaagccggcgaaatcatcgacgcaaccgtgatgagcaaaaaagccctgctcgccttccttgccgaacaagtgaaagacgcgaaggcaaaaggcgtattgttctcactgcatatgaaagccacgatgatgaaagtgtccgacccgattatcttcggacacgccgtcaaagtgttcttcgcgcctgtatttgaaaaattcggcggcaaactggctgccgcaggtgtcaacgtcaacaacggcttcggcaacctgctggccaatctggacaaactggatgcggacacccgcgccgccgtcgaagccgaaatcgccgccgtttacgccgccaaccctgatttggcgatggttgattccgacaaaggcatcaccaacctgcacgttcccagcgatgtcatcgtcgacgcttctatgcctgcgatgattcgtaattccggccgtatgtgggacaaaaacggcaaagcacaagacaccaaagccgtgattcccgacagcagctatgccggcgtttaccaagcaaccatcgacttctgccgcgaacacggcgcatttgacccgacaaccatgggtactgtgcccaacgtcggactgatggcgcaagcggcggaagaatacggctcgcacaacaaaacctttgaaatcgaagccgacggtcaggttcaagtcattgatgcggaaggaaaagtcctgatgcagcacgacgttgaagcaggcgacatctggcgtatgtgccaaaccaaagacgctccggtcaaagactgggtgcaactcgccgtcaaccgcgcccgcctgagcaacacgcctgccgtgttctggctcgatgaaaaccgtccgcacgacaagagcctgctcgccaaggttaaagcctaccttgccgaactggataccaatggcctcgacatccgcatcctcgctcctgaagaagccgccaagttcagcttgggtcgtctgaaaaacggcgaagacaccatctccgtaaccggtaatgtcttgcgcgactacctgaccgacttgttcccaattttggaactcggcacaagcgcgaaaatgctgtctatcgttccattgatgaacggcggcggtatgtttgaaaccggcgcgggcggttctgcaccgaaacatgttcaacaattcctcgaagaaaaccatttgcgctgggactcgctgggcgaatttctcgcactcgccgtatcgtttgaacatctggcgcaaaaaaccggcaacaccaaagcccaagtcctcgccgacactttggatgcagccaccgaaaaactgctgttgaacgacaaatcgcccaaacgcaaagcgggcgaactcgacaaccgcggcagccatttctacctcaccctctactgggcgcaagaattggcggcgcaagacaaagatgccgaactgaaagccgcatttacgccattggcagccgctttgaccgccgacgaagcgaaaatcgttgccgagctttccgccgtacaaggcaaagcggccgacatcggcggctactacgccgccaatcctgaaaaagccgcacaagtgatgcgtccgagcgcgacctttaatcaggcactaaacgccttataa

SEQ ID NO: 38399 - DNA, 726 bp, Neisseria meningitidis
atggattttctctcttgttggcggcgcatcgcagacgcgcccactatcaggcgttgcgtattatgccacggttcgtccggcgtttcagacggcatctgcgccggctgccgcgacgatttggcggcataccgcaccgacgcggcaaacagctgccccctgtgtttcatgcacgttcaaggcggcgcggtgtgcggcggctgtcagaaaaaaccgcccgcattcgaccggatgtgggcttcgctgcattacgaaccgcccgtcagcaatatgatacacgcgctgaagcacttggctgatttgagcatggtgcagccgctggcagacctgatgatgcagaatccgcccgaccggcttgcagacgaatgtttcgatttcgtcctgcccgtaccgctaagcagggagcggctgctgcaacgcgggttcaaccaaagtgaaagcatcgtcgggctgctggctcaacgctacggttggcgcacgctgcccctgcataccgtattccgccgccaccgacctcctcaaagcacgctcaaaggcagcgaccgactgaaaaacatcaaaaatgcctttgaaatccgcacaccgataccggaaaactgtaatattctgttaatcgacgatgtctttaccaccggcgcgacgctggacgaattggcgaagatgctgaaaaaatcgggcgcaaaccgaatctgctgctggacgctggcacgcacgccaatgaaaaaataa

SEQ ID NO: 38400 - DNA, 1155 bp, Neisseria meningitidis
atgaaattcatcgacgaagcaaaaatcgaagtcgccgcaggcaaaggcggtaatggcgcaaccagtttccgccgcgaaaaattcgtaccccgcggcggccctgacggcggcgacggcggcaaaggcggcagcgtttgggcagaagccgacgaaaacaccaacaccctcgtcgaataccgcttcgtcaaacgctaccaagccaaaaacggcgaaaaaggtcatggttccgaccgttacggcgcaggtgcggacgacatcgtcctcaaaatgcccgtcggcacccttatccgcgacctcgacaccgatgaaaccgttgccgacctcacctaccacggacagcgcgtctgcctcgccaaaggcggcaaaggcggcttgggcaacatccacttcaaatcctccgtcaaccgcgcaccaaaacaatccacgcccggcgaagaaggcgaagcccgttccctgcaactcgaactcaaagtcctcgccgatgtcggcttattgggtatgcccaacgccggcaaatccaccctgattaccgccgtatccgccgcacgccccaaaatcgccaactaccccttcaccaccctgcatccaaacttaggcgtggtacgcatcgacgaaaaccacagcttcgtgatggccgacatccccggcctgattgaaggcgcggcagaaggcgcgggtttggggcatcgtttcctcaaacacttatcgcgcaccggattattgctgcacgtcgtcgatttggcgcccttcgacgaaaccgtcaaccctgccgaagaagcacttgctatcatcaacgaattgcgcaaatacgatgaagaactttacggcaaaccgcgctggctggtgctgaataaactcgacatgcttgacgaagaagaagcccaaacgcgcactgccgccttcctcgaagccgtcggctgggactaccccaaacccgacgaccgtttccaatttgacatggaaaccccgcgcctcttccaaatcagcgcgctgacccaccaaggcacgcaggaattggtacaccaaatcaaccaatacctgaccgagaaaaaacgtatcgaagctgaaaaagccgaagcggagaaagcagcggcaaatgttgaaattatcgaacagcagcctaaaacggatacgggcgtgtttaagccggagtga

SEQ ID NO: 38401 - DNA, 894 bp, Neisseria meningitidis
atgaaaggttttaccattattgaatttttggttgcgggcctgctcagtatgattgtcctgatggcggtcggatcgagttacttcacatcccggaaattaaatgatgcggcaaacgagcgtcttgccgcacaacaggatttgcggaatgcggcaacattgattgtccgcgatgcaagaatggcagggggcttcggttgtttcaatatgtccgagcatcctgcaactgatgttgtttccgatgtggcgcaaaaaaaccgtcttttttccttaaaaaggaacagtacaaataaacttatccccatagcggaatctttaaatatcgaatatcagggttttgcccaggctcgtccggcattgattttccaatacggaatcgatgatcttgatgcgagtgctgagactgttgtagtcagcagctgttccaaaatagcaaaaccgggtaagaaaatatctaccttgcaagaagcaaagagtgcattacagattactaatgatgataaacaaaatggaaatatcacccgtcaaaggcatgtggtcaatgcctatgcggtcggcaggattgccgatgaggaaggtttgttccgcttccaattgaatgaaaagggcaagtggggtaatcctcagttgctcgtgaaaaaggttagacatatgaaagtgcggtatatctatgtttccggctgtcctgaagatgacgatgccggcaaagaggaaacattcaaatatacggataaattcgacagctccacaaatgctgttacgcccgccggggtggaggttttattgagtagcggtactgataccaagattgccgcttcttcagacaatcatatttatgcttaccgtatcgatgcgacaatacgcgggggaaatgtatgcgcaaacagaacactttga

SEQ ID NO: 38402 - DNA, 1347 bp, Neisseria meningitidis
atgtcggataacgttccaacgattgcggcagtcgctaccgcacccgggcgcggcggcgtgggcgtgatacgcatatcggggaaaaacctgctgccgatggcagaggctttgtgtgggaaaacgcccaagccgcgcgtggcaacctatgctgattttacggacgcggacggtcaggcaatcgacagcgggcttttgcttttttttgccgcaccggcaagttttacgggcgaagatgttatcgagcttcagggacacggcgggccggtagtgatggatatgctgctgaaccgctgtttggaattgggcgcgcgccttgccgaaccgggcgagtttacgaagcgtgcgtttttaaacgacaaactggacttggcacaggcggaaggcgtggcggatttgattgacgcatccagccgttcggcggcgcgtctggcgttgcgctcgctcaaaggcgatttttcgcggcggatacacggtctggtcgaagacttgattaccttgcggatgctggtcgaagcgacgttagattttcccgaggaagacattgattttctcgaagcggcagacgcacgcggcaaactggacggcttgcgccgcgccgtggatgatgtgcttgccaacgcgcagcagggcgcgattttgcgcgaaggtctgaatgtcgtattggtcggcgcgccgaatgtcggcaaatccagcctgttgaacgcgctggcgggcgacgaagtggcgattgttaccgatattgccggaacgacgcgcgacgcggtcagggaacgtatcctgattgacggcgttccggtgcatattgtcgatacggcaggtttgcgcgagacggacgacgtggtcgaacgcatcggcatcgaacgcagccgcaaagccgtatccgaagccgatgtcgcgctggtgttggtcgatccgcgcgaaggcgtgaacgacaagacacgggcgattttggacgcgttgccgccggagttgaaacgcatcgaaatccacagcaaatccgatttgcacgcacacgcggcaggcgggttcggtacgggcgcggaaaccgtcatcgcgctgtcggcgaaaaccggcgacggcttggacgcgctgaaacggacgttgttgcgcgaggccggatggcagggcgagggcgaagggctgtttttggcgcggacgcggcacgtcaacgcactcaaagcagcgcaggaagaattgtcgctggcggcattgtgcggcaaccatcaaatcgagctgtttgccgaacacttgcgcttggcgcaggtcgcatgcggcgaaatcacgggcgagtttacggcggacgacctgctcggcgtgattttttcgaggttttgtatcggaaaataa

SEQ ID NO: 38403 - DNA, 1422 bp, Neisseria meningitidis
atggacacaaaagaaatcctcggctacgcggcaggctcgatcggcagcgcggttttagccgtcatcatcctgccgctgctgtcgtggtatttccccgccgacgacatcgggcgcatcgtgctgatgcagacggcggcgggactgacggtgtcggtattgtgcctcgggctggatcaggcatacgtccgcgaatactatgccgccgccgacaaagacactttgttcaaaaccctgttcctgccgccgctgctgtctgccgccgcgatagccgccctgctgctttcccgcccatccctgccgtctgaaatcctgttttcgctcgacgatgccgccgccggcatcgggctggtgctgtttgaactgagcttcctgcccatccgctttctcttactggttttgcgtatggaaggacgcgcccttgccttttcgtccgcgcaactcgtgtccaagctcgccatcctgctgctgctgccgctgacggtcgggctgctgcactttccggcgaacaccgccgtcctgaccgccgtttacgcgctggcaaaccttgccgccgccgcctttttgctgtttcaaaaccgatgccgtctgaaggccgtccggcgcgcaccgttttcatccgccgtcctgcatcgcggcctgcgctacggcataccgatcgcactaagcagcatcgcctattgggggctggcatccgccgaccgtttgttcctgaaaaaatatgccggcctagaacagctcggcgtttattcgatgggtatttcgttcggcggagcggcattattgttccaaagcatcttttcaacggtctggacaccgtatattttccgcgcaatcgaagcaaacgccccgcccgcccgcctctcggcaacggcagaatccgccgccgccctgcttgcctccgccctctgcctgaccggcattttctcgcccctcgcctccctcctgctgccggaaaactacgccgccgtccggtttatcgtcgtatcgtgtatgctgcctccgctgttttgcacgctggtagaaatcagcggcatcggtttgaacgtcgtccgcaaaacgcgcccgatcgcgctcgccaccttgggcgcgctggcggcaaacctgctgctgctggggcttgccgtaccgtccggcggcgcgcgcggcgcggcggttgcctgtgccgcctcattttggctgttttttgttttcaagaccgaaagctcctgccgcctgtggcagccgctcaaacgcctgccgctttatatgcacacattgttctgcctggcctcctcggcggcctacacctgcttcggcactccggcaaactaccccctgtttgccggcgtatgggcggtatatctggcaggctgcatcctgcgccaccggaaagatttgcacaaactgtttcattatttgaaaaaacaaggtttcccattatga

SEQ ID NO: 38404 - DNA, 423 bp, Neisseria meningitidis
atgaaaatcaccaaaatcttcaccttcgactcctcgcatatgctcgacgggcatgacggcaaatgccaaaacttgcacggacatacctacaaactcgaaatcaccgtttcagacggcattatcaaaggcggcgcgaaagacggtatggtgatggactttaccgacttgaaagccattgtcaaacaacacattaccgaccccttcgaccacgccttcatctaccacggcggcaacagccgcgaatctcaaatcgccgcactcttggaaggctggaacatgaaaaccctgcgcctgccctgccgcaccactgccgaaaatatggcggtcgaaatgtacggccgtctgaaaaacgcggggctgaacgtgtgccgcgtcaaattgtgggaaacgccgacatcgtgtgcggagtatgaaggggagtag

SEQ ID NO: 38405 - DNA, 645 bp, Neisseria meningitidis
atggaatcaacactttcactacaagcaaatttatatccccgcctgactcctgccggtgcattttatgccgtatccagcgatgcccccagtgccggtaaaactttgttgcacagcctgttgaaagcggatgcggacgaaatggtcagcagtgagaagctgcttacctgggcggacaccgccgacatcgataccgctttgaacctgttgtaccgtttgcaaaaactcgaattcctctatggcgatgaaaacggtcattcagacggcatcaatttgtcggacgagcaattgccgttgctgatggaacaattgtccggcagcggtaaggcgttattggtcgatcggaacggtctgtatcttgccaacgccaatttccatcatgaggcggcggaagagttggggttgttggcggcagaagtcgcacagatggaaaagaaataccggctgctgattaagaacaacctgtatatcaacaataacgcttggggcgtttgcgatccttccggtcagagcgaattgacatttttcccattgtatatcggttcaaccaaatttattttggttatcggcggcattcccgatttgggcaaagaggcatttgttactttggtaaggattttataccgccgttacagcaaccgcgtgtaa

SEQ ID NO: 38406 - DNA, 567 bp, Neisseria meningitidis
ttgaacatcaaatattcgggcatcgaaaacaggtttgaaaccgccatcctgaagaaaaacggcgtaagatccggcttcgtctccttcgcccccaaccttgccgccgtcaaactgaacgattatgccaaagttagaaaacggattaccaaaaccaaacagaaagccgacatcgtcattgtaatgttccacggcggcgcggaagggaaacaggcggaacacctgccgttcgataccgaaatcttctatggggaaaacaggggcaacgtcgtcgagtttgcacggcttgccgtcgattccggcgcggatgtcgtattcgggcaggggccgcacgttacacgcgccgtcgaactttaccgcgaccgcttcatctcttacagcggcggcaactttgccacctacggcgcaatcaacacctccggcatcagcggcattgcgccgattttcaaaattatcaccaacaaacagggtaaatttatttccggaactatcatccctattacccaagccgacgataaaatccccaaaatcgaccctgaaaaaccgttatcgggcggattatttatctga

SEQ ID NO: 38407 - DNA, 453 bp, Neisseria meningitidis
atgaatattgaagtagaaatgaaagtattggacgaacggatggcggatgttgtccctgtctatgcaacgaagggttctgcaggtttagatttgcgcgcctgtttggatgaggaagtcgttttgcagccgggtgaaacgtttcttgtgccgacaggtttggcaatttatttggctgatccttcatatgccgccgttttgctgccccgttccggattggggcataaacacggcattgttttgggcaatttggtcggcttgattgactccgattatcaaggggaattgaaggtttcgttatggaacagaagcagcgagccgtttactgtcaaaccgtttgagcgtatcgcgcagatggttatcgtgccaatcgtgcaggcgcgtttcaaacgtgtcgaggaatttgtcggaagcagccgtggagaaggcggtttcggcagtacgggtttgcattga

SEQ ID NO: 38408 - DNA, 564 bp, Neisseria meningitidis
atgaccgatttagaaaccaaacgccttgaaacacaggcgatgcttgaaaacgccgatcttttgttcgaccaaggccaatgccgtgccgcactgcaaaaagtggcggacgagattacgcgcgatttgggcggcaaatatccgctgctgctgcccgtgatgggcggcgcggtggtgtttacggggcagttgctgccgctgttgcgttttcccttagattttgattatgttcacgtttcccgttacggcgacaagctggagggcggcgcgttcaactggaagcgtatgcccgatgcggaacaaatccggggcaggcacgtcgtcgtgctggacgatattttggacgaagggcatacgatgtccgccattcaagccaaacttttggaaatgggtgcggcaagctgccgtgcggcggtgttcgccaacaagctgattgacaaacccaagcctatccgagccgattatgtcggactggatgtgccgaaccgttatgttttcggttacggcatggatgcggcgggctgctggcgcaatctgggcgagatttacgcattggacggaaaataa

SEQ ID NO: 38409 - DNA, 120 bp, Neisseria meningitidis
atgaacgaacaagaacttgacctcgacaacctgcttgaagattttgacggcgttaccgtggaaggcggcgtcgattcggaaaacgacgacggctgtgaaggcggagcgtgcaaaatctaa

SEQ ID NO: 38410 - DNA, 2214 bp, Neisseria meningitidis
atgaccgccatcagcccgattcaagacacgcaaagcgcgactctgcaagaattgcgcgaatggttcgacagctactgcgccgcgctgccggacaacgataaaaaacttgtcttagccgcccgttcgctggcggaagcacattaccccgccgatgccgtcacgccgtatggcgagccgttgtccgaccacttcctcggcgcggcacaaatggtcgacgaactcgacctgctgcccgatgccgtcgccgccaccctgcttgccgacatcggacgctacgtccccgattggaatctattggtttccgaacgctgcaacagcaccgtcgccgagctggtcaaaggtgtggacgaagtgcagaaactcacccacttcgcccgggtggacagcctcgccacgccagaagaacgcgcccagcaggcagaaactatgcggaaaatgctgctggcgatggttaccgacatccgcgtcgtgttaatcaaactggcgatgcgtacgcgcaccctgcaattcttaagcaacgttcccgacaatcctgaaaagcgcgccgttgctaaagaaaccctcgacatttttgccccactcgccaaccgcttgggcgtgtggcaactcaaatggcagctcgaagatttgggcttccgtcatcaagagccggaaaaataccgcgaaatcgccctgcttttggacgaaaaacgcaccgagcgcctcgaatacatcgaaaacttcctcaatatcctgcgtacggaactcaaaaaatacaatatccactttgaagtcgccggccgtccgaaacacatctactccatttacaaaaaaatggtgaagaaaaaactcagcttcgacggcctctttgacatccgcgccgtgcggattctgattgataccgtccccgagtgttacaccacgctgggcatcgtccacagcctctggcagcccattcccggcgagttcgacgactacatcgccaaccccaaaggcaacggctataaaagtttgcacaccgtcatcgtcggcccggaagacaaaggcgtggaagtgcaaatccgcaccttcgatatgcaccaattcaacgaattcggtgtcgccgcccactggcgttacaaagagggcggcaaaggcgattcagcctacgaacagaaaatcgcctggttgcgccaactcttggactggcgcgaaaacatggcggaaagcggcaaggaagacctcgccgccgccttcaaaaccgagcttttcaacgacacgatttatgtcctgaccccgcacggcaaagtcctctccctgcccacgggcgcgacccccatcgacttcgcctacgccctgcacagcagcatcggcgaccgttgccgcggtgcgaaagtcgaagggcagattgtgccgctgtccaccccgctcgaaaacggacagcgtgtcgaaatcattaccgccaaagaagggcatccttccgtcaactggctttacgaaggctgggtcaaatccaacaaggcaatcggcaaaatccgcgcctacatccgccagcaaaacgccgacaccgtgcgcgaagaaggccgcgtccaactcgacaaacagcttgccaaactcacgcccaaacccaacctgcaagagcttgccgaaaatctcggctacaaaaagccagaagacctctacaccgccgtcggacaaggcgaaatttccaaccgcgccatccaaaaagcctgcggcacgctgaacgaaccgccgcccgtacccgtcagcgaaaccaccatcgtcaaacagtccaaaatcaaaaaaggcggcaaaaacggcgtgctcatcgacggcgaagacggtctgatgaccacgcttgccaaatgctgcaaacccgcgccgcccgacgacattgtcggcttcgttacccgcgatcgcggcatttcggtacaccgcaaaacctgcccctctttccgacacctcgccgaacacgcgcccgaaaaagtactggacgcaagttgggcggcgttgcaggaaggacaagtgttcgccgtcgatatcgaaatccgcgcccaagaccgctccgggcttttgcgcgacgtatccgacgcgctcgcccgccacaaactcaacgttaccgccgtgcaaacccagtcccgcgacttggaagccagtatgcggttcacgctcgaagtcaaacaggtcaacgacctcccgcgcgtcctcgccagcctcggcgacgtcaaaggcgtattgagcgttacccggctttaa

SEQ ID NO: 38411 - DNA, 312 bp, Neisseria meningitidis
atgtttaatcaaactcaaactgtaacttatcccgcaacttttttaggagctaaaaaattcaaaggcgaaattgatggctctaatatcgacacttgttccgtattggttgcaacacctttgccggcacagtcgggaaatgctgttggattcacggcagcacaaatgaagttcggggacagtaagaatttctcaaaattagagaatctcaaatacccgtgcgaagttatggtaacggttgaaatgacttcgacaggtaagggcatggttccttcattaattgattttcaggtggcagaaaagccgaaaggttga

SEQ ID NO: 38412 - DNA, 1020 bp, Neisseria meningitidis
atgaacacaatgctaatgtcgggcgcggctgccgcgctgcttgccggcatcatcctttatttcaaaagcgacaagaagcggcaggaaaacggtgaatggagttccggcctcgaatacgcctatatcctgacagcggtcggcgtgtttgccgctttgtccctgtttatgagctttaccgccgttttcctgattttcgttgtattgtgcggtacggcttggggggtatacaaataccgcctgaagactcatcccgaaatctcggaaagcagccacttcggcgattatttcggcagtttcttccctaccgttttggtattgtttctcatccggtcgtttattgccgaaccgttccaaattccatccagctccatgcgcccgggcctgatcaagggcgatttcattttggtcggcaaattttcctacggcttgcgcgtacccgttttaaacaatatatttatccccacaggcaaaatcgaacggggcgatgtcgttgtttttaattatcctctgcagccggagatgacctacatcaagcgtattgtcggcattccgggcgatgtggtcgaatatcgggataagattttgacggtaaatggcaaacccacttccgatattcctaacggcacataccgttatcccgacgacaccgacccatccgaaatccacaatacggatatgttccacagcggtttggacggcaaatccttcaatattctgaaaaaagaaggacagcctgccgtttccctgcccgtattgggcaaatatacctccgatattatgtctgaaaacggatattccatagagcaaagcggtttggaacactgccaatatgccgacgacggcagcggtttcgtgtgcaaagttcccgaaggacgctatttcgctatgggcgacaaccgcgacaacagtgccgattctcgctactggggatttgtggatgacaagctggttgtcggcaaggcaatgttcattttgatgaacttcggcgatttcggcagggccggtacggcaatccgttag

SEQ ID NO: 38413 - DNA, 690 bp, Neisseria meningitidis
atgaagcgcaaaaatatcgcgctgattcccgccgccggcatcggggcgcgtttcggtgcggacaaacccaagcaatatgtcgaaatcggaagcaaaaccgttttagaacatacgcttgggatttttgaacggcatgagggcgtcgatttgaccgtcgttgtcgtctcgcccgaagacacgtttgccgataaggttcagacggcatttccacaggttcgggtgtggaaaaacggcggacagacccgcgccgaaaccgtccgaaacggtgtggcaaaattgttggaaaccggtttggcggcggaaaccgacaatattctggtacacgatgccgcgcgttgctgcctgccgtctgaagctttgacgcggttgatagaacaggcgggcaacgctgccgaaggtgggattttggcaattcccgttgccgatacgctcaagcgcgcggacggtgggaacattagtgcaaccgtcgagcggacgagcctttggcaggcacaaacgccgcagcttttccgcgccgggctgctgcaccgcgcattggctgcggaaaacttggacggcattaccgatgaagcgtccgccgtcgaaaaattgggcatccaccctttgctggtgcagggcgacgcgcgcaatttgaaactgacgcagccgcaggacgcatacatcgtcaggctgctgctcgatgccgtctga

SEQ ID NO: 38414 - DNA, 324 bp, Neisseria meningitidis
atgattgttgacgaaaaatctacttcagatgtactgaaacaatatcaagaactagggtttgatttgacaaaatcgatgataatagagttttttatagagggttctcaaaagaatctgcaatcaatagaaagtcaaatcatttcttatcggcaagattttcaaatcagtattgagcaaaatgaattcggagaaatgtggacttgctattgttccgtcaatattatcccttctcttgaaaacattttagctattgaaactacgttatttgatattgcacaaaaaaatgattgtaattatgaaggttttggttcgtatgggaactaa

SEQ ID NO: 38415 - DNA, 1581 bp, Neisseria meningitidis
atgccttccatcaaacgcgccctgatcagcctgtccgacaagacgggcgcagtcgaatttgcccaaaccctgaccaagctcggtgtcgaaatcctctctaccggcggcacggcgaagctgcttgccgatgcgggcgttcccgtgattgaagttgccgactacaccggtttccccgaaatgctcgacggccgcgtgaaaaccctgcatccgaaaatccacggcggtattttgggccggcgcgatttggacgaacacgtcgccaagatggaagaacacggcatcggcaacatcgacctcgtgtgtgtcaacctctaccccttcgccgccaccatcgccaaaccaaactgcacgctggaagacgcgattgaaaacatcgacatcggcggcccgaccatggtgcgctccgccgcgaaaaactggaaacacgtcgccatcgttaccgacacagccgatttcccggccatcgccgccgaactcgaagccaacaatggcgcattgagcgacaaaacccgcttcaacctgtcgcgcaaggcgttcagccacaccgcccaatacgacggcatgatttccaactacctgacctcactttcagacgacgttttgagcggagagcctgaaatcggcgaatttccaagccagttcaaccaaagctggattaaagtgcaagacatgcgctatggcgaaaacccgcatcagcgcgccgcgttctaccgcgatattgaccccgccgcaggcagcctttccgcctacaaacaactgcaaggcaaagaattgtcttacaacaacatcgccgatgccgatgccgcatgggaagccgtcaaatcctttgacgcgccagcctgcgtgatcgtcaaacacgccaatccgtgcggcgtcgccgttgcagccgatacattgaccgcctacaaactcgcctacgtcaccgacaccaccagcgcgttcggcggcatcatcgccttcaaccgcgaagtggacggcgaaaccgtcaaacagattaccgacaaccagtttatggaagtcttgatggcgccgaagtttaccgccgaagccctcgaaatcgccgccgccaagaaaaacgtgcgcgtattggaagtgccgcttgaggcaggcgcaaaccgcttcgaactcaaacgcgtcggcggcggactgttggtacaaacccctgatattcaccgcctcaaccgcgccgatttgaaagtcgtctccaaacgccaaccaaccgagcaagaatggaacgacctgatgtttgtttggaacgtcgcaaaatacgtcaaatccaacgccatcgtcttcggcaaaggcggtcaaacctacggcatcggcgcaggccaaatgagccgcgtggacagcacccgcatcgccgcccgcaaagcgcaagatgccaatctcgacctcaacggcgcatgtgccgcttccgatgctttcttccccttccgcgacggcgtggacgtgattgccgagcagggcatcaaagccatcatccatccggcaggttcgatgcgcgatcaggaagtcttcgacgcagcggacgaacacggcatcgccatggtcgtaaccgacgtgcgccacttccgccattaa

SEQ ID NO: 38416 - DNA, 543 bp, Neisseria meningitidis
ttggacgaagtggaaaaagcccatcccgacgtgttcaacatcctgctgcaagtattggatgacggtcgtttgaccgacgggcaaggcaggacggtagattttaaaaataccgtgattgtgatgacttccaacatcggcagccagcacatccaacaaatgggcattcaggattacgaagcggtaaaagaagttgtgatggaggatgtgaaagaacatttccgtcctgaaatgatcaaccgcatcgacgaagtggtcgtgttccacggactggatcaggataatatccgcaacattgcgaaaatccagctcaaaggcttggaaaaacgtttggaaaaacaaaacctgcgcctgactgtttccgatgccgcactggacatcatcgccaaagccggtttcgacccgatttacggcgcacgtccgctcaaacgcgccatccagtcggaaatcgaaaacccgctggcaaaagccctgcttgccggaaactatgcgcccgaaagcgaaatcagggtagaagccgacggcgacagactgaaatttgcctga

SEQ ID NO: 38417 - DNA, 2064 bp, Neisseria meningitidis
atgacaacccaaacccttttaatcgaactccttaccgaagaacttccgcccaaagcccttaataatctgggcaaccattttgccgccgccgttgccgaaggcttggaaaaagcgcaactggttgacggtgcagccgaatttacggcttatgcctcgccgcgccgtttggcggttcaagtcaaaaacgttaaagccgttcaggccgaccaaaaaatcgtgaaaaaaggccctgccgtggcgaatgccatgaaagacggtgcgccgaccaaggctttggaaggtttcgcacgcggtgcgggcgcgaaaatcgaagacttgaccatcgtccacgacggcaaacaggatgtgtacgcctacgaatacgtccaaaccggcaaaccgctgggcgaacttttggaagacattatcaatcaagccgttaagaaactgccgattccgaaagtgatgcgttggggcagcagcacgtttaccttcgtgcgccctgttcacgggctgattgtgctgcacggcggcgacatcgtaaacgtcagcgttttgggtctgcaaagcagcaatcaaaccttgggacaccgcttcttgtccaacggcgaaatcaccattgaaaacgccgacagctacgccgaacaaatgcgcgggcaaggcaaagtcgtcgcttcgtttgccgagcgcaaagccgcgattcagacggcattggaagggcaggcgcgccgtctgaacgcgaccgttgccgccgatgaagcattgctggacgaagtaaccgcgctggtcgaatggcctgtggtattggaagccggttttgaagaacacttcctcgccgtgccgcaggaatgcttgattctgacgatgcagcaaaaccaaaaatacttcccgctgctcgatcaaaacggcaagctgatgaaccgcttcctgctggtctccaacctgcaaaccgcagacccgtcgcacatcatccgaggcaacgaacgcgttttgcgcgcgcgcctgtctgatgccgagttcttctacaaacaagaccaaaaagcgactttggaaagccgcctgcccaagttggcaaacgtggtgtaccacaacaaaatcggttcgcaagccgaacgcatcgaacgcctgcaaagcatcgccgcccacattgccaaagcattgggcgcggatgccgccgcagccgagcgcaccgcgcgtcttgccaaagccgacttggtaaccgaaatggtcggcgagttccccgaactgcaaggcacgatgggcaaatactatgcccgtttggacggcgaaaccgaagaaattgccgaagccgtcgagcaacattaccaaccgcgttttgccggcgacaacttgccgaacggcaaagtcgccactgccgttgcacttgccgacaagctggaaaccctggtcggcatttggggcatcggtctgattcctaccggcgataaagacccctacgccctgcgccgcgccgccttgggtattttgcggatgctgatgcagtacggtttggacgtgaacgaactgattcagacggcattcgacagcttccccaaaggtttgctcaacgagaaaacgccgtctgaaaccgccgactttatgcaggcgcgtttagccgtgttgctgcaaaacgattatccgcaagacatcgttgccgccgtactcgccaagcagccgcgccgtttggacgatttgaccgccaaactgcaagccgttgccgcgttcaaacaactgcccgaagccgccgcgctcgccgccgccaacaaacgcgtgcaaaacctgctgaaaaaagccgatgccgcgttgggcgaagtcaatgaaagcctgttgcaacaggacgaagaaaaagccctctttgccgccgcgcaaggcttgcagccgaaaatcgccgccgccgtcgccgaaggcaatttccaaaccgccttgtccgaactggcttccgtcaagccgcaagtcgatgccttctttgacggcgtgatggtgatggctgaagatgccgccgtgaaacaaaaccgcctgaacctgctgaaccgcttggcagagcagatgaacgcggtagccgacatcgcgcttttgggcgagtaa

SEQ ID NO: 38418 - DNA, 1407 bp, Neisseria meningitidis
atgaccgccgctcctgatatcctctaccggcaagccgccgcccttttggaacaatccaataccgcccaagccctgcccctgttgcaacaggcggcagagcaaggttatgcggaagctgctttcgtattgggcaaccatctgctgcaaaacggccaaccggagcaggcactttcatggttggaagccgccgcggcccaacgccatcccaaagcactcttctccctgctgcaacaacgcgaacacaacggcaccccgaccggacagcttctcaacgactatgcctggctgggtgagcaggggcactcagaagcccaattaatcctcatgcgttaccacgcgcaacgcaacgatccacaatcgctctactgggcggaacttgctgccgcccgatatgccgcacctgcgtattaccatctggcacgccatcatcaacgccaaggcgacgttgaaacagccatcgaacaatacgaaaaagcggcagcactcggcgtaactgccgcctgctggcaacttggtcaaatctacttctacggtacaggtgtcagccccaaccacgcacaagccgaacactatctcgaaccagccgcacaagccggccacatcgccgcacaaacgctgctggctgaccttcttgccgcccaacgcaaacctgaagccttggaatggtatcgtcgtgccgccgataaggaacaagcggaagcacagtctaagctggcccaatacgccctgaccggcgaactttccgaacgcgatccgttccaagcggcacgatatgccaaagccgctgccgagaaaaaccatcctgaagccctgaaaatcatgggcgacctctaccgctacggtctcggtatcaaagccgacaaccatatcgcgcaagattactaccaccgtgccgccgcgctgggttctgccgccgcagcacaaaaactcatcagcgacgccgcgctgtaccatccgcaacaatacgaacaaatcaaaactgccgccctgcaacaacaacaaaccgaaaccatctaccgtttggcggaagcacaagcctgcgccatcggccgtcccgccgactacaatgccgcgcgaaaaaattacatggaagctgccgggttccaccataaaaacgcagcggcagccttaggccgcatctaccattacggcctcggtacggcgcaagatcctcgggcggctgcacactggtacgccattgctgccgaacaaaaccacccttccgcccaataccacctcgcctgtttttactatcacgggcaaggtgtcggctgtcatgttccgaccgcctgctactggctgcaggccgccatcggcaacggccacacttcggccgaatcattaatatccctattagaacaatggcgacgcgaagcacaccatgccatcggacaaaaggccgtctga

SEQ ID NO: 38419 - DNA, 537 bp, Neisseria meningitidis
  misc_feature 8, 9, 10, 11, 12: 'n' is a, c, g or t
gtgtgtgnnnnnactgccgaacaatacggcaggctgacactgaaccccctgccccatatcgatttggtcggcacaatcatcgtaccgctgcttactttgatgttcacgcccttcctgttcggctgggcgcgtccgattcctatcgattcgcgcaacttccgcaacccgcgccttgcctggcgttgcgttgccgcgtccggcccgctgtcgaatctggcgatggctgttctgtggggcgtggttttggtgctgactccgtatgtcggcggggcgtatcagatgccgttggctcaaatggcaaactacggtattctgatcaatgcgattctgttcgcgctcaacatcatccccatcctgccttgggacggcggcattttcatcgacaccttcctgtcggcgaaatattcgcaagcgttccgcaaaatcgaaccttatgggacgtggattatcctgctgcttatgctgaccggggttttgggtgcgtttattgcaccgattgtgcggctggtgattgcgtttgtgcagatgttcgtctga

SEQ ID NO: 38420 - DNA, 621 bp, Neisseria meningitidis; identical to SEQ ID NO: 37903

SEQ ID NO: 38421 - DNA, 594 bp, Neisseria meningitidis
atggccgacggtatgggcaatctgattggctgggaaaaaacggggcttgttgtcggtaagcagtggataaccgcaaaagacgacaaggtatccgatgtctgcaatgccaacggcgagatgggcgtaatcgggctttacgagcctttctcacacggcgcattgacgatacccggtcatccgaactgccgatgcgaggttgtttccgtatcgggtggcgaattgggggaatttgccgaaaaaaaggagcttcgtaaagcggctatgcagtatgcgcgggataactttatcggcaaaagctatgtcaataaaaacagcgggcatgaactgaaggtaacttggcaaggtgtgaaacacgctgcgtcaaaggcaaatcaggcggaattatccatcatgacaaaacttgatgacttattgcgctacgcaaaatatgagggttcttattcggataggaaaggtcatcctaatattattgcagcacataagtatcgtgccgttgccaaggttgggaatgagcctttaaatatcggtgtgattgtaagggaatttccagacgaccataaacattacgaccatttcatcttgaaggatgaataa

SEQ ID NO: 38422 - DNA, 876 bp, Neisseria meningitidis
atgaatacagaaattgaaattatcgcaaccgacaaagtaagcaatcaggcagcgatgcgcagtgtgctggtgatggagcagtggggtaacggcgagacttatagcgaagagcgttgggttgaacgcggtcgtcaagcagtacggcagacgatggaaggcatgttcgaactgggacgtgcgctgattattttaaaagagcatacggaacacggacggtttatggaaattgtgaaaagccaatttgggctgggtatcgcagaaacatcacgtctgatgtcagccactcgccgctttgcgaccccgcaaatgcagaaagccgcgccgaagctgatggatttgggcaagtcgaagctgcttgagctgctggtcgaagaagacgttacgctggtgggtttggccgaaggggaagaagtcaacggcatgacctttgacgatgtggaccgaatgacggtgcgcgagctgcgcgtcgccctgcgcgaaagccgcgaaaacctcgccgccaaagacgaagtgatgaaaaccaaaacagccaaaattgatgagctggccgagaagctggctaagaagcaaaccgttgtcagagagccgaaggcggaagacgtaggcagcgagttggcgatgcagttaacaagccttgaggtcggtatccgcagtcaagtgagccgtctgaaagatttgttcgaccaacttaatgcgcacagtgaggcacacgggatcagccatcaggcaaagatggtcggcacgctcaatcaaattattttggactgcgagcaactgcgcgaaagctatgccctgccgactgaagcaccgacagacaatgtgccggaatggttgggcggtgaaacgggagaaggcgatgaatccggcaatgattga

SEQ ID NO: 38423 - DNA, 540 bp, Neisseria meningitidis
atggctcggttgagagagttttataaagagacagttgttcctgaattggttaaacaatttggttacaaatcagtaatggaagtcccgcgtattgaaaaaatcaccttgaatatgggtgtgggtgaggctgttgctgacaaaaaagttatggaacatgctgtttccgatttagagaaaattgccggtcaaaaaccggttgttactgttgcccgtaaatctatcgcaggttttaaaatccgtgataactatccggttggttgcaaagtaacattgcgtcgtgatcaaatgtttgaattcttggatcgtttgattactattgcattacctcgcgtacgtgacttccgtggtgtgagcggtaaatcatttgatggccgtggcaattacaatatgggtgttcgtgagcaaattatttttccggaaattgaatacgataaaattgatgctttgcgtggtttgaatattactattactactacagcaaaaaccgatgaggaagcgaaagctttattgtcattgtttaaatttccgttcaaaggataa

SEQ ID NO: 38424 - DNA, 1251 bp, Neisseria meningitidis
atgttttcaaaaagcgttaccctcgcacaatatgaccccgatttggcagcagccattgcccaagaagaccaacgccagcaagaccacgtcgagctgattgcctctgaaaactacgtcagctgcgccgtaatggaagcgcaaggttcccagctgaccaacaaatacgccgaaggctaccccggcaaacgctactacggcggctgcgaatacgtcgatattgtcgaacaattggcaatcgaccgcgtcaaaaaactgttcggcgcgcaatacgccaacgttcaaccgcactccggctcgcaagccaaccaagccgtgtacgcttccgttttaaaaccgggcgacaccattttgggtatgtctttggcgcacggcggccacctgacccacggcgcgagcgttaatatttccggcaaactctacaatgccgttacttatggtttggatgaaaacgaagtgctcgattatgccgaagtggaacgcttggctctcgaacacaaacccaaaatgattgtggcgggtgcgtctgcctacgcgttgcaaatcgactgggcaaaattccgcgaaatcgccgataaagtcggcgcatacctctttgtcgacatggcgcactacgccggactgattgccggtggcgaatatcccaaccccgtgccattctgcgacttcgtgaccaccaccacccacaaaaccctacgcggccctcgcggcggcgtgattctgtgccgcgacaatacccacgaaaaagcactgaactcttccatcttcccaagcctgcaaggcggtccgctgatgcacgtcatcgccgccaaagccgtagcgtttaaagaagcgttgcaacccgagttcaaacaatacgcaaaacaagtgaaaatcaatgctgccgccatggcggaagaactggtcaaacgcggtttgcgcatcgtttccggccgcaccgaaagccacgttttcctcgtcgacctgcaaccgatgaaaattaccggcaaagccgccgaagccgctttgggcaaagcgcacatcaccgtcaacaaaaacgccattccgaacgatccggaaaaacccttcgttacctccggcatccgcatcggctccgccgccatgaccacacgcggttttaacgaagccgacgcacgcgtattggcgaacttggttgccgacgtattgtctaaccccgaagacgaagcgaatctggaaaacgtccgcaaacagattaccgccctctgcgacaaataccccgtttacggcgcgtaa

SEQ ID NO: 38425 - DNA, 438 bp, Neisseria meningitidis
atggacacacccgtttacctttacaccgacggcgcgtgcaaaggcaatcccggcgcgggcggctggggcgtgttgatgcgctacggcagccacgaaaaagaacttttcggcggcgaagcgcaaaccaccaacaaccgcatggagctgaccgccgtcatcgaaggactgaaatcgctcaaacgccgctgcaccgtcatcatctgcaccgactcgcaatacgtcaaaaacggcatggaaaactggatacacggttggaagcgcaacggctggaaaaccgccgccaaacagcccgtcaaaaacgacgatttatggaaagaactcgacactctggtcgggcagcaccaagtcagttggacttgggttaaaggacacgcgggacacgcggaaaacgaacgcgccgacgatttggcaaaccgtggcgcagcgcagttttcctga

SEQ ID NO: 38426 - DNA, 216 bp, Neisseria meningitidis
atgaccatcacagaagaatactccatcgacatccgcgtaaccgcagaacaggggaaaaacgactacggctaccccaccgaacgctacggatgcgacatcatcaacacagacggggagctgcttgtcggcatagagccagagtacaaaaccccctttgccgccgtcagaaaggcgctcatctgtctggcaaaagacaacctcaaaaacgctgcctga

SEQ ID NO: 38427 - DNA, 1215 bp, Neisseria meningitidis
  misc_feature 1200, 1201, 1202, 1203, 1204: 'n' is a, c, g or t
atgaaatcactcaaaaccttcctcatttggggcatagtggtactggtcggcttagcatcctttaccactctggctctcagccgaggcgaacaggtcagcgcggtatggatggttaccgccgccatatccgtttactgcatcgcctaccgtttttacagcctctacatcgccaaccgcgtaatgcggctcgatcctaaccgcctgactccggcagaacgccacaacgacggcttggactacgttccgacgcacaagggcgtattgttcggacaccactttgccgcgattgccggcgcgggccccttggtcggcccggttttggcggcgcaaatgggttacctgcccggtactttgtggattatcttcggcgtggtgtttgccggcgcggtacaggatatgatggtcttgttcgtctctatgcgccgcgacggtaagtctttgggcgatattgtgaaacaggaactcggcactgtccccggcgtgattgcatccatcggtattttgatgattatggtcatcattatggcggtgttggcattgatcgttgtgaaagcattggttcacagcccttggggtacgtttaccatcgccgccactatgccgattgccctgtttatgggtatttacacgcgctatatccgtccgggcaaaatcggcgagatttccatcgtcggctttattttgctgatgctggcggtaatttacggcgaagatgtggcgaaaagttccatcggacattggttcgaccttgacggcatccagctcacttgggcgattatgatttacggctttgtcgcctccgtattgcccgtatggttgctgctcactccgcgcgactatctctctaccttcctgaaaatcggtacgattgcggccttggctttgggtatcgtcatcgtcaatcccgctttgcaaatgcctgcggttacccactttatcgacggttcgggtccggtattctcaggcgcattgttcccgttcttgttcattaccatcgcctgcggtgcggtttcgggcttccacgcgctgatttcctccggcaccacgccgaaaatgctggataacgaaacccacgtccgtatgattggttacggcggtatgttgatggaaagtttcgtagccattatggcgcttgccgccgccgcatcgcttgatcccggcgtgtacttcgccatgaacagccctgccgccctgatcggnnnnncacacacttaa

SEQ ID NO: 38428 - DNA, 930 bp, Neisseria meningitidis
atggattccatcatcgaactgcgccacctcaagaccctgctggcacttgaagaaaccggcagcgtctcccttgccgccaaacgggttttccttacccaatctgcactttcccaccaaatccgtatgcttgaaaaccactacggcgcaccgttgttcgaacgaaaatccacgcccttgcgctttaccccggttggagaaaggctgttacgcctcgctcacgacctgttgcctcaagttaccgatgcagaacgtgatttggcacgcattatagaaggagaggcaggagaattgcggattgccgtcgaatgccatacctgtttcgactggctcatgcccgcaatgggcgaattccgcccgatatggccccaaatcgaattggatatcgtatcgggattccaagcggaccctatcggactgctgctgcaacaccgcgccgatcttgccattgtttccgaagcggaaaaacaaaacggtatttctttccaaccgctgtttgcctacgaaatggtcggcatctgcgccaaagatcacccgcttgccgccaaaactgtctgggaagccgaagactttatcggggaaaccctgattacttatcccgttcccgacgagatgctggatttgcccaaaaaaatcctgattccgaaaaacatcaacccgccgcgccgacacagcgaactgaccatcgccattatccaactggttgccagcagacgtggcattgccgcccttccctattggacagtcatgccctaccttgaaaaaggctatgtcgttcaccggcagattactgccgacggattgcaaagcaaactgtatgccgccatccgtaccgaagatacggacaagagctatctgaacaatttttgccaaatcatacgcgaacgcggttttgcagatttgcccggactgagcgaactggaaccggtctga

SEQ ID NO: 38429 - DNA, 378 bp, Neisseria meningitidis
atgcccacctcaaccaaaccctacatcctccgcgcactttgcgaatggtgcagcgacaacagcctcacaccgcacatccttgtttgggtcaacgaacacacgcgcgtccccatgcagtacgtccgcgacaacgaaattatgctcaacatcggcgcgaccgccacgcaaaaccttcaaatcgacaacgattggatcagtttttccgcccgtttcagcggacaggcgcacgatatatggatacctgtcggacacgtcctcagccttttcgcacgggagaccggcgaaagtatggggtttgaattggaagcgtaccgccccgacacgccgcctgaaaacacctctgccgaaaccgcgccccgacccgccaaaaaggcttga

SEQ ID NO: 38430 - DNA, 507 bp, Neisseria meningitidis
  misc_feature 8, 9, 10, 11, 12: 'n' is a, c, g or t
gtgtgtgnnnnnattgaattcaaagcaaaagacatcgttatccctttcgaagttttgcagaatccgggcgaatatttcggcggcgcatatccgatttgcgaacgattcgcccaaaaggcaacgcgcatacacgcggttaaggaagataaggtcatttcagccgaccgctaccttgaatgggtaaaaaaacagttcggacgtgcggcaaacggtctgaaattcatttttcccgaattggacaaagccaaactgtttgaactgattgagccgagtcatcacaagctgcccaagtctttggctcccgaagcctacgactgcgcctttttgaaagctcaagccattcatgaacagcccgcattcaaaccgtacaaagacccttactatatgtacgaatattacgagaatcttgaaaaacagcttgaacagcaaaaacacgtcaacaatgaagaaagctataacaacttcatttacgacaaattcgcaagactaccgatttcatgggcttaa

SEQ ID NO: 38431 - DNA, 1065 bp, Neisseria meningitidis
atgactcttttaaaaaacgataccttcctccgcgccctgctcaaacagcccgtcgaatacacgccgatttggatgatgcgccaggcggggcgttatctgcccgaatacaaagccacacgcgcgaaagcgggcagcttcctcgatttgtgcaaaaacaccgaattggcgaccgaagttaccatccaacctttggaacgcttcgatttggacgcggcgattttgttttccgacatcctgaccgtccccgacgcaatgggcttgggactgtattttgccgaaggcgaaggcccgaaattcaaacgcgccatgcaacacgaggccgacatcgccaagctgcacgttcccgatatggaaaaactgcaatacgttttcgacgcggtaacttccatccgtaaagcattggacggccgcgtaccgcttatcggcttttccggcagcccgttcacactcgcctgttatatggtcgaaggcggcggcagcaaagaattccgcaccatcaaaaccatgatgtactcgcgccccgatttgctgcacaaaatcctcgataccaacgcccaagccgttaccgcctacctcaacgcccaaatcgacgcgggcgcgcaggcggtgcaaattttcgacacttggggcggcgtgttgagcgacgcggcgtttaaagaattcagcctcaaatacatccgccagatcgtcgccggactcaaacgcgaaagcgaaggccgccgcgtgcctgttatcgtatttgccaaaggcggcgggctgtggctggaaagtatggcccaaatcggcgcagacgcattgggcttggactggacgtgtaacatcggcgaagcacgccgccgcgtcggcaagcaagtcgccctgcaaggcaacttcgacccgtccgccctcttcggtacgccggaatccatccgcaccgaggtcgcacgtatcctagccgactacggacacggcagcggccatgtcttcaacctcggacacggcatcaaccaacacgccgaccccgaacacgccaaaatcttagtcgataccgtacacgagctgtctcggcagtatcacggcgggtaa

SEQ ID NO: 38432 - DNA, 891 bp, Neisseria meningitidis
atgaatcctaaatcccctttatttttacgcctgtccgatcgtttggacgtttatatcagactgatgcgggcggacaagcccattgggacgctgcttttgctgtggccgacctactgggcgttgtggctggcttcagacggtattcccgatttggcggtattggcggcgtttacaatcggcacgtttttaatgcgcagtgccggctgcgtcatcaacgattttgccgaccgcgattttgacggggctgtcgagcgcactaaaaaccgtccgttcgcacagggcagggtcaagaaaaaagaagcgctgctgctgacggcatttttgtgcctgcttgccgcattgtgcctgattccgctgaatcatctgacatggctgatgagcctgcccgcgctgtttcttgcgctgacttacccgtttaccaaacgcttttttccgattccccaactctatctcgggcttgccttttccttcggtatcccgatggcgtttgccgccgttgccggaaacgtgccgcctcaagcgtggatactctttgccgccaatgtgttatggactctggcgtatgacacggtttatgcaatggcggacaaagaagacgatttgaaaatcggcatcaaaacctccgccgtcacgttcgggcgttacgacatcgccgccgttatgctgtgtcatggcggctttaccctgctgatggcagtattgggggtggttatcggtgcggcatgggcatattggacggcaatccccatcgtcctgctgctgcaataccgccaatatgccgccatcaaaagccgcgtccggcaaatctgttttgaaacgtttttggcaaacaacagaattggttgggtgtggtttaccgccatttttgcccatacgtttttcgcgaaataa

SEQ ID NO: 38433 - DNA, 2529 bp, Neisseria meningitidis
  misc_feature 4, 5, 6, 7, 8: 'n' is a, c, g or t
gtgnnnnntgacgcgcagcaaaccgccgatttggttgagctgctgaaaagcccgcccgcaggcgaaggcgagttcttggtcgaactgcttgcccaccgtgttccgcccggtgtggacgatgccgccaaagtcaaagcctcattcctggctgccgttgccgaaggcagcgcgtccagcccgctgatctcccccgaatatgcgaccgaactcttaggtacgatgctcggcggttacaatatccacgccttaatcgaactcttggacgacgacaaactcgcgcccattgccgccaaaggcttgaaacatacgcttctgatgttcgattccttccacgacgttcaggaaaaagccgaaaaaggcaacaaatacgcgcaagaagttttgcaatcttgggcagatgccgaatggtttacctcacgcgccaaagttcccgaaaaaatcaccgttaccgttttcaaagttgacggcgaaaccaatacagacgacctctcccccgcgcccgacgcgtggagtcgtcccgatattccgctgcacgcgctggccatgctgaaaaacccgcgcgacggcatcacgcccgacaaaccgggcgaagtcggtccgattaaattgttggaagaactcaaagccaaaggccatccggttgcttacgtcggcgacgtggtcggtactggttcttcacgcaaatccgcgaccaactccgtcatttggcataccggcgaagacattccgttcgtgccgaacaaacgcttcggcggcgtgtgcttgggcggcaaaatcgcgccgattttcttcaatacccaagaagactccggcgcgctgccgattgaagtcgatgtttccgctctaaaaatgggcgatgtcgtcgatatcctgccttatgaaggcaaaatcgtgaaaaacggcgagactgttgccgagtttgaattgaaatcacaagtattgctggacgaagtgcaagccggcggccgtatcaacctgattatcggccgaggtctgaccgccaaagcgcgcgaagccctgaaactgcctgcctctactgcattccgcctgccgcaagcgcctgccgaaagcaaagccggtttcaccttggcgcaaaaaatggtcggccgcgcctgcggtcttcccgaaggacaaggcgtgcgtccgggtacttactgcgaaccgcgtatgacgacggtcggctcgcaagacacgaccggcccgatgacccgcgacgagttgaaagacttggcttgtttgggcttctccgccgatatggtgatgcagtctttctgccacaccgccgcctatccgaaacctgtcgatgtaaaaacccataaagaactgcccgcctttatttccacccgtggcggcgtgtccctgcgtccgggcgacggcgtcatccactcgtggctcaaccgcctgctgctgcccgataccgtcggcaccggcggcgacagccacacccgtttccccatcggtatttccttccccgccggctccggcttggttgcctttgccgccgcaacaggcgtaatgccgctcgatatgcccgagtctgtattggtacgcttcagcggcaaactgcaaccgggtgtaaccctgcgcgatttggtgaacgccattccgctgtacgcaatcaaacaaggtttgctgaccgttgccaaagccggtaagaaaaacatcttctccggccgcatcctcgaaatcgaaggcctgcctgatttgaaagtggaacaagcctttgaattgaccgacgcatccgccgaacgctccgccgccggctgtaccgtgaagctcaacaaagagccgattatcgagtacatgaaatccaacgtcgtgttgatgaaaaacatgattgccgacggctatcaagacccgcgtactttggaacgccgcatcaaagccatggaaaaatggctggcaaatcccgagttgctcgaagcggataaagatgccgaatacgccgccgtgattgaaatcaacatggacgacatcaaagagccgattatcgcctgcccgaacgacccggacgacgtgtgcttcatgtccgaacgctccggcaccaaaatcgacgaagtattcatcggttcgtgtatgaccaacatcggccacttccgcgccgcctccaaacttttggaaggcaaggcagacacccccgtccgcctgtggattgcgccgccgaccaaaatggacgcgaaacaattgtccgacgaaggacactacggcgtactcggacgtgccggcgcgcgtatggaaatgccgggttgctccttatgtatgggtaatcaggcgcaagtacgcgaaggtgcgaccgttatgtccacctccacccgcaactttccgaaccgtttgggtaaaaacacctttgtttacctcggttcggcggaattggcagcgatttgctccaaactgggtaaaatcccgaccgttgaagaatatcaagccaatatcggcatcatcaacgaacagggcgataaaatctaccgctatatgaacttcaacgaaatcgacagctacaacgaagtagccgagaccgtgaacgtttaa

SEQ ID NO: 38434 - DNA, 918 bp, Neisseria meningitidis
atgtctgtctataccagtgtttccgatgatgaaatgcgcggcttcctgagcggttacgatttgggggaatttgtttccctgcagggcatcgcgcaggggattaccaacagcaattattttctgacgacgacttcgggacgttatgtgctgaccgtgtttgaagtgttgaaacaggaagagctgccgttttttctggagcttaaccggcatttgagtatgaagggcgtggcggttgccgcgccggttgcgcgcaaagacggccggcttgattccgttttggcgggcaagccggcttgtttggttgcctgcctgaaaggttcggataccgcgctgccgacggctgagcagtgtttccataccggcgcgatgttggcgaaaatgcaccttgccgccgccgatttccctttggaaatggaaaacccgcgttacaatgcgtggtggacggaggcgtgcgcccggctgctgcccgtcctgtcgcaagacgatgccgcactgctgtgttccgaaatcgatgcgttgaaggacaatctcggcaatcatctgccttcgggcatcatccatgccgatctgtttaaagacaatgtgttgcttgacggcggtcaggtatcgggcttcatcgatttctattacgcctgccggggcaattttatgtatgacttggcgattgcggtcaacgattgggcaaggacggcggacaataagttggatgaggcgttgaaaaaggcgtttatcggcggttatgagggcgtgcgccccttgagtgccgaagaaaaggcgtatttcccgaccgcccaacgtgccggctgcatccgtttttgggtgtcgcgcctgttggactttcattttccgcaggcgggcgagatgacgtttatcaaagacccgaacgcgttccgcaacctgctgttgagtttggattga

SEQ ID NO: 38435 - DNA, 1053 bp, Neisseria meningitidis
atgaccgtatcccccgtcgccttgcgccgtaagaccgagtgcaagcctcatcccaccgcgcgctattggaaaaaatgcgatgtcgaggcacttttcggactgccgtttttagaacttgtccatcaggcggcagaagtccaccgccaaaatttcaacccgcgcgaaatccagctttccacgctgttgtccatcaaaaccggcggttgtcccgaagattgcgcctactgtccgcaatcggcgcaccacaataccaatttgggcaaagagcagatgatggatgtggatgaaatcgtcgaaaaagccaaaatcgccaaatcgcgcggcgcaagccggttttgtatgggcgcggcatggcgcggccccaaacccaaagacgtggagacggtttccgcaatcatcaaagccgtcaagggcttgggtatggaaacctgcggcacgttcggtatgctcgaagaaggtatggcggaagacttgaaagaggcgggcttggattattacaaccacaacctcgacaccgaccccgaccgctacaacgacatcatccatacacgccggcatgaagaccgtatggacaccttgggcaaagtccgcaacgccggtttgaaagtctgctgcggcggcatcgtcgggatgaacgaaacccgcgccgaacgcgcagggctgattgccagcctcgccaacctcgacccgcagcccgaaagcgtgccgattaaccggttggtcaaagtggaaggtacgccgcttgccgatgccgaggatttggactggacggaatttgtccgcaccatcgccgtggcgcggattacgatgccgcaaagttatgtccgactgtcggcagggcgcagcaatatgccggaagcgatgcaggcgatgtgctttatggcgggcgcgaactcgattttttacggcgacaagctgctgaccacgggcaatccggatgaagacggcgacagaatcctgatggaaaagctcaacctgtatcccttacagtttgagctggaaggcgaggtcgccgaagtggaaaaagcctctgggattaaagtggattattga

SEQ ID NO: 38436 - DNA, 288 bp, Neisseria meningitidis; identical to SEQ ID NO: 38241

SEQ ID NO: 38437 - DNA, 1380 bp, Neisseria meningitidis
atggcaaaaacgcttaaaaccctttaccaatgcaccgaatgcggcggcacttcgccgaaatggcaaggcaaatgcccgcattgcggcgagtggaacacgcttcaagaaagcttagccgcgcccgagccgaaaaacgcccgcttccaatcttgggcggcggatacctcgaccgtccaatccctctccgccgttaccgctgccgaagtgccgcgcaacccgaccggtatgggcgaactcgaccgcgtattgggcggcggtttggtcgatggcgcggtcatcctactcggcggcgatcccggcatcggcaaatccacgctgttgttgcaaaccatcgccaaaatggcgcaaagccgcaaagtgctgtacgtttccggcgaggaatccgcccaacaagtcgccctgcgcgcgcagcgtttggaactgcccaccgaaggcgtgaacctgcttgccgaaatccgcatggaagccattcagacggccttgaaacagcatcagcccgaagtcgtggttatcgattccatccaaaccatgtattccgaccaaatcacttccgcccccggctccgtgtcgcaggtgcgcgagtgtgcagcccaactgacgcgcatggcgaaacagatgggcatcgccatgatactggtcggacacgtgaccaaagacggcgcgattgccggcccgcgcgtgctggaacacatggttgataccgtgctgtatttcgagggcgaccaacattccaactaccgcatgatacgcgccatcaaaaaccgcttcggcgcggcaaacgaactgggcgtgttcgcgatgacggaaaacggtttgaaaggtgtgtccaacccgtccgccatcttcctcgccagctaccgcgacgatacgcccggctcgtgcgttttggttacacaggaaggcagccgcccgcttttggtcgaaattcaggcattggtcgatgacgcgcacggcttcacgcccaaacgcctcaccgtcggactggaacaaaaccgtcttgcgatgctgcttgccgtgttaaaccgacacggcggcatcgcctgtttcgatcaggatgtgttcctcaacgccgtcggcggcgtgaaaatcggcgaaccggcggcggatttggcggtcatcctcgcgatgctttccagcttccgcaaccgccctatgcctgaaaaaaccgtggttttcggcgaaatcggcttaagcggcgaagtccgccccgtcgcacgcgggcaagagcggctcaaagaagcggaaaaactcggcttcaaacgcgccatcgttcccaaagccaatatgccgcgcaacgccaaagagtttccgaacctgaaaatctacggcgtttcgagtttgcaggaagccatcgatatttgccgtgacagcagggaataa

SEQ ID NO: 38438 - DNA, 591 bp, Neisseria meningitidis
atggagacgcaggacgacggcacggtcaaggtttggggctacgcttcaagcgaggagatcgattcggacggcgaagtcatcgcggcggcagctatgaaggcggcgattcccgattatatgaagtttggcgcggggcgcgagatgcacggctcaaacgctgcgggaacggcaattgaaatcaacgttgaagacgacggcataacctttttcggtgctcatatcatcgaccccgttgccgtggcgaaagtcaaaacaggcgtttacaaaggcttttccatcggcggcagcgttaccgcccgcgatgatttgaacaagtcgcaaatcacgggcttgaagctgacggaaatcagccttgtcgagcgccctgccaatcccgatgcggtgtttacctgctttaaggcggacaaaagtgcggaagcggtaaacaacgatacagaacataatactgcatattttagccatttcccttccaaacaaaaaagcaccgacggcggccgatgccccttcctttacaggttcccctattttttagctgcgggcagagccggttttgctgggccttttggtgcgggcgcgccgacagaagcctga

SEQ ID NO: 38439 - DNA, 924 bp, Neisseria meningitidis
atgacgaaaaccgaaccgaacaacgcccaactcgactggttggaatccgaatccatccacatcatccgcgaagtggcggcggaatgcgaaaaccccgccctgctcttttccggcggcaaagattccgtggtcctgctcgccctcgcctgcaaagccttccggctgggcagcagggcggtgaaactgcccttcccgctggtgcatatcgacacggggcacaactaccccgaagtgattgccttccgcgacgcgcaggcggcaaaactcaatgcccgcctgatagtggggcgcgtggaagactccattgccaaaggcacggtggtcttacgcaaagaaaccgattcgcgcaatgcggcacaggcggttaccttgttggaaaccatcgaggcaaacggttttgacgcgctgatgggcggcgcgcggcgcgacgaagaaaaagcccgcgccaaagaacggattttctcgttccgagacgagttcggacaatgggatccgaaggcgcaacgccccgagctgtggtcgctgtacaacaccaggcttcacaaaggcgaaaatatgcgcgtcttcccgatttccaactggacggaactcgacatctggcaatacatcgcccgcgaaaacctcgagctgccgccgatttattacagccacaggcgcgaagtggtcagacgcagggggctgctggtccccgttacgccgctcaccccgaaaatgccgtctgaaacctccgaaatccttgatgtccgcttccgcaccgtcggcgacatcagctgcacctgcccggtagaaagcaccgcgtccacgccggcggagattatcagggaaacggcggttgccgacatttccgaacgcagcgcgacccggctggacgatcaggcaagcgaggcggcaatggaaaaacgcaaaaaagaaggctatttctaa

SEQ ID NO: 38440 - DNA, 231 bp, Neisseria meningitidis
atggccgcattgtggcagatgtatgtgatgatgaccgaaacttatacgctcaaccgtttcaaagataaagaattggtttggcgcgtggcattgttgtttatcagtttcagccttgccgtttatctgctctgtccgaattcgcgtaaaaaaggcatcgtcttttttattctcgggggaggcggtgcagccatgtatctgctggcgcggatgtggttgcctttcagcaagtga

SEQ ID NO: 38441 - DNA, 891 bp, Neisseria meningitidis
atgagcgtattgattaataaagacaccaaagtattggttcaaggtttcaccggtaaaaacggtactttccactccgaacaagctctggcttacggcactaaagttgtcggcggcgttaccccgggcaaaggcggtcaaacccacctgaacctgcccgtgttcaacaccatgaaagaagcggttaaagaaaccggcgcggacgcatccgtaatttatgttcccgctccgtttgtgttggattctatcgttgaagccgttgattcaggtgtaggcttggttgttgtgattaccgaaggcgtacctactttggacatgctcaaagccaaacgttatttggaaaccaacggcaacggtacccgtttggtcggccctaactgcccgggcgtgattactccgggcgagtgcaaaatcggtattatgccgggccacatccacactccgggccgcatcggtattatttcccgttccggtacattgacttacgaagccgtggcacaaaccaccaaactgggcttgggtcaatcaacctgtatcggtatcggcggcgacccgattcctggtatgaaccaaatcgacgcactgaaacttttccaagaagacccggataccgacgccatcatcatgatcggtgaaatcggcggtactgcggaagaagaagcagccgaatacatccaatccaacgtaaccaaacctgttgtaggttacattgctggtgttaccgctcctaaaggcaaacgtatgggccacgcaggtgcgattatctccggcggtaaaggtactgccgaggaaaaattcgccgctttcgaaaaagccggtatcgcttacacccgcagccctgccgagttgggcactaccatgctggaagtgttgaaaacaaaaggtttggcataa

SEQ ID NO: 38442 - DNA, 876 bp, Neisseria meningitidis
atgtttcagaaacacttgcagaaagcctccgacagcgtcgtcggagggacattatacgtggttgccacgcccatcggcaatttggcggacattaccctgcgcgctttggcggtattgcaaaaggcggacatcatctgtgccgaagacacgcgcgttaccgcgcagcttttgagcgcgtacggcattcagggcaaacttgtcagcgtgcgcgaacacaacgaacggcagatggcggacaagattgtcggctatctttcagacggcatggttgtggcacaggtttccgatgcgggtacgccggccgtgtgcgacccgggcgcgaaactcgcccgccgcgtgcgtgaggtcgggtttaaagttgtccctgttgtcggcgcaagcgcggtgatggcggctttgagtgtggccggtgtggcgggatccgatttttatttcaacggttttgtaccgccgaaatcgggagagcgcaggaaactgtttgccaaatgggtgcgggcggcgtttcccgtcgtgatgtttgaaacgccgcaccgcatcggtgcgacgcttgccgatatggcggaactgttctccgaacgccgattaatgctggcgcgcgaaattacgaaaacgtttgaaacgttcttaagcggcacggttggggaaattcagacggcattgtctgccgacggcaaccaatcgcgcggtgagatggtgttggtgctttatccggcgcaggatgaaaaacacgaaggcttgtccgagtccgcgcaaaacatcatgaaaatcctcacagccgagctgccgaccaaacaggcggcggagcttgccgccaaaatcacgggcgagggaaaaaaagctttgtacaatctggcactgtcttggaaaaacaaatga

SEQ ID NO: 38443 - DNA, 480 bp, Neisseria meningitidis
ttgtttgaagaaattcccgggtacgacttaagaaaaacatatgataatgcgggttatgaagtttggttcaatggagaattgaaggcttattgttttaaaaaatatgagttttaccgatttttgaaaagaccgggatacaatattaattggaaagaccatctgtctaaaagattactacccgacaatggcttatttatcatcatccgtgataccttatttattattgagatcaaattccaacaaactcccggttcagtagatgagaaattacaaacttgcgattttaagagaaaacaatatacaaaattggttcactctttaggttggcgggttgaatatgtctatgttttgaatgattggtttacaaagccggaatataaagatgttttagattatattatcagtgttaactgccattaccaatttaacacgattcccttaaggtggtttggactgcctgatggtgaaacaaatgaataa

SEQ ID NO: 38444 - DNA, 465 bp, Neisseria meningitidis
atgaaatgcccgttttgcgcccaccccgacacccgcgttgccgattcgcgtctgatggaagaacgcaacgccgtgcgccgccgccgccactgccccaactgcggcaaacgcttcggcacgctcgaaaccgccgaactcaaaatgcccgccgtcatcggtccggacaaaaaacgctcgccctttaatgcacaacgcctccgcaacgacctgaccgccgccgcccgaaaatccgccctgacacccgaacagatcgacgaaaccgtccgcctgacggaacacaggctctacacttcgggtcagcgcgacatcccctctgccgcacttgccgacatggtgctaaaagaactgctccgacaagatacggaagccgccgtccgtttcgccgccctgcacaaacgcttcgacaatccggcagactttgcctcgtggctggcgcaagccgtcaaaacaggcggcaaagcctga

SEQ ID NO: 38445 - DNA, 585 bp, Neisseria meningitidis
ttgtttatcgacaattacgacagttttacttacaacatcgtccagtatttcgctgaattggggcaggaagtcgccgtgcgccgcaacgatgatattacgttggaagaaatcgaggcattgaatccgcaatatctcgttatcggacccggcccgtgttcgcccaaagaagcggggatttccgtggcggcgatgcgccattttgccggccggctgccgattatgggcgtgtgcctcgggcatcagacgataggcgaggcgttcggcggcaggatagtccgcgccaaaacgctgatgcacggtaaggtgtcgcccgtgtcccattcgggcaagggtatgtttaagggtttgcccaatccggttacctgtacgcgttatcacagcctcgttatcgatcggaatacgatgcccgaatgtttggaagtaacggcttggactgaggacggcgagattatgggtgtgcgccataaggaatatgccgtcgagggcgtgcagttccaccccgaagccctcttgaccgagcacggacatgatatgttaaacaattttttaatcgaatttcaaaacttcaaaccgcaaaaaatctga

SEQ ID NO: 38446 - DNA, 1164 bp, Neisseria meningitidis; identical to SEQ ID NO: 38292

SEQ ID NO: 38447 - DNA, 804 bp, Neisseria meningitidis
atgaaaaaaattcttttaacggtttcattaggtttggcactgagtgcctgtgccactcaaggtacggtcgataaagatgcccagattacccaagattggagtgtggagaagctctatgccgaagcccaggacgaattgaacagcagcaattatacgcgggctgtcaagttatacgaaatcttggaatcgcgcttccccaccagccgccatgcccggcagtcgcaactggataccgcatacgcctattataaagacgatgaaaaagacaaagctctggcggcaatcgaacgcttccgccgccttcacccgcaacacccgaatatggattacgcgctatacctgcgcggtttggtactgttcaacgaagatcagtctttcttgaacaagctggcctcgcaagactggtccgaccgcgacccgaaagccaaccgcgaagcgtaccaggcgtttgcggaactcgtccaacgcttccccaacagcaaatacgccgccgatgcgaccgcacgtatggtcaaactggtcgatgcactgggcggcaatgaaatgtcggtggcgcgctactacatgaaacgcggtgcatatatcgccgccgccaaccgcgcccaaaaaatcatcggcagctaccagaatacgcgttatgtcgaagaatcgctcgccatattggaacttgcctaccaaaaactcggcaaaccacagcttgccgccgatacgcgccgcgtgttggaaaccaacttcccgaaaagcccgtttttgacgcacgcttggcagcccgacgatatgccctggtggcgttactggcattaa

SEQ ID NO: 38448 - DNA, 666 bp, Neisseria meningitidis
atgacgtttaccgcagtgctcttcgatctcgacggcgtcatcaccgacaccgccgaataccactaccgcgcgtggaaaaaactcgccgaagaactgggcatcagcatcgaccgcaagtttaacgagcagctcaaaggcgtgtcgcgcgacgattcgctcaaacgcatcctcgcgcacggcggcaaaaccgtcagcgaagccgagttcgccgaactgacccgccgtaaaaacgacaactacgtcgagatgattcaggcagtcaaacccgaagacgtgtatcccggcattttgcccctgctggaaacattgaaagcaaacggcaaaaaaatcgccctcgcgtccgccagtaaaaacggcccgttcctgctcgaacgcatggggctgacccacttcttcgacaccgtcgccgaccctgccgccgtcgcgcattccaaacccgcccccgacatcttcctcgccgccgccgagggcgtgggcgcggacatccgccgctgcatcggcattgaagacgctgccgcaggtgtcgccgccatcaaagcctccggcgccttacccatcggtgtgggcaaagccgaagacttgggtagcgacatcccgctggtgtccggcaccgccgagctgacctacgcctacctgcaaaacgtgtgggcacagtcgggcaggtaa

SEQ ID NO: 38449 - DNA, 390 bp, Neisseria meningitidis
ttgaaagcgggaatcaggctgttatccgaaagcggcaaaacccaaaccgtccgcaacatcgttgtcaaaccaaaaccgctcaaagcctacaatctgaccgttgccgattggcatacctactttgtcaaaggcaatcgggcggaaacggaaggagtttgggttcataatgcgtgtccgcccaaaagaacaggaagctccaagaatgaaaaacatggagacgacggtcgaagtcaaatatcagcggaatcaagaattgctgaattaaaaaataaaattattcccggaatgcccaaaaatgaacgcttaaagattgagcaaaaaatcaaaaatattacaaaaaatgccaatcgaaaagcaaaaggagaagagcatggtcgacgcggtcgttaa

SEQ ID NO: 38450 - DNA, 1134 bp, Neisseria meningitidis
atgtcatacagcacctttcccaaaaccaaaaacgacgcgctgaatgagccgatgtttttcggtcagcctgtgaatgtcgcccgttatgaccagcagaaatacgaggtatttgaaaaactgattgaaaaacaattgtcgtttttttggcggccggaagaaatcgacgtgtcgcgcgaccgtatcgactacgccaacctgcctgaacacgaaaaacatattttcatcagcaatctgaaataccaaacactgctcgattccatccaagggcgcagtccgaatgttgccttgctgcctttggtttcgattcccgagctggaaacgtggattgaaacgtggagcttcagcgaaaccatacactcgcgcagctatacccacatcatccgcaatattgtgaatgatccgtcggtcgtgtttgatgatattgtcgaaaacgaatacattaccgcccgcgccgaagacattgcctgctattacgatgacttaatcgaatacacccagtattacaacctgttgggcgaagggatgcataatgtcggcggaaaacccattactgtgtctttgcgcgggttgaagaaaaaactctatctctgcctgatgtgcgtcaacgtgttggaagccatccgtttctacgtttcattcgcctgctcgtttgcttttgccgagcgcgagttgatggaaggcaacgccaaaatcatcaaactgattgcccgcgacgaagccctgcacctgaccggcacgcagcatatgcttaatctgatgcgttcgggtgttgatgattctgaaatggcagaaattgccgccgagttgcaggacgaatgtttccaactcttcaaaaaagcggcggaacaggaaaaagaatgggcggcatatttgtttaaggacggttcgatgatcggtttgaacaaagaaatcttatcccaatacgtcgaatatattaccaatctgcgtatgcaggcggtggggttgccggccggatttgaaggcgcaaatcaaaacccgattccgtggattaatgcgtggctgtcgtccgacaacgtacaggtcgcgccgcaggaagtggaaatatcctcttatttgatcggtcagatcgattctgaagtgaatacggatgatttgggcgattttgagttgtaa

SEQ ID NO: 38451 - DNA, 606 bp, Neisseria meningitidis
atgattttgctgcatttggattttttgtctgccttactgtatgcggcggtttttctgtttctgatattccgcgcaggaatgttgcaatggttttgggcgagtattatgctgtggctgggcatatcggttttgggggcaaagctgatgcccggcatatggggaatgacccgcgccgcgcccttgttcatcccccatttttacctgactttgggcagcatattttttttcatcgggcattggaaccggaaaacagatggaaacggatggcaggcagaccccgaacatccgctgctcgggctttttgccgtcagtaatgtatcgatgacgcttgcttttgtcggaatatgtgcgttggtgcattattgcttttcgggaacggttcaagtgtttgtgtttgcggcactgctcaaactttatgcgctgaagccggtttattggttcgtgttgcagtttgtgctgatggcggttgcctatgtccaccgctgcggtatagaccggcagccgccgtcaacgttcggcggctcgcagctgcgactcggcgggttgacggcagcgttgatgcaggtctcggtactggtgctgctgctttcagaaattggaagataa

SEQ ID NO: 38452 - DNA, 1311 bp, Neisseria meningitidis
atgaccgatttgtttgcccgagaacccgacgcgccgcttgccgaacgattgcgtccgcatacgcttgacgacgtggtggggcaggaacacctcatcggcgaaggtaaacctttgcgcgtggcggtagaaggcggcaagccgcattctatgttgctgtgggggccgccgggcgtgggcaagacgacgttggcgcggattttggcgcagagtttcaacgcccagtttttgcctgtttccgccgtattttccggcgtgaaggacatacgcggggcaatcgataaagccgaaatcgctttgcagcagggacgcgcgacgattttgtttgtcgatgaagtccaccgcttcaacaaggcgcagcaggacgcgtttttgccgcatgtcgaaagcggtttgctaacctttattggtgcgacgacggaaaatccgtcgtttgaagtcaatcccgcgctgttgagccgcgctcaggtgtatgttttgcaacccttgtcttcagacgacctgaaaaagctgattgccaaggtattggctttgcctgaataccaagagtttacgattgaaacggatgcgcaaaaattactcgtgaataccgccgacggtgatgcgcgcagattgttgaatttgttggaacaacttttacgcgccgccgatacacgtcgtctgaaaaacttaaccgccgaatttctcgccgacagtctcggggcgcaaatccgccgtttcgacaaaggcggcgagagtttctacaaccaaatctccgccctgcacaaatccgtgcgcggttcgcatccgaacgccgcgctgtattggttctgccgtatgctcgacggcggcaccgacccgcgctacctcgcccgccgcatcgtgcgtatcgcttgggaagacatcgggcttgccgacccgcgcgccttccaaatcgccaacgatgccgccgccaccttcgaacgcttaggctcgcccgaaggcgaactggctttggcgcaagcggtattgtaccttgccgccgccgcgaaatccaacgcgggctacaaagcgtataaacaaatgcgccgatttgttgcagaaaacagcagcgacgaagtgcctgtccatcttcgcaacgccccgaccaagttaatgaaggaattgggctacggacgcgaataccgctacgcccacgacgaaccgaacgcctacgccgccggcgaaagctatatgcccgacggcttggacgaaccggacttctaccaacccgtcccgcgcgggttggaaatcaaaatcggcgaaaagctggaatggttgaaatcgctggacgaagaagtattaaaggcaaaatga

SEQ ID NO: 38453 - DNA, 1893 bp, Neisseria meningitidis
atgaagaaaatgaagcctgataaggcgcaaatgcagcaaatgagccgctttgccgtatttcagcgcgaaagtgttgatgttgaaaaacggacggtcgaagtggcgttttccagcgaagaatcggtacgccgttggttcggtgatgaagtattaagtcatgcgcagggtgctgttgacttaagccgcctgaacgacggcggcgcggtgttgttcaatcatgactgggacgaccaaatcggcatcatcgaacgtgcttggattgatgccgacaagcgcggccgtgccttggtacgttttggcaacggtacgaaggcaacggaaaaattccaagacgtgcaagacggcatcctacgccatatcagcgtcggctaccgagtggaggatatggtattggacaatcccgatactgacgatgagggctaccgttacatcgttacccgctggatgccgtatgaaatcagttttgtaaccgttcctgcagacccgacagtaggtgtaggcaggtcggtggaaccatttattgaaaaccctgtaaacccaacccctgaaaaaggaaatcgaaacatggataaaaatcaaacgcccactacggtggaaacttccgccgctgcaatccctgccgccgcagcaaccgataccaacaacaccgccgaacgcggtatgcagaacgaacgcgcgcgcgtttccgaactgctggccattggtcgcagttacgccgcccacggcggtatcgaagcagccgaaaaggttattaaagagggcggcagtgaagcacaattacgcgccgccatcatggcaaacatgcagacgaagccgaccgttaccgccggtgaaatcggcatgactgataaagaacagcgtgaattttcccttctccgcgccatgtctgccgccgcaaccggcaaatgggacaaagcgggcttggaacgcgaagtgtcggaagagttggaaaaacgacatggtcgcgcagcggcaggcttctttgtgccgactgatttgattgcccgcgcttacagcaaaggcaatgcggcaaacggcggcaacgtcatcgaaaacgacttccgcgaagacttgttcatcgaactgctgcgcaaccgacttgccgttgcccagttgggcgccaccgtactggacggcttggtcggcgacatcactattccgaaacacctgaccggaaacaccgttcaatgggtggatgaaaacggcagcgcgaccgaatcgaatgccactttcggacaaatgagcctgaaaccgaaaaccgttaccgccaatactgaattgagccgcaaattcattttgcaatcctcgctgtctgccgaacagttcgcccgcagcgaattattgaaagcgatgatgctgggtatcgatttggcggccatcaacggcaaaggtaccggcaacgaaccgaccggcatcctgaataccgccggcatcggcgcggtggaaatcggtgcgaacggcggtgcgcccgaatggaagcatatcgtcgctttggaaagtgccattgccgccgccaatgccgacatcggcgatttggcatacatcaccaatgcccgcgtccgcggtctgctgaaaaccaagctgaaggccgacggcgtgtccggctacatctggcaggacggcgcaacgccgttgaacggctaccgttgcgcggtatcaaaccaaattccgtccaacctgaccaaaggcacggcggccaacaaatgcagcccgctgatttttggtaactggtctgatttgatgattgcgcactggggcgttttggatgtgattgttgatccgtacaccaagtctactacgggcgcggtacgcatcaccacgttgcaagatgtggatattgccgtccgtcatgtcgaatcctttgccgccattaaagacatcgcggctgcttga

SEQ ID NO: 38454 - DNA, 1176 bp, Neisseria meningitidis
gtgtttaaagtgaaattttatattcgtcacgcagtattattattgtgtggaagtttaattgtaggatgctctgcgattccttcatcaggccccagcgcaaaaaaaattgtctctttagggcaacaatctgaagttcaaattcctgaagtggagctgattgatgtgaatcatacggttgctcagttattatataaggctcagataaatcagtcattcactcagtttggcgatggttatgcttcggctggtacgctaaatattggtgatgtattggatattatgatttgggaagcgccgccggcagtattgtttggtggtggcctttcttcgatgggctcgggtagtgcgcatcaaactaagttgccagagcagttggtcacggcacgtggtacggtttctgtgccgtttgttggcgatatttcggtggtcggtaaaacgcctggtcaggttcaggaaattattaaaggccgcctgaaaaaaatggccaatcagccacaagtgatggtgcgtttggtgcagaataatgcggcgaatgtgtcggtgattcgtgctgggaatagtgtgcgtatgccgctgacggcagccggtgagcgtgtgttggatgcggtggctgcggtaggtggttcaacggcaaatgtgcaggatacgaatgtgcagctgacacgtggcaatgtagtacgaactgttgccttggaagatttagttgcaaatccgcgacaaaatattttgctgcgtcgcggtgatgtggttaccatgattaccaatccctatacctttacgtctatgggtgcggtggggagaacacaagaaatcggtttttcagccagaggcttatcgctttctgaagccattggccgtatgggcggtttgcaagatcgccgttctgatgcgcgtggtgtgtttgtgttccgctatacgccattggtggaattgccggcagaacgtcaggataaatggattgctcaaggttatggcagtgaggcagagattccaacggtatatcgtgtgaatatggctgatgcgcattcgctattttctatgcagcgctttcctgtgaagaataaagatgtattgtatgtgtcgaatgcgccgttggctgaagtgcagaaattcttgtcgtttgtgttctcgccggttaccagtggcgcgaacagtattaataatttaactaattaa

SEQ ID NO: 38455 - DNA, 729 bp, Neisseria meningitidis
atgaccaaacagctgaaattaagcgcattattcgttgcattgctcgcttccggcactgctgttgcgggcgaggcgtccgttcagggttacaccgtaagcggccagtcgaacgaaatcgtacgcaacaactatggcgaatgctggaaaaacgcctactttgataaagcaagccaaggtcgcgtagaatgcggcgatgcggttgctgcccccgaacccgagccagaacccgaacccgcacccgctcctgtcgtcgttgtggagcaggctccgcaatatgttgatgaaaccatttccctgtctgccaaaaccctgttcggtttcgataaggattcattgcgcgccgaagctcaagacaacctgaaagtattggcgcaacgcctgggtcaaaccaatatccaatctgtccgcgtcgaaggccataccgactttatgggttctgacaaatacaatcaggccctgtccgaacgccgcgcatacgtagtggcaaacaacctggtcagcaacggcgtacctgtttctagaatttctgctgtcggcttgggcgaatctcaagcgcaaatgactcaagtttgtgaagccgaagttgccaaactgggtgcgaaagtctctaaagccaaaaaacgtgaggctctgattgcatgtatcgaacctgaccgccgtgtggatgtgaaaatccgcagcatcgtaacccgtcaggttgtgccggcacacaatcatcaccaacactaa

SEQ ID NO: 38456 - DNA, 1881 bp, Neisseria meningitidis
atgaatattttttacgaagagtccggccaattcaaaatcgccgccatcatccaaaaaaacgacgctacctaccaagtcgatacccaacacggcaagcgcaccaaagtgaaggcaaacaatgtctttgccgagtttgacggcgatatggcggcgtttttggaaaacgcgcaggcacaggcggcggacatcgacaccgatttattgtgggaagtatgcggcgaagaagaattttccgccgaagccatcgccgaagaatatttcggtcatgcgccgaccaaaaccgagctggcggcgaccttgattgcgctttacgccgcgccgatgtatttctacaaaaaagccaaaggcgtgttcaaagccgcgcccgaagaaactttgaaacaagcgcttgccgccatcgaacgcaaaaaacagcaagacgcgcaaatcgacgcttgggcggaagccttaaaacggggcgagatgccgtctgaaatcgcggcggatttgaaaaccatcctgcacgcgcccgacaaacagtcgctgacctacaaagcctttaccaaagccgccgacgcactgaaaatctccgcctacgaattggcgaaaaaaacgggtggcattacgtccattccgcaatacctgcaagacgggtttgaaatcaaatactttcctaaaggcacaggcttccccgaccttgcccttcccgaaatgcccgacctgcccaaggccgacgttaccgccttttccattgacgacgaatcgaccaccgaagtggacgacgctttaagcctgaccgacttggacaacggcacgaagcgtgtcggcatccacatcgccgcgccgtcacttgccgttaaaccgggcgacaaaatggaaaaaaacatcatggaacgcttgagcacggtttatttccccggcggcaaaatcacgatgctgcccgaaaactggattgccgcgttcagccttgatgcaggcgcacaccgccctgccgtcagcatttatttcgatgtggacagcgagttcaacaccggcgaaccgacctgcaaaatcgaagcggtcaacatctccgaaaacctgcgtatccaagccatcgaaccgcatttcaacgccgaagcgggcttggacgaagcgggcgaaatgatgttcgcccaccatcaagacctgatttggttctatcaattcgccatcgccctgcaaaaagcacgcggcaaatacgagcccgaccgtgcgccgcaatacgattacagcatcgaattggatgaggaaggcaacgtatccatcgtccgccgcgaacgcggttctcccatcgatacgctggtcagcgagatgatgattcttgccaacagcacttgggcgcaaatgttggatgaaaacgacctgcccggccttttccgcgtgcaaccggcaggcaaagtgcgtatgagcaccaaatccgagccgcacatcggaatgggcgtgcagcattacggctggtttacctcgccgctgcgccgcgccgccgactacatcaaccaaaagcaactgatcagcctgatagacgacaccgccgagccgcttttccaacaaagcgatgccgaactcttcgccgcgctgcgcgactttgatgccgcctatacagcctacgccgacttccaacgccaaatggaagcctactggagcctcgtctatctgcaacagcaaggcacgagcgagctgacggccaccatcctcaaagaagacctcgtccgcattgaaggcctgccgctggtaacgcgcgcgaccggtattccgtttgacgcgctgcccaaatcacaggcattgttcaaaatcaccgaattggatgccgagaagcagtttgtctcgctcaactacatcaaggcagtcgcacccgcgggtacaacggcaggcaatgccgtctga

SEQ ID NO: 38457 - DNA, 1458 bp, Neisseria meningitidis
atgtcccggcatcccgcccccaccggagaaaaaacattcttcggccaccccttccagctttccaccctcttccatatcgaattgtgggaacgtttttcattttacggaatgcagggcatcctgctgatttacctctactacaccgccgacaaaggcggcttgggcatagacaaaaccctcgccggcggcattgtcggcgcatacagcggcagcgtgtacctgtccaccattttgggggcgtggtttgccgaccgagtatggggtgcggaaaaaaccctcttcctctcgggcatcgtcgtgatgctcggacacatcgtccttgccgcagcacccggcctgtacggccttttaatcgggctgatattcatcgcattgggcagcggcggtgtgaaatctacggccagctctatggtaggcgcattatacgaacaggacgaaatgcgcccgctgcgcgatgcgggattttccattttctacatcgccatcaatatcggcggcttcttaggccccttattgaccggactgcttcaagaaaacatcggtttccattatggtttcggcgcggcggcggtcggtatggcattcggcttgtggcgttattccttgggacgtaaaaacctgccccaccccaccgtcccccatccgctttcaaaaggacagggcaaaactgcggccgccgtcggcattgccctcatcgccgcacttgcaaccgccatcaaaacggggcttgtcaacctcgacaatttctccggcatcctcttatctaccgtcatccttgccgtcatcgcctatttcgcccgcctgctgaccaacccccgcgtcagttccgacaacaaacggcacatcatcgcctacatcccgcttttcctgaccatctgtatgttttgggccgtttggtttcagatttacaccgtagcaaccgtctatttcgacgaaaccgtcaaccgcaccatcggttcgtttaccgtgcccgtcgcctggaaagattctatgcaaagcctgtgggtcatcctgttttccggacttatggcggcaatgtggacaaaaatggggcgcaaacagcccaaaaccccgctgaaattcgctatggcggtatttgttaccggcgcgtcgtttttgggattcatcccctttatttccgccggcacgccgatgcctattgcggttttcgcactgatcgtcctcgccatcacgataggcgaactgatgatttccccgattgcgctgtccatctccaccaaaatcgcaccgcctttattcaaaacccaaatggtcgcccttaatttccttgccttttcattaggcttcactttgggcggcgtattgtttgaaaaaggctatcaggcgggcgacgaaatcggcttctaccggctgctgttctacatcggcgcagccacaggcttcctgctgctcctgctcgtccccaaattgaacaaaatgctcgaaggcacagactaa

SEQ ID NO: 38458 - DNA, 819 bp, Neisseria meningitidis; identical to SEQ ID NO: 37573

SEQ ID NO: 38459 - DNA, 225 bp, Neisseria meningitidis
atgaacagcgaaactttagacgtaaccggattgaaatgtcccctgccgattttgcgggcgaaaaaggctttggcgcaaatgcagcagggcgacgtgttgaccgttctggcaaccgacggcggcgcaccgggggattttgaggctttttgccgccaaaccggtcatgtgctgttggatgcttccgaacaggacggcgtgttcacgctggtcgtccaacacaaataa

SEQ ID NO: 38460 - DNA, 1230 bp, Neisseria meningitidis
atggcgttcggcaaatccttatttcatgcgatcggccgcgtcagcctggtcaggcagattgccgccggtttggcgttgggcatcgtaatcggttcggtttccccgcaactgggcttggcggcaggcttgttcggcagcctgtttgtcggcgcgctcaaagcggtcgcgccggttttggtatttattttggtggcggccacaatcgcgcagcaccaaaaaggcaacaaggcgcatatcaggccgattatcgtcctttacctcatcggtacgttttccgcagccctgaccgccgtcatcgccggtatggttttcccgacgcacattgttttggcgggcgcgggcgatgtgtccgccgcgccgccttccggcattgtggaagtattgaaatcgctgctgatgaacctggtcgccaacccgattaacgcgattgccaatgccaactatatcggcattttggcttgggctttggttttgggcgcggcgttgcggaatcacggttcggacgttacgcggcaggtcgttgccgatttggcggaagcggtttccaccgtcgtgaaatggattatccgttttgcccctttgggcattttcgggctggtgtcgtccacaatcgcggagacgggtttcggcgcgctggcgggttatgcgaagctgcttgcggtactgttgggctgtatggcgtttatcgcgctggtggtcaatcccgccatcgtgtggtggaaaatccgccgcaacccttatccgctggtgtttacctgcctgcgcgaaagcggcgtgtatgccttctttacccgttcttccgccgccaatatccccgtgaatatggctttggcgaaaaaactggggctgcacgaagacacttattcgatttccatcccgttgggggcgaccgtcaatatgggcggcgcggcgattacgattaccgttttggctatggcggcggcgcacacccaaggcatacaggttgattttgccaccgcgctgctgttgagcctggtggcgacggtcagcgcgtgcggcgcgtccggcgtggcgggcggttcgctgctgctgattccgctggcgtgcagcctgttcggcatcagcaacgatgtcgccatgcaggtggttgccgtcggctttatcatcggcgtgattcaggattcggcggaaacggcgttgaattcttcaaccgatgttttgtttaccgctgccgccgatttgggccgacagagaaaccgggcggaataa

SEQ ID NO: 38461 - DNA, 525 bp, Neisseria meningitidis
atgaaaaaagcacttgccgcactgattgccctcgctctcccggccgccgcactggcggaaggcgcatccggcttttacgtccaagccgatgccgcacacgcaaaagcctcaagctctttaggttctgccaaaggcttcagcccgcgcatctccgcaggctaccgcatcaacgacctccgcttcgccgtcgattacacgcgctacaaaaactataaagccccatccaccgatttcaaactttacagcatcggcgcgtccgccatttacgacttcgacacccaatcgcccgtcaaaccgtatctcggcgcgcgcttgagcctcaaccgcgcctccgtcgacttgggcggcagcgacagcttcagccaaacctccaccggcctcggcgtattgacgggcgtaagctatgccgttaccccgaatgtcgatttggatgccggctaccgctacaactacatcggcaaagtcaacactgtcaaaaacgtccgttccggcgaactgtccgtcggcgtgcgcgtcaaattctga

SEQ ID NO: 38462 - DNA, 1392 bp, Neisseria meningitidis
atgcaagtgtttttagacaatctcaaagcctttttcgaaaccgtcagcggctgggtctggggatctgttatgttgatgctgctggtcggcaccggcattgtgctgaccgttatgctgaaaggcttgcagttcacgatgttgggctatgcgctgaaacaggcgtttgtgccgtcaaagaagtatgaaggcggcgaaggccacgaaggcgatatttcccatttcgcggcgttgatgaccgcgctgtccgccaccatcggtacgggtaacatcgccggcgtggcgactgcggtggtaaccggcggcccgggcgcggtattttggatgtggatgaccgccattttcggcatggccaccaaatacggcgaaggcgtgttggcggtgaaataccgcgtcaacaattccaaaggcgaaatgtccggcggcccgatgtattacatcgaaaaaggcttgggcaaaaactggaaatggatggccgtcgcgtttgcgctgttcggcacattcgcttccttcggtatcggcagctcggtgcagtccaactcggttgcacaggcggtgcaaaccagcttcggtatcgaacctgcctataccggcattacgttgaccgttctgactgccgttgtcgttttaggtggtattaaaggcatcgccaaagccgcttctttcatcgtgcctgctatggcggtgttttatgtgttgggcggtctttccattatcgcgattaattccgatgcactgatgcctgccgtcaagctgattttctccgatgcgttcagcgcgcaggcagtggcgggcggcgctatcggtacggtcatccgctacggcgtggcgcgcggcgtgttctccaatgaggcgggcatgggttctgcaccgattgccgccgcagccgcgaaaaccgaccatcccgtccgtcaggccttggtttctatgaccggtacgtttttggataccatcgtcgtttgctcgattaccggcatcgtgttggtaatgggactgctcggcgcgggcggcgagtttgtcaaacctgaagtgagcggcgcggcactgacaaccgtcacattccaaaaaatgctgcccggcatcggcggctggattgttaccatcggcctgattttctttgcctactcaaccattttgggctggtgctattacggcgaaaaatgcgcggtgtatgttttcggcgagaaatttgccggtttgtaccgcgtcggttatgtttcttccgttatgctgggtaccgtgttgagccttgatttggtgtggctggcttcggacacattcaacggcttgatggcattgcccaacctgattgcacttttattgatggcgaaagtcatcgtcaatgaaacgcgcgacttcaaacaaaaaatcacaaacggcgaattgccgcattaa

SEQ ID NO: 38463 - DNA, 627 bp, Neisseria meningitidis
atgtatacaggcgaacgcttcaatacttacagccatttgagcggtttgattctggcggcggcaggtttggtgctgatgctgctgaaaaccataggacacggggacggctaccgtatcttcagcgtatcggtttacggcatcagccttcttctgctctatttgagttcctcgctgtaccacggaattgcagccggaaaactgaaaagcattttgaaaaaaaccgaccactgcatgatttatgtcctgattgccggaagctacacaccgtttgcactggtttctttgagaaacgggccgggctggacggtattttcactgtcctggctgctggcggctgcaggaatcgcacaagaactcaccatcggacggaaaagcgaaaaacgtctgctgtctattgtgatttatgtcgtcatgggttggatggtcttggcggtaatgaaatccctgacagcctcactcccgtcggcaggactggcttggctggcggcaggcggtatgctgtacagcgtcggcatttactggtttgtaaacgatgaaaaaatccgacacgggcacggaatctggcatctgttcgtattgggcggcagcatcacccaatttgtcagcgtgtacggttacgtaatctga

SEQ ID NO: 38464 - DNA, 420 bp, Neisseria meningitidis
  misc_feature 405, 406, 407, 408, 409: 'n' is a, c, g or t
atggaacagcagcaaagatacatcagcgtactggatatcggtacgtctaaagtcctcgcactgatcggggaagttcaagatgacgacaaaatcaacatcgtcggtttggggcaggctccttcacggggcttgcgcgcgggcatggtaaccaatatcgatgccaccgtccaagccatcaggcaggcggtcaatgatgccgagctgatggcggataccaaaattacccacgttaccacaggtatcgcaggcaaccacatccgcagtctcaattcgcaaggtgtggttaaaattaaagacggggaagtcacgcaggcagacatcgaccgcgccattgaaacggcaaaggcaatcaatatcccgcccgatcaaaaaattctcgatgccgtggttcaagactacattatnnnnncacacacttaa

SEQ ID NO: 38465 - DNA, 1542 bp, Neisseria meningitidis
atgaagtttttagaccgtgaggcaagcattgccaagccgggtttcaaccgttggctcgtaccgcccgcagcattggcggtgcaccttgccatcgggcagatttacgcctattccgtattcaacgcgccgctgaccaaacttatcggcataaccgaatcggcggccggagattggaagctgacgaccgtaggttggatttttagtatcgcactcgcgatgctgggcgcgtcggctgccctgttcggcacatggatggaacgggtaggtccgcgcaaagccatatttgccgccgcctgctgtttcagcctgggcttcttcgtatccgcattcggcgtgcgtacgcacaacctcttcctgctctatttgggcaacggcgtcatcggcggcgtaggcttaggcttaggctacatcgggccggtttccacactgatgaaatggtttcccgacaagccgggtatggcgaccggtttggcgattatgggtttcggcggcggcgcaatgctggcctctccgctttccgtatcactgatgaacgccttttcaaacgccgcttcggtcggggttgccgaaacctttgccgtattgggcctgctttacctcgcactgatgatgttcggcgcgtttaccatccgcgtacctgccgacggctggaaacctgaaggctataccgcgccgaaaacgcaaaacaagctggtcagcagtaatcatgtcaacgtgtcccaagccatgaaaacgccgcagttttggctgttgttctgggtattgtgcctgaacgtaaccgccggcatcggcgtattgggtcaggcatccgtgatgattcaggaactcttttccgaaacctccataggcaggcaggcagcagtcggcgcaggtgcggcggcaggcttcgtcagcctcctgagcctgtttaacatgggcggacgctttttgtggtcgagcgtttccgacaaaatcggacgcaaaaacacctacaccatcttcttcgtactcggctcgctgctgtatttcgccgttccctccatcggcgagggcggcagcaaagccctgttcatcatcggcttttgcgtgattatttccatgtacggcggcggatttgccgccattcccgcctacctgaaagacctgttcggcacctatcaggtcggcgcgattcacggacgcatcctgctggcctggtcaaccgccgccgtcatcggcccggtactggtcaattacatacgccaaagccaaatcgacagcggcataccggcggcacaggcatacagcgtaaccatgtacatcatggcgtgcctgctgattatcggtttgttgtgcaacctcgccgtcaaatccgtacacgaaaaacaccacgaaaaagacatcaaaaccgccgcacacagcggcaaccccgacgacgaaaccgccatatccgacgcttaccttgtgggcgaaaaagtttccggcggcggcatatcggtctggtggcgttgggcattggccgtcataccgctcgcctacggcgtggtgatggtctttgtcaaagcactcgaccttttctcctga

SEQ ID NO: 38466 - DNA, 183 bp, Neisseria meningitidis
atgttttggtatgtaatcggcttttgctcctttgtcgtcgcgctgctgtcgctgtgggtcaatgtcggcgcattcggtatgcaggaagacgataccccgcaatcggattatgaaaaacgtttgggcttgggtgcgaagctgaaaaacaaaaatacgccggatacggaagaaaagcagcaataa

SEQ ID NO: 38467 - DNA, 2940 bp, Neisseria meningitidis
atgagcggttttaattacgagaaaaaccagccgcaccaaatgcgggcggtttcggcggttttgggcgtgtttgacggggcaacgcccaaatatcggacggcagacgaaaatcccgaacttttgtttgctgcaaaacaatacgcaaacaatatcctgaaagtgcaaagccaaaacggtatagacggccgattccccgaccgttcggacgaccaaaatatccttgatatttccatggaaacgggcacgggcaaaacctatacctacacacaaaccatgttcgagctgcaccgttggctgggcgtgttcaaatttatcgtggtcgtgccgactttgtccattaaggcgggaacacagcagtttttgcaaagcaaggctttggcagagcattttgaacaggatttcggcggcgattatgaaggcgtacgcctgaaaacctatgtggtggaaagcgcgaaaaagaataagggcaaaaagtccaatgcgcccataacgattgagcaatttgtcaaagcggaaaacaaaaaggaaattcatgtgctgctgattaacgcgggcatggttaattcgtcgtccatgaacgatacgggcgacaaggcattgaaggatttgtttgacaatcccgttgatgcattggccgccgtgcgcccgtttatgattgtggacgaaccgcataaattcccgacccgagatagcgcgaaaacgtggggcaatatcaaacgcttaaaaccgcaatatattttgcgctacggtgcaacatttaacgatgaatattacaacttgctttaccgtttgacggcagtagacgcgtttaacgacgggctggtcaaaggcgtgcgcgtgtttcaggaagaaatgcagggcggcatggatgcggcggtaaaactggtgtcgtcggacggcaaagaagcgaaatttgaattaaacgaaaaggacaaaaagcagacgttcaaactggcaaaaggcgaagatttggcgcaaatccatccggctatttcggatttgaaaatcgacaaaatgaataaaaccgtggtggtgttaagcaacggcttggagttgaaaacgggtgccgtcatcaacccttattcctattcgcaaacggtgcaggatgcgatgatgcagcgggcggttgccgaacatttcaagctggaacgcgcgcttttggcagaacgcgcgccacagcccaaaatcaagccgctgacgctgttttttattgacgatatcgcgggctaccgcagcggcaacgagctttcaggcagcctgaaagataaatttgaaagctggattcgcgcggaagcggcacgccgtctgaaaacggaaagcgacccgttttaccgcgattacctgcaaaagacattggacgatgtatccgcctgccacggcggctatttttccaaagacaatacagacagcgacgatagaatcgagcaggaaatcaatgaaatcctgcacgataaggaaaaactgctgtctttggacaacccgcgccgctttattttttccaaatggacgctgcgcgaaggctgggacaatcccaacgttttccagatttgcaaactgcgttccagcggcagcacgacttccaagctgcaagaagtcggacgcggcctgcgcctgccggtaaacgagctgatggcgcgggtgcgcgatgtaccgtacaaactgaattattttgtcgatagcagcgaaaaagactttgtgaagcagcttgtcggcgaaatcaacgacaattcttttcaggaagaaatctccaaaaagtttaccgaagagctgaaacaaaaaatattgcaaaaataccccgatatcaaaccgctggtattggtaaaccaactgttttcagacggcatcattgacgacaatgaaaactttgccgaagacggctatgacaaattaaaagccgcctatcccgaagccttccccaaaggtttggacaaaggcaaagtcagcaacgccaaagacgagggcaaagacaccatcatcatgcgcgaaggcaaatatgaagaactcaaagccttgtgggagctgattcaccataaagccgttttgcagtacaaaatcaaggatgaagccgaatttgtcgatttatttaccgcctatttgcgtgaaaacgccgccaaattcccgcaggcaggcatacgcacggcggtaaacgaagcttatatcaacaacgggcttatgctttcccgccgcatagacagttttgaagatgaagattttatccgttttaacacaatgacttaccgtgagcttctggaaaaactggcacaaacggcaaaaatccgcatgcagactttgcatcaggcgttttatcgcgtccgcgacgaactgaacattggcgattttttgaatatgcagaccatcgcccaaatcaaaaacggcttcaaccggtttttgcttcatcattccttccataaatttgaactggattaccggcttgtcggcagcaaaatccatccgaccaaatttaccgataaagacggcaaaccgcgcgcggtgaaaaaagcagatttgggcagatttgaagatacggagcaccggcctgccgccggctatctcttcgacgaaattttctacgattcggatatagaacatgaaaatgtcgccaacaaccaaattgaaggcgtaaccgtattcaccaaaataccgagaaactccatcaaaatccccgttgccggcggcggcacgtattcgcccgattttgcctatatcgtgaaaaccaaaagcggcgagattctgaactttgtgattgaagccaaagggactgacggggcggaagatttgcgaaaaagcgaagagcggaaaatcaaacatgccgaaaagccgtttgccgagatttccaaagaaatcaaggtggtgttcaaaacgcagtttgacggcgagaggatagccgaactgatcgggcaaaatatgcccgcaggcgggcattctgaaaacggacactga

SEQ ID NO: 38468 - DNA, 324 bp, Neisseria meningitidis
atgatgaccgaaagcgagtttatccgcgcgagcgaagcattatttgaacacatcgaagaccaaatcgacgaaaacggctgggatttcgactgccggtttgccggaaacgtcctgaccatcgaagccggagacggcacgcaaatcatcgtcaaccgccacacgcccaatcaggaattgtggattgccgccaaaagcggcggctaccatttcgccgagcaaaacggcaaatggctggcaacgcgagacagccgcgatttttatgatgttttaaacgaagccctgagcgcggcttcgggcgaagcggtggaaattgcggaattgtga

SEQ ID NO: 38469 - DNA, 1008 bp, Neisseria meningitidis
atgagcaccttcttccagcaaaccgcccaagccatgattgccaaacacatcaaccgcttcccgctattgaagttggaccaggtgattgattggcagccgatcgaacagtacctgaaccgtcaaaaaacccgttaccttcgagaccaccgcggccgtcccgcctacccgctgttgtccatgttcaaagccgtcctgctcggacaatggcacagcctctccgatcccgaactcgaacacagcctcattacccgcatcgatttcaacctgttttgtcgttttgacgaactgagcatccccgattacagcaccttatgccgctaccgcaactggctggcgcaagacgacaccctgtccgaactgttggaactgatcaaccgccaactgaccgaaaaaggtttaaaaatagagaaagcatccgctgccgttgttgacgccaccattattcagaccgccggcagcaaacagcgtcagaccatagaagttgacgaagaaggacaaatcagcggccaaaccacaccgagcaaagacaaagatgcccgttggatcaagaaaaacggcctctacaaactcggttacaaacaacatacccgcaccgatgcggaaggctatatcgagaaactgcacattacccccgccaatgcccatgagtgcaaacacctgccgcctttgctggaagggatagctgaaggtacgaccgtctatgccgacaaaggctatgacagtgcggaaaaccggcaacatctggaagaacatcagttgctggacggcattatgcgcaaagcctgccgcaaccgcccgctgtcggaagtgcaaaccaaacgcaaccgatatttgtcgaagacccgttatgtggttgaacagagcttcggtacgctgcaccgtaaattccgctacgcccgggcggcctatttcggactgattaaagtgagtgcgcaaagccatctgaaggcgatgtgtttgaacctgttgaaagcggccaacaggttaagtgcgcccgctgccgcctaa

SEQ ID NO: 38470 - DNA, 2514 bp, Neisseria meningitidis
  misc_feature 6, 7, 8, 9, 10: 'n' is a, c, g or t
gtgtgnnnnnaactgattgccgcctccgtcgcagttgccgcatcctttcaggcacatgctggactgggcggactgaatatccagtccaaccttgacgaacccttttccggcagcattaccgtaaccggcgaagaagccaaagccctgctaggcggcggcagcgttaccgtttccgaaaaaggcctgaccgccaaagtccacaagttgggcgacaaagccgtcattgccgtttcttccgaacaggcagtccgcgatcccgtcctggtgttccgcatcggcgcaggcgcacaggtacgcgaatacaccgccatcctcgatcctgtcggctactcgcccaaaaccaaatctgcactttcagacggcaagacacaccgcaaaaccgctccgacagcagagtcccaagaaaatcaaaacgccaaagccctccgcaaaaccgataaaaaagacagcgcgaacgcagccgtcaaaccggcatacaacggcaaaacccataccgtccgcaaaggcgaaacggtcaaacagattgccgccgccatccgcccgaaacacctgacgctcgaacaggttgccgatgcgctgctgaaggcaaacccaaatgtttccgcacacggcagactgcgtgcgggcagcgtgcttcacattccgaatctgaacaggatcaaagcggaacaacccaaaccgcaaacggcgaaacccaaagccgaaaccgcatccatgccgtccgaaccgtccaaacaggcaacggtagagaaaccggttgaaaaacctgaagcaaaagttgccgcgcccgaagcaaaagcggaaaaaccggccgttcgacccgaacctgtacccgctgcaaatactgccgcatcggaaaccgctgccgaatccgccccccaagaagccgccgcttctgccatcgacacgccgaccgacgaaaccggtaacgccgtttccgaacctgtcgaacaggtttctgccgaagaagaaaccgaaagcggactgtttgacggtctgttcggcggttcgtacaccttgctgcttgccggcggaggcgcggcattgatcgccctgctgctgcttttgcgccttgcccaatccaaacgcgcgcgccgtaccgaagaatccgtccctgaggaagagcctgaccttgacgacgcggcagacgacggcatagaaatcacctttgccgaagtcgaaactccggcaacgcccgaacccgctccgaaaaacgatgtaaacgacacacttgccttagatggggaatctgaagaagagttgtcggcaaaacaaacgttcgatgtcgaaaccgatacgccttccaaccgcatcgacttggatttcgacagcctggcagccgcgcaaaacggcattttatccggcgcacttacgcaggatgaagaaacccaaaaacgcgcggatgccgattggaacgccatcgaatccacagacagcgtgtacgagcccgagaccttcaacccgtacaaccctgtcgaaatcgtcatcgacacgcccgaaccggaatctgtcgcccaaactgccgaaaacaaaccggaaaccgtcgataccgatttctccgacaacctgccctcaaacaaccatatcggcacagaagaaacagcttccgcaaaacctgcctcaccctccggactggcaggcttcctgaaggcttcctcgcccgaaaccatcttggaaaaaacagttgccgaagtccaaacaccggaagagttgcacgatttcctgaaagtgtacgaaaccgatgccgtcgcggaaactgcgcctgaaacgcccgatttcaacgccgccgcagacgatttgtccgcattgcttcaacctgccgaagcaccgtccgttgaggaaaatgtaacggaaaccgttgccgaaacacccgatttcaacgccaccgcagacgatttgtccgcattacttcaaccttctgaagtacctgccgttgaggaaaatgcagcggaaatcgttgccgatgatttgtccgcactgttgcaacctgctgaagcaccggccgttgaggaaaatgtaacgaaaaccgttgccgaaatacctgatttcaacgccaccgcagacgatttgtccgcattacttcaaccttctgaagtacctgccgttgaggaaaatgcagcggaaaccgttgccgatgatttgtccgcactgttgcaacctgctgaagcaccggccgttgaggaaaatgcagcggaaatcactttggaaacgcctgattccaacacctctgaagcagacgctttgcccgacttcctgaaagacggcgaggaggaaacggtagattggagcatctacctctcggaagaaaatatcccaaataatgcagataccagtttcccttcggaatctgtaggttctgacgcgccttccgaagcgaaatacgaccttgccgaaatgtatctcgaaatcggcgaccgcgatgccgctgccgagacagtgcagaaattgctggaagaagcggaaggcgacgtactcaaacgtgcccaagcattggcgcaggaattgggtatttga

SEQ ID NO: 38471 - DNA, 510 bp, Neisseria meningitidis; identical to SEQ ID NO: 36289

SEQ ID NO: 38472 - DNA, 564 bp, Neisseria meningitidis; identical to SEQ ID NO: 36686

SEQ ID NO: 38473 - DNA, 1239 bp, Neisseria meningitidis
  misc_feature 1220, 1221, 1222, 1223, 1224: 'n' is a, c, g or t
atgtgttgttctcttagttttgcagaaccagcaagaatagatgatcgaataataaaatttaggccatctaaatcaaagttttttgaatctacaggatatagaaaaatcaataatgaattttctaaattcacagaagcggcaaatgtcgaacatatccccacgggcgcaaaagcccgaatcaacgcaaagataaccgccagcgtatcccgcgccgccgtcttgtcaggagtcggcaaacttgcccgcttaggcgcgaaattaagcacaagggcagttccttatgtcggaacagcccttttagcccatgacgtatacgaaactttcaaagaagacatacaggcacaaggctaccaatacgaccccgaaaccgacaaatttgtaaaaggctacgaatatagtaattgcctttggtacgaagacaaaagacgtattaatagaacctatggctgctacggcgttgacagttcgattatgcgccttatgtccgatgacagcagattccccgaagtcaaagaattgatggaaagccaaatgtataggctggcacgtccgttttggaattggcataaagaagaactgaataaattaagttctttggattggaataattttgttttaaatcgttgcacatttaattggaatggcggagattgtttggtcaataaaggtgatgatttcagaaatggggctaatttttcccttatccgcaatccgaaatacaaagaagaaatggatgccaaaaagctggaagagattttatcgttgaaagtcgatgccaatcccgacaaatacataaaggcaaccggatatcccggttattccgaaaaagtagaagtagcacccggaacaaaagtgaatatggggcctgttacggacaggaacgggaatcccgttcaggttgtcgcaacattcggcagggattcgcaaggcaacaccacagtggatgttcaagtaatcccgcgtcccgacctcacacccggaagcgcggaagcaccgaacgcacagccgctgcccgaagtatcgcccgccgaaaaccccgcaaacaacccgaaccccaatgagaaccccggcacgagccccaatcccgaacccgaccccgatttgaatcccgatgcaaatcccgatacggacggacagcccggcacaagacccgattcccccgcagttccgggccgcacaaacggcagggacggcgaagacggcggccttttgtgcaaatnnnnncacacacttaattaa

SEQ ID NO: 38474 - DNA, 591 bp, Neisseria meningitidis
  misc_feature 576, 577, 578, 579, 580: 'n' is a, c, g or t
atgtttttctccgccctgaaatcctttctttctcgatacattactgtatggcgcaatgtttgggcggtgcgcgaccagttggaaccgcccaaacgcacggcggaagaacaggcgtttttgcccgcgcatttggaactgaccgatacgccggtctctgccgctccgaaatgggcggcgcgttttattatggcgtttgcgcttttggctttgttgtggtcctggttcggcaaaatcgatattgtggcggcggcttcgggcaaaacggtgtcgggcgggcgcagcaaaaccatccagccgctggaaacggcggtggttaaggcggtacatgtgcgcgacgggcagcatgtgaaacagggagaaacgctggcggaactggaggctgtgggaacagacagcgatgtggtgcagtcggagcaggctttgcaggctgcccaattgtccaaactgcgttatgaagcggtattggcggcattggaaagccgtaccgtgccgcatatcgatatggcgcaagcacggtctttaggtctctccgatgccgatgtgcaatcggcgcagtgttggcgcagcaccagtatnnnnncacacacttaa

SEQ ID NO: 38475 - DNA, 675 bp, Neisseria meningitidis
atgcctgctgctttgattaaggattttctgctgactcagggtttgaagctgccgcttgacgaggttcgggcggcgtatctgacggcgcagacggtaatggatatggggacggcttcgattgagcgttcggttttgtggcttgagcatgaggattggaggcttgccgattatttggagcaaaacagcgggaatgaggaaggtctgaaacggcttttcatggctttagattcggtgttttcgcgctcgacaggcgtgcggagtgcggcggtctatgccttgatgccgtctgaaagccaggctttccaactgatatgcctgtcccgacagggcgaggttttggaaaacctgtgggatttggatgaagcggcaggcaaggtttcgcttgcctgccgttcggcgcaaagcggttggatgaatattgcttcggatgtaggccgctggctggcattgggcgagctttccggcgaacgcaaccggcattcggcggcgcaactttccattcccgtttgtacggagagcggcggcgtgctgggcgtggttcacgtcgaatttgaaaaagccggttgtgcggacgaggcggcgcaggcggaatggattgcattggcgctggcgttgtccgaacctttgaagcagcttttgggcatcactgccgcagaaggagatgaaaatgtctga

SEQ ID NO: 38476 - DNA, 543 bp, Neisseria meningitidis
gtgcagagttggaaagagaggcgcgatttcaatattgtaaagcaggatttggatttttcctgcggggcggcttcggtggcgacgcttttgaacaatttttacgggcaaaagctgacggaagaggacgtgttaaaaaaactggataaggagcagatgcccgcgtcgtttgaggatatgcggcgcattatgcctgatttgggttttgaagcgaaaggctatgccctgtctttcgagcagcttgcacagttgcaaatccccgtcatcgtgtatctgaaataccgcaaggatgatcatttctcggtattgcgcggtatagacggcaatacggttttgcttgccgacccgtcgctgggtcatgtttcgatgagcagggcgcagtttttggatgcttggcaaacccgtgagggaaatttggcaggtaagattttggcggttgtgccgaaagggagggatgccggcggggataaggcgtttttcacacgcagtccgaaacgtcagacggagtttgcggtcggacaggtaaaatggtggcgtgcttattga

SEQ ID NO: 38477 - DNA, 1035 bp, Neisseria meningitidis
atgggtgccggtgcggcgtttgccgccttggtttggctgattttcgcgctcggcgatactttgactccgtttgcggttgcggcggtgctggcgtatgtgttggaccctttggtcgaatggttgcagaaaaagggtttgaaccgtgcatccgcttcgatgtctgtgatggtgttttccttgattttgttgttggcattattgttgattattgtccctatgctggtcgggcagttcaataatttggcatcgcgcctaccccaattgatcagttttatgcagaacacgctgctgccgtggttgaaaaatacaatcggcggatatatggaaatcgatcaggcatctattattgcgtggcttcaggcgcatacgggcgagttgagcaacgcgcttaaggcgtggtttcccgttttgatgaggcagggcggcaatattgtcagcagtatcggcaacctactgctgctgcccttgctgctttattatttcctgctggattggcagcggtggtcgtgcggcatcgccaaactggttccgaggcgttttgccggtgcttatacgcgcattacgggtaatttgaacgaggtattgggcgaatttttgcgcgggcagcttctggtgatgctgattatgggtttggtttacggcttggggttggtgctggtcgggctggattcggggtttgcaatcggtatggttgccggtattttggtttttgttccctatttgggcgcgtttacaggactgctgctggcaaccgtcgccgccttgctccagttcggttcgtggaacggcatcctatcggtttgggcggtttttgccgtaggacagtttctcgaaagttttttcattacgccgaaaatcgtgggagaccgtatcgggctgtcgccgttttgggttatcttttccctgatggcgttcggacagctgatgggtttcgtcggaatgttggcaggattgcctttggccgccgtaaccttggtcttgcttcgcgagggcgtgcagaaatattttgccggcagtttttaccggggcaggtag

SEQ ID NO: 38478 - DNA, 531 bp, Neisseria meningitidis
atgcagggttttgaactcgaagatttgacgctttggctgatacgcgatgccggagaggatcagatgtggatagaccgttgggcgatcagttatcccgtcgtgcagatgtccgaagcgtcggccggtcaaagcataggggaatggcaggcagggcttcggacggcatttgaacgcatacgtggcaaatacgtcgccgttgtcgcacacggtgcgggcgcggccgcatttttggcgtggctgtatcaggcagacatcctgacacggaagaaaattgccaacatcatccttgtaccgcagcgtcccgatatttttcccgacgatgcggaacacactttccaacgcgtccgctgtccctgccgtgccgcattggttgtacccgaacacggcggcgtgccgcacggttgggcgcaaaaacaggcggatttgtggaacgcccgcctgttggtttccccgcattcgggcagtttgaacggcatgctcggcggctggcagtggggtatgaagctgatgcaggaaatgttgctggcgtga

SEQ ID NO: 38479 - DNA, 657 bp, Neisseria meningitidis
gtgaacaaacggctgttttgcagccgcaacggcttgcgctattacctgttgggcggtttctgtttgagtgtttttccgcttttgctggtgtttgcctcatccgtttgggcggtttatcggacgggcgggcaggttttgccgccgtatgtccgggcggatgccgcgctggtgttgggcgccgccgcgtgggacaaacgcccttccccggtttttcgggaacgcatcaaccacgccatcgcgctttatcagagccgcagggtcggcaaaatcatttttaccggcggcaggagtaaaaagggttatatgacggaggcggaagtcgggcggagatacgcgctcaagcaaggaattccgccgcgcaacatcctgtttgaaaacacttcgcgcaacacttatgaaaacctgaacaacatccgtccggttttgcgtgccaacggtattgccagcgtggtgattgtcagcgatccctaccatttggcgcgggcggcggaaatggcggaggatttgggtgtccgcgtttatatgtctgccaccccgaccacgcggtttgatgcgggaaataagaaaaaaatctttatgctgcaagagggatatgcgttatccctctaccgtttggaaaaatgggggcgggattttttcaattggctgtttcattga

SEQ ID NO: 38480 - DNA, 123 bp, Neisseria meningitidis
ttgctcaaactgattaaccgccaactgaccgaaaaaggcttaaaaatagagaaagcatccgctgccgtcgttgacgccaccattattcagaccgccggcagcaaacagcgccaggcccgataa

SEQ ID NO: 38481 - DNA, 2148 bp, Neisseria meningitidis
  misc_feature 2125, 2126, 2127, 2128, 2129: 'n' is a, c, g or t
atgcaactgcatattctgaacaatccgaaggacgcggctttggcggcggacgcggaatttctgaaacaatccctgttcaacctcctgcacgaagaagcctcgccgttggttgtcgaaacggtcaaactcttgtccacttccgacgacagcgcggcattgattgaaaaagtattgccgcaattggacgaacaacaaacccacgatttaaccttggcctgcggcctgttcgcccagattttgaatatcgccgaagacgtgcaccacgaacgccgccgccaaatccacgaagaagccggacgcggcggcgcggaaggcagcctgacggaaaccgtccgcaggctcaaagcggggaaagccgacggcaaatcggtgcagcggcagttggacaatacgtccgttaccgccgttttgaccgcgcacccgaccgaagtgcaacgccaaaccgtcttaagcttcaaccgccgcatccgcgcactgttgccgcaacgcgaacgctgcaccaatgccgacgcgctggcacggctgcgccgcgaaatcgacactatcctgctgggcttgtggcagaccagcgaaacgcgccgccacaaactcagcgtcaacgacgaaatcaacaacggcgtgtccatcttcccgatgagctttttcgaagccctgcccaagctctaccgcaatatggaacacgactttcagatggtctatcccgatgtctgcgttccgaacatcctcaaaatcggcggctggatcggtggcgaccgcgacggcaatccgttcgtttctgccgaaaccttgcgttttgccttccgccgccacgccgatgccgtgttccgtttttaccgtggcgaactcgacaaactttaccgcgaactgccgctctccatccgccgcgtcaaagtcaacgacgacgtaatggcactggcagccctctcgcctgacgaagaaatcgctcgcaccgaagaaccctaccgccgcgccattgcttacatcatggcgcgcgctatgggcaaagcgcgcgcgctcggtttgggcatgggctgcaaattcggctttctcgagccgtatgcttcggcacaagaatttctcgatgatttgaaaaaattgcaacgttcccttatcgacaacggcagccgcctgcttgctgaaggccgtttggcagacctcatccgttccgtgtccgtgttcggcttccacatgatgccgctcgacctgcgccaacacgcaggcaaacacgccgatgtggttgccgagcttttccaacacgcaggcttggaagactacaacagcctgaacgaagagcaaaaacaagccgccctgttgcgcgaattgagccatcaacgtccgctgtacagcccgttcatcacatacagcgaccatacccgccacgaactggcaattttcaacgaagcgcgcaaaatcaaagacgaattcggcgaagatgccgttacacaaagcattatttccaactgcgaacaacccagcgacctgctcgccttggcattgctgctgaaagaaagcggcctgctggcggtggaaaacggcaaaccgcgcagccgcatcaatatcgtgccgctgtttgaaaccatcgaagcactcgaaaacgcctgtccggtcatggaaaccatgttccgcctcgattggtacgatgccctgctcgaaagctgcggcaacatccaagaaattatgctcggctactccgactccaacaaagacggcggctatgttaccagctcatggtgtctgtatcaggcggaattgggcttggtcgaactcttcaaaaaatacgatgtccgcatgcgcctgttccacggtcgcggcggcagcgtcggacgcggcggcggcccttcttaccaagccattctcgcccaaccggcgggcagcgtggcgggacaaatccgcattaccgaacaaggcgaagtcattaccgccaaatacgccgaccccggcaatgcccaacgcaacttggaaaccttggttgccgcgactttggaagccagcatcctgccggataaaaaagaccctgatgccaaactgatgcaggcattgtcggacgtatcgttcaaatactaccgcgaactgattacccaccccgacttcatcgactacttcctgcaaaccagcccgattcagnnnnncacacacttaattaattaa

SEQ ID NO: 38482 - DNA, 606 bp, Neisseria meningitidis
atgacccgtcaatctctgcaacaggctgccgaaagccgccgttccgtttattcgttaaataaaaacctgcccgtcggcaaagatgaagttgtccaaatcgtcgaacacgccgttttgcacacaccttcttcgttcaattcccaatctgcccgcgtggtcgtgctgtttggcgaagagcatgataaggtgtggcaatttgtcgaagacgcgctgcgtgccgtcgtgcctgccgacagttttgaaccgaccgcgcaaaaattgaacctgtttaaggcgggtgcggcaactattttgttttatgaagatcaaaatgttgtcaaaggtttgcaggagcagttccctgcttatgccgccaactttcccgtttgggcggaccaggcgaacgctatggtgcagtatgccgtttggacgacacttgccgcggtcggcgtaggtgcaaacctgcaacattacaatcccttgcccgatgcggcgattgccaaagcgtggaatatccccgaaaactggttgttgcgcgcacaaatggttatcggcggtattgaaggggcggcaggtgaaaagacctttgaacccgttgcagaacgtttgaaagtgttcggcgcataa

SEQ ID NO: 38483 - DNA, 420 bp, Neisseria meningitidis
  misc_feature 401, 402, 403, 404, 405: 'n' is a, c, g or t
atgcaaaccgcaaacaaaaaaaccatcctcgttaccggcggcgcgggctttatcggctctgccgttgtccgccatatcattcaaaacacccaagattccgtcgtcaacctcgacaaactgacctacgcgggcaatctcgaatcgctgaccgacattgccgataatccccgctatgctttcgagcaagtggacatttgcgaccgcgccgaactcgaccgcgtattcgcacaacaccggcccgatgccgtgatgcacttggcggcggaaagccatgtcgaccgctctatcggttcggcaggcgagtttatccaaaccaatatcgtcggcacattcaatctgcttgaagcagcccgcgcctactggcaacaaatgccgtctgaacagcacgaagccttccgttnnnnncacacacttaattaa

SEQ ID NO: 38484 - DNA, 1032 bp, Neisseria meningitidis; identical to SEQ ID NO: 36792

SEQ ID NO: 38485 - DNA, 513 bp, Neisseria meningitidis; identical to SEQ ID NO: 38230

SEQ ID NO: 38486 - DNA, 1086 bp, Neisseria meningitidis
atgaccgtcccccatattccgcgcggccccgtcatggcagacattgccgccttccgcctgaccgaagaggaaaagcaacgcctgctcgatcccgccgtaggcggcatcatcctcttccgccgcaacttccaaaacatcgaacaactcaaaacactcaccgccgaaatcaaagccctgcgcacacccgaactcattatcgccgtcgatcacgaaggcggcagggtgcaacgtttcatcgaaggcttcacccgcctgcccgcaatgagtacgctcggcgagatttgggacaaagacggcgcgtccgccgccgaaaccgccgccggacaagtcggccgggttttggcaaccgagctttccgcctgcggcatcgatttgtccttcacgcccgtcttagatttggactggggaaactgccccgtcatcggcaaccgcagtttccaccacaatcccgaagcggtcgcccacctcgccctcgcccttcaaaaaggtttggcaaaaggcggtatgaaatcctgcggcaaacattttcccggacacggatttgtcgaaggagacagccatctggtcttgccggaagacaggcgcagcctgtccgaactcgaagccgccgacctcgcccccttccacattatgagccgcgaaggtatggcggcggttatgcccgcccacgtcgtttatccacaagtggacacaaagcccgcagggttttccgaaatctggctcaaacaaattttgcgccgcgatatcggattcaaaggcgtgattttctcggacgatttgactatggagggcgcgtgcggtgtcggcggcctcaaagaacgcgcccgcatttcctttgaggcaggttgcgacatcgtcctcgtctgcaaccgtcccgaccttgtggacgaactgcgcgaagatttccgcattcctgacaatcccgctttggcgcaacgttggcaatatatggccaacacgctcggcagtgccgccgcgcaagccgttatgcagacggcggatttccaagaggcgcaagcctttgttgccggccttgcctcgccgcaggatacagcgggcggcgtaaaagtcggcgaagccttttaa

SEQ ID NO: 38487 - DNA, 885 bp, Neisseria meningitidis
atgagcagcggaaatatccacatccacagcatgaccggctttgccaacgcggcggcagagtgcggcagcaaacgcatcaacctcgacctgcgtgcggtcaaccaccgttttctagatattcaaatcaggatgcccgacgatttgcgctatttggaaagcggtatccgcgagaaaatttcatcccatatcgcgcgcggcaaagtcgaatgcaaaatccaaattcaagatacggaaaacagcagacagtccttggaactcaactcggatttggtgaaccagcttgccgaaatcaacaaagacctccgcaagcatcacgatttggcaaaactgggcgttgccgacatcctgcgtttccccggcgtattggcaagccaaagggaaaatacggaggaattggcaaaaagcattaccgaactgaccgaaaaagcgttaaaagactttactgccgcacgccggcgcgaagggaaaaaattgggcgagcacctgttacaacgcctcgaaagcatggaagaaatcatagatgcattgagcgaactctttcctaccctgctggaaacacataaagaaaaaatccgcgcccgcctcgtcgaagcagtcggcgacatcaataatgacaggctgcaacaggaatttgccctctttattcaaaaatccgacatcgacgaagaattcagccgcctgcgcactcacattgccgaagtgcgccgtatcgttaccgaacacaaaggcagcagcggaaaacgcttggatttcctgatgcaggaattaaaccgcgaagccaacactttgggcagcaaatccattgccgccgaatgcacccaagcctcggtcgaactgaaagtcttaatcgagcagatgcgggaacaagtgcagaatatcgaataa

SEQ ID NO: 38488 - DNA, 213 bp, Neisseria meningitidis
atgattaaattggatttaaaaagcataaatttatatgatattgattttgaaaaatttacccccgaaattccagataatttccatagatggatagatttggatatcggaatcgaaggagaacaaggctcatctattttttcactttgcatttgttctcctaaatggatttcccatcattgtaataaagaaggtttttttggtctaatgcattaa

SEQ ID NO: 38489 - DNA, 621 bp, Neisseria meningitidis
atggcacagtttttcgccgttcatcccgacaacccccaagaacgcctcatcaagcaggcggtcgaaatcgtcaataaaggcggcgtggtcgtttatccgaccgattcctgttatgccttgggctgcaaactcggcgataaggcggcgatggaacgcatactctccatccgcaaaatcgatttgaaacaccacctgaccctgatgtgcgccgatttgagcgagttgggcacgtacgccaaaattgacaacgtacagtttcgtcagcttaaagccgccacgcccggaccttatacctttatcttgcaggcgacgaaggatgtgccggcgcgcacgctgcacccgaaacgcaaaaccatcgggctgcgtattcccgataatgccattgcacaagccctgctgggggaattgggcgagccgcttttaagctgcaccctgatgctgcccgaagacggcgaaccattgaccgatccttatgaaatccgcgagcgtttggaacacgccgtcgatttggtgattgacggcggctggtgcggaaccgagccgaccaccgtcatcgacatgaccgacggtacggaattggtgcgccaaggttgcggcgatacggcggtgttcggtttgtag

SEQ ID NO: 38490 - DNA, 1131 bp, Neisseria meningitidis
atgaaacaagccgattcaaccatcaaatctcgtgcggcggtggcattcgcccctaaccaacccttacaaattgtggaaatcgacgtagaaatgccgcgtaaaggcgaggtgttaatccgcaatacccacactggcgtgtgccatactgatgcgtttacgttatcaggaagcgatcctgaaggcgtattccctgtggtgcttggacacgaaggtgcgggtgtggtcgttgctgtgggcgaaggtgtgtcaagcgtaaaaccgggtgatcacgtgattccgctttacaccgccgaatgtggcgaatgtgagttttgttgttcaggtaaaaccaacttgtgcgtctcagtgcgtgatacacaaggtaaaggcttaatgccggacggcacgacgcgtttttcttatcaaggtcagccgatttatcactatatgggctgttcgactttcagtgaatactccgttgttgccgaagtttcactggcgaaaatcaaccctgaagccaaccatgaacaagtatgtttgctcggctgcggcgttaccacaggtattggtgcggtacataatacggcaaaagtgcaagaaggcgactctgttgccgtgtttggcttaggcgcgattggtttggcggtggtgcaaggtgcgcgtcaagccaaagccggccgcattatcgccattgataccaatccatcaaaatttgagttggcaaaacagtttggtgcaacggattgtttgaacccgaacgattacgataaaccgatcaaagatgtgttgttagacattaataaatggggcattgaccatacctttgaatgtatcggcaacgtaaacgtaatgcgtcaggcattagaaagtgcacatcgtggttggggtcaatccattatcatcggcgtagcaggtgcaggacaagaaatttcaacgcgtccgttccagttggtaacaggtcgtgtttggaaaggttcagcatttggcggtgtgaaaggtcgctctgaactgccgaaaatggtggaagattcaatgaaaggcgacattgagttagaaccgtttgtaacccacacaatgacactcgatcaaatcaataaagcctttgacttaatgcacgaaggtaaatcgatccgcgccgttattcactactaa

SEQ ID NO: 38491 - DNA, 1164 bp, Neisseria meningitidis; identical to SEQ ID NO: 38292

SEQ ID NO: 38492 - DNA, 324 bp, Neisseria meningitidis
atgcaaaacgaaaccatcaacctgaaacagcaccttgccgccatcaaagaatactggcagcccgaaatcatcaaccgccacgggttccaattccgtttggtcaaacttttgggcgattacggctggcatacgcacggatacagcgacaaagtgctgtttgccgtggagggcgacatggcggtggacttcgccgacggcggcagcatgacgatacgcgagggcgagatggcggtcgtgccgaagtcggtgtcgcaccgcccgcgttcggaaaacggctgctcgttggtgctgattgagttgtccgacccgtccgaggccgtctga

SEQ ID NO: 38493 - DNA, 396 bp, Neisseria meningitidis
atgccgtctgatgtcggaatacggcttcagacggcatttaaacggaagtttaaaatgaaaaaaatattttattttctgatggttgttttttctacaagcgtatgggccggggatgcggaagacaatctgctcagcatccaatccggctatcgtgccttactgcaaaagcaaaacaatctggacggaaaaatcatcgggatgcagtcggatttggaagatgcgcgccggcgtttgcaggcggcacaggcggatattaaccgtttggaagcggaaattcctgcagcaatggcgcaaaaagcccggcaggctgaagagctgaggcaaatcggagtgcgtttggaccatgcttggaatgcggtttacggcgcagggggaacgaaggcgtcggggaattga

SEQ ID NO: 38494 - DNA, 1191 bp, Neisseria meningitidis
atgatctaccaccgcatcgccgtaaacgtgccgctttcagacggccttttgacttattcccattccgatccgcttcctccgggaacgcgggtgcttgtgcctttccgcaataaaaccgtggtcgggatggtgtgggaaacggatattgcgccggatatggatacggcgcggattttgagtattcagacgacctttttagacgagccgccgttgcctgaaagctggcgtgatttgctctcgtttacgtcgcgttattaccactatccgacggggcaggcggtgtttgccgcgctgccgcagggtttgaaggaaacgcgcgcggtggaaatgccgcagccgccgttgttttatgcgttgaacgaagcgggcagggcgcaaacgccgccgccggcgcggttcaacaaaaaagcggctttgtgggacgcgctgctttcgggcggaatgacgatggcagcgttgaagcaggtgaacgcgcaggcggcgaaattaatcgaagattggacggagcagggctggattgaaacggcggaagcggcgaaaccggttttaaggtcgtgccacgggcaggcttcgcacgccggatttgtgttgaacgccggccagcggcaggcttccgatgagattcagacggcattgggacggtttcagccgtttttgctgtacggcatcaccggcagcggcaagaccgaggtgtattttgatgcgatggcgaaagtgttggcgcaggggcggcaggtgttgtttctgttgcccgaaattaatcttacgccgcagcttttgaagcgggtggaaaaccgttttgccgacgtgccgaccgccgtgttgcacagccggatggcggcaggcaagcgcacgcaggattatctgcgcgcgatgtcggggcaggcgaagctggtgatcggcacgcggctggcggtgttcacgccgatggatgatgtcgggctgattgtggtcgatgaggaacacgacggctcgttcaaacaggacaacgaattgcgctaccacgcccgcgatttggcggtgtggcgggcgaagcagggcggctgtcccgtcgtgttgggcagcgcgaccccaagcttggaaagctggcacaaggcacaaagcggcgcgtaccgcctcttgcaactgaccgaacgcgcccatgccgccgcgcaactgccgcaagtagaaatcctcaacgcggccgtctga

SEQ ID NO: 38495 - DNA, 291 bp, Neisseria meningitidis
atgaacatccaacttcaaggccacatcgtcggcgttaaaaaattcaacggacaaatcgaaggcaagagcttcgactattgccgcctgattgtcgccacacccttagacagctcccaaggcaacgcattgggcagctctactactgaatacgatttcggcggctctgccaatttcgagcagttccgaaacgcccaatttcccatcgaagcaaacctgaacgtggaaatcgttactacgggcaaaacccaaaaactgaaagtcatcggttttcaactcgtgaagaaaggctga

SEQ ID NO: 38496 - DNA, 447 bp, Neisseria meningitidis
gtgcgcgttttgcgtgaaaacggcatcgaatttgaaccttttacctatgcctatgaggaacacggcggcacggcgcagtttgcccgactattcggcaaagacgaacacttggtcattaaaaccattgttttgcaagatgaaaacggtaaggggctgattgtcttgatgcacggcgacaagcagatttcaacccgcaatctggcgcggcatttgggtgcgaaacacatcgaacccgccacgcccgtacaggcaaacaagtggacgggctatctggtcggcggcacaacgccgttcggcatccggacaaaattggatatttacgtcgaacagtcggtgatggatttggaaaccatctatatcaacggcggaaaacgcgggttcattatcggcatccgtcccagagatttaaatattttgaacccgaaaacaatacaggcggcggtttga

SEQ ID NO: 38497 - DNA, 2739 bp, Neisseria meningitidis
atgcaacagcaacatttgttccgattaaatattttatgcctgtcgctgatgaccgcgctgcccgtttatgcagaaaatgtgcaagccggacaagcacaggaaaaacagttggataccatacaggtaaaagccaaaaaacagaaaacccgccgcgataacgaagtaaccggtttgggcaaattggtcaaaaccgccgacaccctcagcaaggaacaggtactcgatatccgcgacctgacgcgttacgaccccggcatcgccgtcgtcgaacaggggcgcggcgcaagttccggctattcaatacgcggtatggataaaaaccgcgtttccttaacggtggacggcgtttcgcaaatacagtcctacaccgcgcaggcggcattgggcgggacgaggacggcgggcagcagcggcgcaatcaatgaaattgagtatgaaaacgtcaaagctgtcgaaatcagcaaaggctcaaactcggtcgaacaaggcagcggcgcattggcgggctcggtcgcatttcaaaccaaaaccgccgacgatgttatcggggaaggcaggcagtggggcattcagagtaaaaccgcctattccggcaaaaaccgggggcttacccaatccatcgcgctggcggggcgcatcggcggtgcggaggctttgctgatccacaccgggcggcgcgcgggggaaatccgcgcacacgaagatgccggacgcggcgttcagagctttaacaggctggtgccggttgaggataccaatcggtacgcaaatttcatcgttgaggaagaatgcgaaaacagaaattacgaaacgtgtaaagcgaatccgaaaaaagaggttgtcggcaaagacgaacggcaaacggtttccacccgagactacacgggtcccaaccgcttcctcgccgatccgctttcatacgaaagccgatcgtggttgttccgcccgggttttcgttttgaaaacaaacggcactacatcggcggcatactcgaacacacgcaacaaactttcgacacgcgcgatatgacggttccggcattcctgaccaaggcggtttttgatgaaaatagaaaatacggaccgataagaggcaacggcaaatatgcgggcaaccacaaatacggcggactgtttaccaacggcgaaaacggtgcgctggtgggcgcggaatacggtacaggcgtgttttacgacgagacgcacaccaaaagccgctacggtttggaatatgtctataccaatgccgataaagacacttgggcggattatgcccgcctctcttatgaccggcagggtatcggtttggacaatcattttcagcagacgcactgttctgccgacggttcggacaaaaattgccgtccgagtgccgacaagccgttttcctattacaaatccgaccgcgtgatttacggggaaagccacaggctcttgcaggcggcattcaaaaaatccttcgataccgccaaaatccgccacaacctgagcgtgaatctcgggtttgaccgctttggctctaatctccgccatcaggattattattttcaaaacgccaaacgcgcctattcgttgaaaacgccccctcaaagcggcaaaaacagccccaacggcgacaagagcaaaccctattgggtcagcataggcgggggaaatgtggttacggagcaaatctgccgcttgggcaacaatacttatacggactgcacgccgcgcagcatcaacggcaaaagctattacgcggcagttcgggacaatgtccgtttgggcaggtgggcggatgtcggcgcggggttgcgctacgactaccgcagcacgcattcggacgacagcagcgtttccaccggcacgcaccgcaccctgtcctggaacgcaggcatcgtcctcaaacctgccgactggctggatttgacttaccgcacttcaaccggcttccgcctgccctcgtttgcggaaatgtacggctggcgggcgggtgttcaaagcaaggcggtcaaaatcgatccggaaaaatcgttcaacaaagaagccggcatcgtgtttaaaggcgatttcggcaacttggaggcaagttggttcaacaatgcctaccgcgatttgattgtccggggttatgaagcgcaaattcaaaacggcaaagaaacagccaaaggcgacccggcttacctcaatgcccaaagcgcgcggattaccggcatcaatgttttgggcaaaatcgattggaacggcgtatgggataaattgcccgaaggttggtattctacatttgcctataatcgtgtccatgtccgcgacatcaaaaaacgcgcagaccgcaccgatattcaatcacacctgtttgatgccatccaaccctcgcgctatgtcgtcggcttgggctatgaccaaccggaaggcaaatggggtgtgaacggtatgctgacttattccaaagccaaggaaatcacagagttgttgggcagccgtgctttgctcaacggcaacagccgcaatacaaaagccaccgcgcgccgtacccgcccttggtatattgtggatgtgtccggttattacacgattaaaaaacacttcaccctccgtgcgggcgtgtacaacctcctcaactaccgctatgttacttgggaaaatgtgcggcaaactgccggcggcgcagtcaaccaacacaaaaatgtcggcgtttacaaccgatatgccgcccccggccgaaactacacatttagcttggaaatgaagttttaa

SEQ ID NO: 38498 - DNA, 1167 bp, Neisseria meningitidis
atgagaaaattcaatttgaccgcattgtccgtgatgcttgccttaggtttgaccgcgtgccagccgccggaggcggagaaagctgcgccggccgcgtccggtgagacccaatccgccaacgagggcggttcggtcagtatcgccgtcaacgacaatgcctgcgaaccgatggaactgaccgtgccgagcggacaggttgtgttcaatattaaaaacaacagcggccgcaagctcgaatgggaaatcctgaagggcgtgatggtggtggacgagcgcgaaaacatcgcccccggactttccgataaaatgaccgtcaccctgttgccgggcgaatacgaaatgacttgcggtcttttgaccaatccgcgcggcaagctggtggtaaccgacagcggctttaaagacaccgccaacgaagcggatttggaaaaactgtcccaaccgctcgccgattataaagcctacgttcaaggcgaggttaaagagctggtggcgaaaaccaaaacctttaccgaagccgtcaaagcaggcgacattgaaaaggcgaaatccctgtttgccgacacccgcatccattacgaacgcatcgaaccgattgccgagcttttcagcgaactcgaccccgtcatcgatgcgcgtgaagacgacttcaaagacggcgcgaaagatgccggatttaccggcttccatcgtatcgaatacgccctttgggtggaaaaagacgtgtccggcgtgaaggaaattgcagcgaaactgatgaccgatgtcgaagccctgcaaaaagaaatcgacgcattggcgtttcctccgggcaaggtggtcggcggcgcgtccgaactgattgaagaagtggcgggcagtaaaatcagcggcgaagaagaccggtacagccacaccgatttgagcgatttccaagccaatgtggacggttcgaaaaaaatcgtcgatttgttccgtccgctgatcgaggccaaaaacaaagccttgttggaaaaaaccgataccaacttcaaacaggtcaacgaaattctggcgaaataccggactaaagacggttttgaaacctacgacaagctgggcgaagccgaccgcaaagcgttacaggcctctattaacgcgcttgccgaagaccttgcccaacttcgcggcatactcggcttgaaataa

SEQ ID NO: 38499 - DNA, 159 bp, Neisseria meningitidis
gtggtcgaacagagcttcggtacgctgcaccgcaaattccgctacgcccgggcagcctatttcggactgattaaagtgagtgcgcaaagccatctgaaggcgatgtgtttgaacctgttgaaagcgaccaacaggctaagtgcgcctgttggcacctaa

SEQ ID NO: 38500 - DNA, 771 bp, Neisseria meningitidis
atgaccacgaccgaacacgacaacgacgacgaactcctgctgcggtacagccgccacatcctcttggacgaaatcggcatcgaagggcagcagaaactttccgccgcgcatattttggtcgtcggctgcggcggtttgggtgccgccgccctgccctaccttgccgcttccggcatcggcacgctgaccatagccgattccgacacggtcgagctgcacaacctgcaacgccaagtcgcatttgacgagggcgatgtcggcaaactcaaaaccgaagccttggcagaccgcctgaaacgcatcaaccataccgtcaacgtccgcgccgtcaacgaaaaactcgacggctgccgcctgaccggtttggttcaagccgccgacatcgttttagactgctgcgacaattacgccacgcggcaagccgtcaaccgtgcctgcgtacaaacgaaaacaccgctggtttcaggggcggcggtacgctttgaagggcaacttgccgtgtaccgtcccgacttgcccgactcgccgtgttacgcctgcctgtttgacggcggatcggcttcagacggcatctgttccctcttcggcgtattctcgccgctggtcggcatcatcggcagtacccaagcggcggaggctctgaaaatcctgctggatgcgggcgaaccgtcgcacggcaggctggcggtttaccgtgccttggaagggggctggcaatatttcgacctgccgcgcaaccccgaatgcccggtttgcggcgcggaacggtaa

SEQ ID NO: 38501 - DNA, 450 bp, Neisseria meningitidis
atggacgtacaactccccatcgaagccaaagacatccaaaaactcatcccccaccgctatccgtttctccagctcgaccgcatcaccgccttcgagccgatgaaaaccctgaccgcgattaaaaacgtcaccataaacgaaccccagttccaaggccatttccccgacctgcccgtgatgcccggcgtactcatcatcgaagcgatggcgcaggcgtgcggcacgttggcgattttgagcgaaggcgggcgcaaagaaaacgaattcttcttcttcgccggcatagacgaagcccgtttcaaacgccaagtcatccccggcgaccaactcgtctttgaagtcgagctgctgaccagccggcgcggcatcggcaaattcaacgccgttgccaaagtggacgggcaagtcgccgtcgaagccatcatcatgtgtgccaaacgcgtagtttga

SEQ ID NO: 38502 - DNA, 2835 bp, Neisseria meningitidis
atgaataagaaacacggttttcagcttaccctgactgccttggccattgcaaccgcttttccggcttatgccgcccaagcggggggggcgacacctgatgccgcgcagacccaatccctgaaagaggttaccgtccgtgccaccaaagtgggacggcggacaaaagaagtaaccggtttgggcaaaatcgtcaaaacgtcggaaacgttgaacaaagaacaggtactcggtatccgcgacctgacgcgctacgatccgggcgtggccgtcgtcgaacaaggtaacggcgcgagcggcggctactcgatacgcggcgtggataaaaaccgtgtggcggtttcggttgacggcgttgcccaaatacaggcgtttaccgtgcagggatcgttgagtggatacggcggacgcggcggcagcggtgcaatcaacgaaatcgaatatgaaaacatcagcacggtggaaatcgacaaaggtgccggttcgtccgatcacggtagcggcgcactcggcggcgcggtcgccttccgcaccaaagaagcggcagacctgatttcagacggcaaaagctggggaatacaggcaaaaaccgcctacggaagtaaaaaccgccaatttatgaagtcgctcggcgcgggtttcagtaaagacggttgggaagggctgctaatccgaaccgaacgccaagggcgggaaacgcgcccgcacggcgatattgcggacggggtagaatacggcatagaccgtttggacgcgttccgccagacatacgatattcagaagcagaataaaaaggcggaatatttcctggcggagggcgagagtgaacccaagcccgtggcaaaattggcgggcaacggaaactatttgaaaaaccagctcaaccgctgggtggaagaacgtaagaaaaacaatcagcctttaagtgcagaagaagaagcgatggtgcgggaggcgcaggcgcgccacgaaaacctgtccgcccaatcgtacacgggcggcggcaggatattgcccgatccgatggattaccgcagcggctcttggcttgccaagctgggctaccgcttcggcagcaggcattatgtcggcggcgtgtttgaggataccaaacagcgttacgacatccgcgatatgacggaaaaacagtattacggtacggacgaggcgaaaaagtttagcaacaagagcggggtgtacgacggcaacgatttccgcgacggcttgtattttgtgccgaatatagaagagtggaagggcgatacaaatttggtcaagggcataggtttgaaatattcccgcaccaaatttattgacgaacatcaccgccgccgccgtatgggtttgctgtatcgttatgaaaatgagaaatactcggataactgggcggataaggcggtgttgtcgtttgacaaacagggcgtggcaaccgacaacaacacgctgaagctgaattgcgccgtgtatcctgctgtggacaaatcctgccgcgcgtcggcagacaagccgtattcctacgacagcagcgaccgtttccactaccgcgaacagcacaatgttttgaatgccttgtttgagaaatcgctgaaaaacaaatggacgaaacaccatctgactttgggcttcggttacgatgcttccaacgcgatctcccgccccgaacagctttcccacaatgcggcaaggatttcggaatccacgggattcgatgaaaagaatcaagataagtaccgtttgggtaagcccgaagtcgtcgaagggtcggtctgcggctacatcgaaaccctgcgttcccgcaaatgcgtgccaagaaaaatcaacggcagcaatatccacatttctttgaacgaccgtttttcaatcggcaaatattttgatttcagcttgggtggcaggtacgaccggaaaaacttcaccacgtcggaagaactcgtccgcagcggacggtatgttgaccgttcgtggaacagcggcatcgtgttcaaaccgaaccggcatttttctttgtcttaccgcgcctccagcggcttcagaacgccctcattccaagaacttttcgggatagacatttatcacgattatccgaaaggctggcagcgtcccgccctgaaatcggaaaaggcagccaaccgcgaaatcggtttgcagtggaagggcgatttcggctttttggaaatcagcagcttccgcaaccgttataccgatatgattgccgttgccgatcacaaaaccaaattgccgaatcaggcaggacaattgacagagattgatatacgcgattattacaatgcccaaaatatgtcgctccaaggcgttaatatattgggaaaaatcgactggaacggtgtgtacggcaaactgcccgaaggtttgtacaccacattggcatacaaccgcatcaaaccgaaatcggtatccaaccggccggacttgtccctccgcagctatgctttggatgcggtacagccgtcgcgttatgttttggggttcggatacgaccagccagaggggaaatggggcgcaaacattatgctgacctattccaaagggaaaaaccctgacgagcttgcttatctggcaggcgatcaaaaacgatattcgacaaaaagagcgtcgtcttcttggtcgacggcagacgtttccgcctatctgaatctgaaaaaacggctgaccttgagggcggctatctacaatatcggcaactaccgctacgttacttgggaatccttgcgccagactgcggaaagcacggcaaaccggcacggcggcgacagcaactatggaaggtatgccgcaccgggcaggaacttcagcctcgcgctcgaaatgaagttttaa

SEQ ID NO: 38503 - DNA, 663 bp, Neisseria meningitidis
atggatatgttggaaattttgttccgccatcaagacttcgtcgccatcaacaaaccgggcggcatatccgtccaccaagacagcggcgagaccggactggcccgaacactcgccatacagttgggcgtagagcgtgtgtggctgctgcaccgattggacaaacagaccagcggcattttactgtttgccctcaacaaagaaagcgcgtccgcccttagcggacagtttgccggcaaaagcatcaaaaaaacctatttggcactgtccgaccgcaagccgtccaaaaagcagggttggattaaaggcggaatggaaaaatccagatgtggaatgtggaagttgacgcgcaatacagaaaatatcgccgttacccgattccacagcatcagtatcgccgaaaaactgcggctgttcatcctagaaccgcatacgggcaaaacgcaccaattgagagtggcgatgaaaagtttgggcagtccgattctgggcgacagcttatacggcggaacagaatccgaaaccatgtttctgtatgcatggaaaatacaatttgactaccaaaaccgacaaatcgaaattgttgcacccttaaaaaacgaatggcagactgaaaatatccatcgggcactggaagaattctgtatggaaaataaaattgactga

SEQ ID NO: 38504 - DNA, 1392 bp, Neisseria meningitidis
atgagcggtcatatgggaaaaggggcggatgcgcctgatttggtgtacggtttggaggataggccgccgttcggtaatgcgctgttgagcgcggttacccatcttttggcgattttcgtgccgatgattacgcccgcgctgattgtgggcggcgcgctggaactgccggtggagatgacggcgtatctcgtgtcgatggcgatggttgcgtcgggtgtcggcacttatttgcaggtcaaccgcttcgggccggtcggttcggggatgctgtctatccagtcggtgaatttctcgttcgttaccgtcatgattgcgctgggcgcggggatgaaagagggcggtttgactaaggatgcgatgatttcgacgctcttgggcgtatcgtttgtcggcgcgtttttggtgtgtttctcggcgtggcttctgccgtatttgaaaaaagtgattacgccgacggtcagcggtgtggtggtgatgctgatcggcttgagtttggtacacgtcggtattaccgatttcggcggcggcttcggcgcaaaggcggacggcacgttcggctcgatggaaaacttggggctggcatcgctggtgctgctgattgtgctggtgttcaactgcatgaaaaacccgctgctgcggatgagcggcattgcggtcggtctgattgccggctatatcgtcgcgctgtttttgggcaaggtggatttttcggcactgcaaaacctgccgctggttacgctgcccgtaccgtttaaatatggttttgcttttgactggcacgcatttattgtggcgggtgcgattttcctgttgagcgtgtttgaggcggtcggcgatttgaccgcaacggcaatggtgtccgatcagccgattgaaggcgaggaatacaccaaacgcctgcgcggcggcgtgttggcagacggcttggtgtcggtgattgcgacggctttgggttcgctgccgctgacaacgtttgcgcaaaacaacggcgtgattcagatgaccggcgtggcttcgcgccatgtgggcaaatatattgccgtgattttggtgctgttgggtctgttccccgttgtcggacgcgcgtttacgacgattccgagtccggttttaggcggcgcgatggttttgatgttcggcttgattgcgattgcgggtgtgcggattttggtcagccacggcatccgcaggcgcgaggcggtgattgcggcgacttcggtcggcttgggcttgggcgtggcgtttgagccggaagtgtttaaaaacctgcctgtcttgttccaaaactctatttccgccggcggcattacggcagtcttgctgaatttggtcttgcccgaagataaaaccgaggcggcggtcaagtttgataccgaccacttggaacactga

SEQ ID NO: 38505 - DNA, 1827 bp, Neisseria meningitidis
ttgggcatttcccgcaaaatatcccttattctgtccatactggcagtgtgcctgccgatgcatgcacacgcctcagatttggcaaacgattcttttatccggcaggttctcgaccgtcagcatttcgaacccgacgggaaataccacctattcggcagcaggggggaacttgccgagcgcagcggccatatcggattgggaaaaatacaaagccatcagttgggcaacctgatgattcaacaggcggccattaaaggaaatatcggctacattgtccgcttttccgatcacgggcacgaagtccattcccccttcgacaaccatgcctcacattccgattctgatgaagccggtagtcccgttgacggatttagcctttaccgcatccattgggacggatacgaacaccatcccgccgacggctatgacgggccacagggcggcggctatcccgctcccaaaggcgcgagggatatatacagctacgacataaaaggcgttgcccaaaatatccgcctcaacctgaccgacaaccgcagcaccggacaacggcttgccgaccgtttccacaatgccggtagtatgctgacgcaaggagtaggcgacggattcaaacgcgccacccgatacagccccgagctggacagatcgggcaatgccgccgaagccttcaacggcactgcagatatcgttaaaaacatcatcggcgcggcaggagaaattgtcggcgcaggcgatgccgtgcagggcataagcgaaggctcaaacattgctgtcatgcacggcttgggtctgctttccaccgaaaacaagatggcgcgcatcaacgatttggcagatatggcgcaactcaaagactatgccgcagcagccatccgcgattgggcagtccaaaaccccaatgccgcacaaggcatagaagccgtcagcaatatctttatggcagccatccccatcaaagggattggagctgttcggggaaaatacggcttgggcggcatcacggcacatcctatcaagcggtcgcagatgggcgcgatcgcattgccgaaagggaaatccgccgtcagcgacaattttgccgatgcggcatacgccaaatacccgtccccttaccattcccgaaatatccgttcaaacttggagcagcgttacggcaaagaaaacatcacctcctcaaccgtgccgccgtcaaacggcaaaaatgtcaaactggcagaccaacgccacccgaagacaggcgtaccgtttgacggtaaagggtttccgaattttgagaagcacgtgaaatatgatacgaagctcgatattcaagaattatcggggggcggtatacctaaggctaagcctgtgtctgatgcaaaaccgagatgggaggttgataggaagcttaataaattgacaactcgtgagcaggtggagaaaaatgttcaggaaataaggaacggtaataaaaacagtaactttagccaacatgctcaactagagagggaaattaataaactaaaatctgccgatgaaattaattttgcagatggaatgggaaaatttaccgatagcatgaatgacaaggcttttagtaggcttgtgaaatcagttaaagagaatggcttcacaaatccagttgtggagtacgttgaaataaatggaaaagcatatatcgtaagaggaaataatagggtttttgctgcagaataccttggcaggatacatgaattaaaatttaaaaaagttgactttcctgttcctaatactagttggaaaaatcctactgatgtcttgaatgaatcaggtaatgttaagagacctcgttataggagtaaataa

SEQ ID NO: 38506 - DNA, 1200 bp, Neisseria meningitidis
atgtccgaccaactcatcctcgttctgaactgcggcagttcatcgctcaaaggcgccgttatcgaccgaaaaagcggcagcgtcgtcctaagctgcctcggcgaacgcctgaccacgcccgaagccgtcattacgttcaacaaagacggcaacaaacgccaagttcccctgagcggccgaaattgccacgccggcgcggtgggtatgcttttgaacgaactggaaaaacacggtctgcacgaccgcatcaaagccatcggccaccgcatcgcccacggcggcgaaaaatacagcgagtctgttttgatcgaccaggccgtaatggacgaactcaatgcctgcattccgcttgcgccgctgcacaaccccgccaacatcagcggcatccttgccgcacaggaacatttccccggtctgcccaatgtcggcgtgatggatacttcgttccaccaaaccatgccggagcgtgcctacacttatgccgtgccgcgcgagttgcgtaaaaaatacgctttccgccgctacggtttccacggcaccagtatgcgttacgttgcccctgaagccgcacgcatcttgggcaaacctttggaagacatccgcatgattattgcccacttaggcaacggcgcatccattaccgccatcaaaaacggcaaatccgtcgataccagtatgggtttcacgccgatcgaaggtttggtaatgggtacacgttgcggcgacatcgatccgggcgtatacagctatctgacttcccacgccgggatggatgttgcccaagtggatgaaatgctgaacaaaaaatcaggtttgctcggtatttccgaactttccaacgactgccgcaccctcgaaatcgccgccgacgaaggccacgaaggcgcgcgcctcgccctcgaagtcatgacctaccgcctcgccaaatacatcgcttcgatggctgtgggctgcggcggcgttgacgcactcgtgttcaccggcggtatcggcgaaaactcgcgtaatatccgtgccaaaaccgtttcctatcttgatttcttgggtctgcacatcgacaccaaagccaatatggaaaaacgctacggcaattcgggcattatcagcccgaccgattcttctccggctgttttggttgtcccgaccaatgaagaactgatgattgcctgcgacactgccgaacttgccggcatcttgtag

SEQ ID NO: 38507 - DNA, 279 bp, Neisseria meningitidis
ttgttcaagcagtttgtcagcgagaaccgccctcaattggatattgaggaagtggcaacgggcgagcattggttcggtcggcaggcgttggcgttgaacttgattgacgagatttcgaccagtgatgatttgttgttgaaagcgtttgaaaacaaacaggttatcgaagtgaaatatcaggagaagcaaagcctgatccagcgcattggtttgcaggcggaagcttctgttgaaaagttgtttgccaaacttgtcaaccggcgggcggatgtgatgtag

SEQ ID NO: 38508 - DNA, 450 bp, Neisseria meningitidis
atgagtatttacgcacttgcacacatcgtccatctgtattgcgccattgcctttgtcggcggcgtgttttttgaagtgctggttttgtccgtcctgcatacgggacgggtgtcgtgcgaggcgcggcgcgaagtggaaaaggcaatgtcttaccgcgccgtcagggtgatgccgtttgtggtcggattgctgttcgccagcggcgtcgtgatggcggcaaaccgctaccttcctatattgggcgaaccgtttgccacttccttcggtacgatgctgacgctgaaaatcctgttggcgttcagcgtgttggcgcacttcgccatcgccgtcgtcaaaatggcgcgttccacactgacggtcggctggtcgaaatacatacacgccgtcgtctttacccatatgctgctgattgtctttttggcaaaagcgatgttttatatcagctggtaa

SEQ ID NO: 38509 - DNA, 618 bp, Neisseria meningitidis
atgccctatacggaagatatgcgcccgggcgataccgctaatccttatggcgcatccaaagcgatggtggaacggatgttaaccgacatccaaaaagccgatccgcgctggagcgtgattttgttgcgttatttcaatccgattggggcgcacgaaagtggtttgattggcgagcagccaaacggcatcccgaataatttgttgccttatatctgccaagtggcggcaggcaaactgccgcaattggcggtatttggcgatgactaccctacccccgacggcacggggatgcgtgactatattcatgtgatggatttggcagaagggcatatcgcggcaatgaaggcaaaaagtaatgtagcaggcacgcatttgctgaacttaggctccggccgcgcttcttcggtgttggaaatcatccgtgcctttgaagccgcatccggcttaaatattccctatcaaatccaaccccgacgcgccggagacttggcgtgttcctttgccgacccgtcccataccaaacaagagacaggttgggaaaccaaacgcagccttgcgcaaatgatggaggattcgtggcgttgggtcagccgcaaccccaacggatatggggattaa

SEQ ID NO: 38510 - DNA, 942 bp, Neisseria meningitidis
atgaaaatcctgctcctcctcatccccctcgtcctaaccgcctgcggcacactgaccggcatacccgcccacggcggcggcaaacgctttgccgtcgaacaagaactcgtcgccgcatcgtcccgcgccgccgtcaaagaaatggatttgtccgccctgaaaggacgcaaagccgccctttacgtctccgttatgggcgaccaaggttcgggcaacataagcggcggacgctactctatcgacgcactgatacgcggtggctaccacaacaaccccgaaagtgccacccgatacagctaccccgcctacgacactaccgccaccaccaaatccgacgcgctctccagcgtaaccacttccacatcgcttttgaacgcccccgccgccgccctgactagaaacagcggacgcaaaggcgaacgctccgccggactgtccgtcaacggcatgggcgactaccgcaacgaaaccctgctcgccaacccccgcgacgtttccttcctgaccaacctcatccaaaccgtcttctacctgcgcggcatcgaagtcgtaccgcccgaatacgccgacaccgacgtattcgtaaccgtcgacgtattcggcaccgtccgcagccgtaccgaactacacctctacaacgccgaaacccttaaagcccaaaccaagctcgaatatttcgccgtcgaccgcgacagccggaaactgctgattgcccctaaaaccgccgcctacgaatcccaataccaagaacaatacgccctctggatgggaccttacagcgtcggcaaaaccgtcaaagcctcagaccgcctgatggtcgatttctccgacatcaccccctacggtgacacaaccgcccaaaaccgtcccgacttcaaacaaaacaacggtaaaaaccccgatgtcggcaacgaagtcatccgccgccgcaaaggaggataa

SEQ ID NO: 38511 - DNA, 942 bp, Neisseria meningitidis
atggaatataatgcaattatgaaaacaatcgctccttcccatataaagccccttatgccagagttgaaccaatctcaacgcaataggattatatttattgatttctatctatgctttctaggaaagataaatagaaaagatttgatgcaggcatttcaaatttccccagctgttgctactagggattttgcgctatattgctctagtttttcgaaaaatctccgttttgataccaaaagtaaattttacctctctactgaagactttgaacctcaattcccccattcatttgaaaatgcaattaaaattcttaatggcagtttaatatttgatattgattcccaacatcaacctcttcttccgtttgatttacctcctgttttaataaatcctgatgtcttaatcttttctaaaatatcgaaagcattatccttaaaaaaacctctaaaaatctcatatcattcaatttcatctggattatctgagaaagttattgtgcctcttgctctagttaatgacggatttcgatggcatttacgggcattcgatagaacaaaaaaccgatttgcagattttgtcctaacacgaataattcaagcaaatattttattagctgaaaatattgaagaaaatgaaacgattaacaatgatattgattggaatagaattgttaaaatcgagttggttccccatcctaatcatgatgaagctaaaaaagtgattgaaatggactttggaatgacaaatggaaaattagaattggcgcttagagcttcaaatatcggatatgttttacagcaatggcgagtcgattgttcgtcagatcatcatatcgatgatcctgcttttagattatggctgttagataatttagttttatacggcatcaacaatgctgaacacttagcgcctgcctttgataaaaaacgtagcaagccgtag

SEQ ID NO: 38512 - DNA, 1176 bp, Neisseria meningitidis
atgctgaacacctccctctccccgtggccctgctttacccaagaagaagccgatgccgtttccaaagtcctgctgtccaacaaagtcaactactggacgggcagcgaatgccgcaaatttgaaaaagaatttgccgcctttgccggcacgcggtacgccgtcgccctttccaacggcacgctggcactcgatgtcgcgctcaaagcaatcggcataggcgcgggcaacgatgtgattgttacctcgcgcactttcttggcttccgcttcctgcattgtgaacgcgggcgcaaatcccgtgtttgccgatgtggatttgaacagccaaaacatcagcgccgaaactatcaaagccgcgctgacgtcgaataccaaagccatcatcgtcgtccacctcgccggtatgcccgccgaaatggacggcatcatggacttggcaaaagaacatgatttgtgggtcatcgaagactgcgcccaagcgcacggcgcgaaatacaaaggcaaatccgtcggcagcatcggacacgtcggcgcatggtcgttctgccaagacaaaatcatgaccacgggcggcgaaggcggcatggttacgaccaacgacaaaaccctgtgggaaaaaatgtggtcgtacaaagaccacggcaaaagctacgatgccgtgtaccaccgcgaacacgcgcccggtttccgctggctgcacgaaagtttcggcacaaactggcgtatgatggaaatgcaggcggcaatcgggcgcatccagctcaaacgcctgcccgaatggactgcctgccgtcaagcgcacgccgccaagctggcggaaagcctaggcaaattcaaaagtatccgcttggttgaagtcgccgactacatcggacacgcgcaatataagttctacgctttcgtcaaacccgaacacctcaaagacggctggacgcgcgaccgcatcgtcagcgaactgaacgcgcgcaaagtcccctgctatcaaggcagctgctccgaagtctatttggaaaaatctttcgacgacacgccttggcggccgaaagagcgtttgaaaaatgctgtcgaactgggcgacaccagcctgatgttcttggtgcacccgacgctgaccgacgacgaaatcgcgttctgcaaagaacacatcgaagccgtattggcagaagccacacgataa

SEQ ID NO: 38513 - DNA, 990 bp, Neisseria meningitidis
atgaaacagcctgtttttgccgttacttccggcgagcctgccggcatcggccccgatatttgtttggacttggcgtttgcacgcctgccctgccgctgcgcggtattgggcgacaaacacctgttgcgcgcgcgcgccgaagccttgggcaaaagcgtcgtcctgcgcgacttcgatccagaatcaggcggcgcggcatacggcgagctggaagtgctgcacatccctgccgtcgaagcggttgaggcgggcaaactcaatcccgccaacgccgcctatgtgctgcaacttttggacaccgcgctcgcaggcatttcagacggcattttcgacggcatcgttaccgcgccgctgcacaaaggcatcatcaacgacgcgcgcgcaagcacaggttttttcagcggacacaccgaatatctggcggaaaaaagcggcacggggcaggtcgtgatgatgcttgccggcaaaggcctgcgcgtcgccctcgtaacgacccacctgccgctgaaagacgttgccgccgccatcacgcaaccgctgattgaaagcgtcgcacgcattttgcatcacgacttaaaacacaaattctgcatcaaaaatcccaaaatcctagtcgccggactcaacccccacgccggtgagggcggacacctcggacacgaagaaaccgacaccattatccccgcgctcgaaaacctgcgccgcgaagggataaacctcgccggcccgtatccggcggataccttgttccaaccgtttatgctcgaaggtgcggatgccgtattggcgatgtaccacgaccaagggctgcccgtgttgaaataccacagtttcgggcagggcgtgaacatcacactggggctgccctttatccgcacctccgtcgatcacggcaccgcgctcgatttggcggcaaccggcagggcggattccggcagcctgataactgccgtggagaccgccgtcgagatggcgcgcggcagcctttaa

SEQ ID NO: 38514 - DNA, 996 bp, Neisseria meningitidis
gtgaacctgaaaaaccgccattttctgaaacttttagacttcacgccagaagaaatcaccgcctacctcgaccttgccgccgaattgaaagccgccaaaaaagcagggcgcgagattcagcggatgaaagggaaaaacatcgccctgatttttgaaaaaacctctactcggacgcgctgcgcgtttgaagtcgccgcgcgcgatcaaggcgcgggagtgacttatttagagccgtccgccagccaaatcgggcataaggaaagcatcaaagacaccgcccgcgtgttgggcaggatgtacgacggcatcgaatatcgcggcttcgctcaggaaactgtcgaagaattgacgaaatacgcgggcgtacccgtgttcaacgggctgaccaacgagttccatcccacacaaatgcttgccgacgcactgactatgcgcgaacacagcggcaaacctttgaaccaaaccgcgtttgcctacgtcggcgacgcgcgttacaacatgggcaattccctgctgattttaggggcaaaattggggatggacgtgcgtatcggcgcaccgcaaagcctgtggccgtctgaaggcattattgccgccgcacacgccgccgccaaagaaaccggcgcaaaaattaccctgaccgaaaacgcgcatgaagccgtgaagaatgttgattttattcataccgatgtgtgggtcagcatgggcgagccgaaagaagtctggcaggaacgcatcgatttgctgaaagattaccgcgttacgcccgaactgatggcggcatcgggcaatccgcaagtcaaattcatgcactgcctgcccgccttccacaaccgcgaaaccaaagtcggcgaatggatttacgaaaccttcgggctgaacggtgtggaagttacagaagaagtattcgaaagccccgccagcatcgtgttcgatcaggcggaaaaccgtatgcacacgattaaagcggtaatggtcgcggctttgggcgactga

SEQ ID NO: 38515 - DNA, 1125 bp, Neisseria meningitidis
atgaccgcaaccactgcgtcttcaaccaagccttatctgcaaatccaaggtttggtgaaaaagtttggtgacaattacgctgtcgataacatcgacttggacatttatcaacacgaaatcttcgcccttttgggcagttccggcagcggaaaatctacactgctgcgtatgctggcgggtatggaaagtcccaatcagggaaaaattatccttgatggtcaggatattaccaaacttgcaccctatgatcgccccatcaatatgatgttccaaagttacgcgctttttccgcatatgaccgtagaacaaaacattgccttcggtctgaaacaggacaaaatgcctaaaggcgaaatcgccgcgcgcgtcgaagaaatgctccgcctggttcagatgaccaaatttgctaaacgcaaaccgcaccaattgtccggcggtcagcagcagcgcattgctttggcacgcagtctggcaaaacgtccgaaaattctactgctggatgagcccctcggtgcattggacaaaaaactgcgccaacaaacccagcttgagttggtcaatacgctggaacaagtcggcgtaacctgtattatggttacgcacgaccaagaagaggcgatgacgatggcgacccgcatcgccattatgtctgacggtcagttgcagcaagtcggcacacccagcgacgtgtacgactatcccaacagccgcttcactgccgagtttatcggcgaaaccaacatctttgacggtgtggtgattgaagatcatgccgactatgccgttatcgaatgcgaaggtttggaaaaccacgtccgcatcgatcacggtttgggtggtccgagcgagcaggacctttgggttagtattcgaccagaggatattgatttatataaagaaaaacccgaatatttgggcgactacaactgggcgaaaggcacggtaaaagaaatcgcctatttgggcagcttcgccatttaccatatcaagctcggcaacgggcgcgtcgtcaaaagccaagtccccgccccttactggtatgtacgcaacattacaccgccaacttgggacgaaaccgtgtatatcagctggccggaaaaccagcctacgccactgttccgttga

SEQ ID NO: 38516 - DNA, 249 bp, Neisseria meningitidis
atgtttcaagcaaatattcatcaggcaaaaaccaatttgagtcaattgattcaaagagcagaagcaggggaaattgttattattgcgaaggcaggtaagccttgcgtccaactaatcggtattgaaaaaccggcacgaaatgcaggaaggttgaaaaaattcagtcatatggaaaatacggatatttcacgtattcttgaggatgacaatgaaacggcagctttattttttgaggagtcggctctgtga

SEQ ID NO: 38517 - DNA, 1116 bp, Neisseria meningitidis
atgaagattgtaattgcaccggattcgtttaaggaaagcttgacagctcaacaggtagctgaagcaataaaaagaggcttccaacaatcgatagcagatgtggaatgtctcctctgtcctgtcggtgatgggggagaaggcactgtagatgctatccgacattctcttgacctagaagaaaaatgtctccaagtgacaggaccttttggacaaaaagaagtcatgcgctattttcaaaaagaacaactagccctattcgaagttgctgatttggttggtcttggaaaaatcccgctagagaaacgaaatccattacaaatccaaactcgtggtattggagaattgattcgccacctcattagtcaagaaattaaagaaatctatattggcgttggcggtacggccagtaatgatggaggtattgggattgctgctggtttaggttatcaattttatgatgaggatggaaatgccttacccgcttgcggtcaatccttactaaacctagcttctgtttcaacagaaaatcgctataaaattcctgaagatgttcacattcgtattttagcagatgttgtgagtcccttatgtggacaccaaggtgcgacctatacgtttggcaagcaaaaagggttggattctactatgtttgaggccgtagatcaggcaatacaagatttttatgaaaaagtctcccctgcaacattaaaacttaaaggagcaggagctggtggaggcatcgctggtggtttgtgcgcctttgctcaggcaagtatcgtatctggaattgacacctgcctggacttgattgactttgataagaaagtgtcagatgttgacttggttatcgttggtgaaggaagactagatcgtcaaagtttagcagggaaagcgcctattggtgtagcaaaaagaacccctgtcggagttcctgttgtcgctatttgtggcagtctcgttgaagatttgccttccctgccatttgaaaatatccaagctgccttttctattttggagaaaagtgaacctttagaagatagtttgaaaaatgccagtctctatttggagcatacggcttctaatattggacacttattaaatatgcctaagatttag

SEQ ID NO: 38518 - DNA, 132 bp, Neisseria meningitidis
atgcaaaaccaaaatacacgccccgtcaaaatcgagcttaaaggcgaagcaggcaaacgcgtactgcttgccgccgcccgccgcattgccaaaacccatcaaaaagccgtcaaggcacttgccgacaaatga

SEQ ID NO: 38519 - DNA, 297 bp, Neisseria meningitidis
atgttccgcatattactgttgcttttcccttgtgcaatccttgccgcctgcacccgaaacataccggcaaacccgaccgtttcaaattgcgcgcatcttcaaaaccgcaccatcctgtattttgacgcacacggcaaacccgccgacggcgcagtaaagggcggattttacaaaattatcgaaatacagggtgcaaactgcatccttattcaagactttaacagcacgggcaatgccctcggcggatcctatgtgccggactgccgcaaatcatcccttttcccgaaaaatatttga

SEQ ID NO: 38520 - DNA, 1929 bp, Neisseria meningitidis
atgtccagaaaccaaaatcacgaagaataccaagacgatgcccgccccctgacgattgaggaacaacgcgctcgcctgcgccaactcatcattatgggcaaagaacgcggctacatcacctactccgaaatcaacgacgcactgcccgacgatatgtccgatgccgatcaaatcgacaacatcgtcagtatgatttccggtttgggtatccaagttaccgaacacgcccccgatgcggaagacatattgttaagcgacaatgccgccgttaccgacgatgatgccgtcgaagaagccgaggccgccctttccagcgcagattccgagttcggcaggacgaccgaccccgtccgtatgtatatgcgcgaaatgggacaggtcgacctgctgacccgcgaagacgaaatcatcatcgccaaaaaaatcgaaaacgccctgaaaaatatggttcaggccatctccgcctgcccgggttccattgcggaaatcttagaactcatcgaaaaaatccgcaaagacgaaatccgcgtcgacgaagtcgtagaagccattatcgacccgaatgaagtattgctcaacgaattgggcttggggcacttggaaaccacagcacccgagaaaccttccaacgacaattcggacgaaaacgaagacgacgaagaatcggaagaagatgcggatgaaatctcggcagccaatctcgccgaattgaaacaaaaagtcatcggccactttgcccaaatcgaaaaagactacaaaaaaatgattggccgtttggaaaaacaccacagccggcacaaagactatctcgcctaccgcgacgcgattgccaacaaacttttggaagtccgcttcgccacccggcaaatcgacagcctcagcagcagcctgcgcggaaaagtagaaaacatccgcaaactcgaacgcgaaatccgcgacatctgcctcgaccgcgtccatatggagcgcgactacttcatccaaaacttcctgcccgaaatcaccaatctggaatggattgaagaagaaatcgccaaaggcagggtttggagcgacgcgctcgaccgcttccgccacgccatcctcgaaaaacaaaccgagttggcggatatggaaaaagaaacccgcatttccatcgaagagttgaaagaaatcaacaaaaatatggtgtcaagcgaaaaagaaaccgcagctgccaaacaggaaatgattcaggcaaacttgcgcctcgtcatttccattgccaaaaaatacaccaaccgtggcttgcagttccttgatttgattcaggaaggcaacatcggcctgatgaaagcggtcgacaagttcgaataccgacgcggctataagttctccacctacgcaacctggtggatccgtcaggcaatcacccgctcgattgccgatcaagcgcgtaccatccgcattccggtacatatgattgaaaccatcaacaagatgaaccgcatctcgcgccaacaccttcaagaaaccggcgaagaacccgattccgccaaacttgccgaactgatgcagatgcccgaagacaaaatccgcaaaatcatgaaaatcgccaaagagccgatttcgatggaaacccccatcggcgacgacgacgattcgcacttgggcgacttcatcgaagatgccaacaatgttgcgccggccgatgcggcaatgtacaccagcctgcacgaagtaaccaaagaaatcctcgaaagcctgacaccgcgtgaggcaaaagtcctgcgtatgcgtttcggcatcgatatgaacaccgaccacacgctggaagaagtcggcagacagtttgacgtaacgcgcgaacgcatccgacaaatcgaggcaaaagcactccgcaaattacgccatccgacaagaagcgaccgtttgagaagtttcttggacagcgaagacagcaagctgtaa

SEQ ID NO: 38521 - DNA, 2775 bp, Neisseria meningitidis
atggcgaataataaaacgttatttgattgggtggaagaccgcaaatcaacgctggaagaaatagaacagacagattttttcgcgctgcctgaatttgtagaacgcaatttaaaatatccgttttttgaatggcaaaaatcggctttagaaaactttgtgatttttgaccgcgcttcaaaattaaaggatttccctgacatcaaaaaccgccctacccatttgctgttcaatatggcaacaggtgctggcaaaacgatgatgatggcggcgttgattttgtattattttgaaaaaggttatcggcattttttgtttttcgtcaatcaaaataatatcgtggataaaacggaaaataattttattgacccggcgcacgcaaaatttttatttaccgagaagattttgcaaggtgatacggtaattcctattcgcaaagtggaaatgttcagcccacattcagacggcattgaaattaaatttaccagcattcaaaaactgtataacgatatccacaccgagcgagaaaaccaaaccacattggcagatttgcacaaattgaaccttgtgatgctgggcgatgaagcacaccatttaaacgcacaaaccaaaggcaaaaaacaagacgagttggatttggaagtggaattaaaagccaatgcaggcaatgccgaaattgaacgcaaaggctgggagcatatggttttggaattgttgctcaataaaaatggcaatcccggccaaaatgtgctgttggaatttaccgccacgctgcctgaaaatgctgacgtgcaacaaaaatatgcggacaaaatcatcacaaaatttggcttaaaagagtttttgcaaaaaggttataccaaagaaatcaatttggtatccagtacgctgaataagaaagagcgggtgttgcacgctttattatttgcttggtatcgccatcaaatcgcgttgaaatacggcattgccaatttcaagcctgtgatgttgtttagaagtaagacgattgatgaatcaaaagcggattattcggcatttttaaattgggcagaaaatgtacaagcggatgattttgagtttttagatacgttttcaggcagcctgaataatagcgacaacgccaacgaacaaggcaaaacccgaaccgaacaagccctaaaatttatgcaggaaaatggctttgagtttgcacatttggcaaattgggtgaaacaaaattatcaaaaacataatgtgattattaccaactccgaaaccaacaaaaacaaaactgaaaaaaccgacagcgaaaccgaaaaattgctaaacaatttggaagcggctgataatccaatccgtgccatttttacggtagatagattaaccgaaggttgggacgttctgaatttgtttgatattgtgcgtttgtatgaagggcaaaatggcggtggttcaaataaaaaatcaggcaaaacggctgccgctaccgtatcggaaaagcagttgattggtcgtggcgtgcgttattttccatttgcgtttgaaggtaaacagccgaataaacgcaaatttgacaacgacatgcaacacgaattgcgtatcttggaagaattgttttattacacgcacgatgagcaatcccgctatatttcagaactgaaaaatgagttgcgaaaagacggttatttgcctgaaaaagacgatgataaggtgttggcaacatttaaactcaaatctgaatttgccgataataaggattttagagagttgttaatttgggcgaataaaaaaatccccaacccaaacgccaaaagcaataatgcagacagcctgcaagccaatccgcaaacgctttcattccaaattcacggcaatcaattgttgcaggaaacgcaatttacagccgatgaaaatgatgaaacagcccgacaaatcggcacacaaaataattttactcaaaccataaaaatgagtgaaatggagcggcacattttcaataaagcattacatatcaaagggaaaaatagtcaatctttattccattttgaccgcctgcaaagcaaactcaacattcaaaatcgcaatgaattgcaaaataacttgttgaaagactggcaaattgaatttttaggattagggcaagacaaacaggttcgcccggatgataaacttgcaggctgcctgaaaatcttggaaatggttgaaaaacatctgaatgaaagtgatatgccgtttatcggtacaaaagaatttacacctaaaaaattatgggaaattttcggcacgccaaaacaaaaatgggtcaaaaaagatgatgtaaaaacgactattgccacgcaaaatgattggtatgtgatggataattttgctggaacgggtttggaagaagcgttaattcaatttatttcagcgcgtttgggcgatttgaaatctaaatatgacgttcatttaatccgtaatgaagaagtgtttaaattgaataactttgccgatggtgaaggatttatgccggactttattttattgctgaaagataaacaaaaatcttcttccaatggtgtgaacgactttttgcattaccaaattttcattgagcccaaaggtgagcatttagtggaaactgatggatggaaagaagaatttttagaagccatcactgtggaatatgggatggataagatcctgcaaaaagatacaccgcattatcgtttgatcggtttaccgttttttactgatcatcagaaaaatggacaatttacggagtcattccctttaggtgcggcatcgcttgaaaaatag

SEQ ID NO: 38522 - DNA, 1815 bp, Neisseria meningitidis
atgagtgaacacgatatgcagaacacaaatccgccattaccgcctctgccgcccgaaatcacgcagctcctgtcggggctggacgcggcacaatgggcgtggctgtccggctacgcttgggcaaaagcaggaaacggggcatctgcaggactgcccgcgcttcagacggcattgccgacggcagaacctttttccgtaaccgtcctttccgcctcgcaaaccggcaatgcgaaatccgttgccgacaaagcggcggacagcctggaagccgccggcatccaagtcagtcgcgccgaactgaaagactataaggcgaaaaacatcgccggcgaacgccgcctgctgctggttacgtccacccaaggcgaaggcgaaccgccggaagaagccgtcgtgctgcacaaactgctgaacggcaaaaaagccccgaaattggacaaactccaatttgccgtactgggtttgggcgacagttcctatccgaatttctgccgggcgggcaaagatttcgacaaacgttttgaagaattgggggcgaaacgcctgctcgaacgcgttgatgcggatttggactttgccgccgccgcaaacgcctggacagacaatatcgccgcactcttaaaagaagaagccgcaaaaaaccgggcaacgcccgcgccgcaggcaacgccccccgccggccttcagacggcatcggagggcaggtactgcaaggcagacccctttcccgccgccctgctggccaatcagaaaatcaccgcccgccaatccgataaagacgtgcgccacatcgaaatcgatttgagcggttcggatttgcactacctcccgggcgacgcgctcggcgtttggtttgacaacgatccggcactggtcagggaaatcctagacctgctcggcatcgatccggcaacggaaatacaggcgggcggaaaaaccctgccggttgcctccgcactgttatcccattttgaactcacgcaaaacacccccgcctttgtcaaaggctatgccccgttcgccgatgatgacgaactcgaccgtattgctgccgacaacgccgttttgcaaggctttgtgcaaagcacgccgattgccgatgtgctgcaccgcttcccggcaaaactgacggcggaacaattcgccggcctgctgcgcccacttgcgccgcgcctgtattcgatttcctcgtcgcaggcggaagtgggggacgaagtgcacctgaccgtcggcgcggtgcgttttgaacacgaagggcgcgccagggcgggcggcgcatcgggtttccttgccgaccggctggaagaggacggcacggtgcgcgtgtttgtggaacgcaacgacggcttcaggctgcccgaagacagccgcaagccgattgtgatgatcggctcgggcaccggcgtcgcaccgttccgcgccttcgtccaacaacgtgccgcagaaaatgcggaaggcaaaaactggctgattttcggcaatccgcattttgcccgtgattttctctatcaaaccgaatggcagcagtttgccaaagacggtttcctgcacaggtacgatttcgcctggtcccgcgatcaggaagaaaaaatctatgtgcaggacaaaatccgcgaacaggcggaaggactttggcaatggctgcaggaaggcgcgcatatctatgtgtgcggcgatgcggcaaaaatggcaaaagacgtggaagccgccttgctggatgtgattatcggggcaggacatttggacgaagagggcgcagaagaatatttggatatgctgcgcgaagaaaaacgctatcagcgtgatgtttattga

SEQ ID NO: 38523 - DNA, 699 bp, Neisseria meningitidis
atgaaatccagacacctcgccctcggcgttgccgccctgttcgcccttgccgcgtgcgacagcaaagtccaaaccagcgtccccgccgacagcgcgcctgccgcttcggcagccgccgccccggcagggctggtcgaagggcaaaactataccgtccttgccaacccgattccccaacagcaggcaggcaaagtcgaagtccttgagtttttcggctatttctgtccgcactgcgcccacctcgaacctgttttaagcaaacacgccaagtcttttaaagacgatatgtacctgcgtaccgaacacgtcgtctggcagaaagaaatgctgacgctggcacgcctcgccgccgccgtcgatatggctgccgccgacagcaaagatgtggcgaacagccatattttcgatgcgatggtcaaccaaaaaatcaagctgcaaaatccggaagtcctcaaaaaatggctgggcgaacaaaccgcctttgacggcaaaaaagtccttgccgcctacgagtcccccgaaagccaggcgcgcgccgacaaaatgcaggagctgaccgaaaccttccaaatcgacggtacgcccacggttatcgtcggcggtaaatataaagttgaatttgccgactgggagtccggtatgaacaccatcgaccttttggcggacaaagtacgcgaagaacaaaaagccgcgcagtaa

SEQ ID NO: 38524 - DNA, 1953 bp, Neisseria meningitidis
atgcgctttgcggtcgctttgctcagtctgctgggtattgcatcggttatcggtacggtgttgcagcaaaaccagccgcagacggattatttggtcaaattcggacctttttgggcgcagatttttggttttctgggactgtatgacgtctatgcttcggcatggtttgtcgttatcatgatgtttttggtggtttctaccagtttgtgcctgattcgcaatgtgccgccgttctggcgcgaaatgaagtcttttcgggaaaaggttaaagaaaaatctctggcggcgatgcgccattcttcgctgttggatgtaaaaattgcccccgaagttgccaaacgttatctggaggtgcagggttttcagggaaaaaccgtcagccgtgagggcgggtcggttctgattgccgccaaaaaaggcacgatgaacaaatggggctatatctttgcccatgttgctttgattgtcatttgcctgggcgggttgatagacagtaacctgctgttgaaactgggtatgctgaccggtcggattgttccggacaatcaggcggtttatgccaaggatttcaagcccgaaagtattttgagtgcgtccaatctctcatttaggggcaacgtcaatatttccgaggggcagagtgcggatgtggttttcctgaatgccgacaacgggatattggttcaggacttgccttttgaagtcaaactgaaaaaattccatatcgatttttacaatacgggtatgccgcgtgatttcgccagcgatattgaagtgacggacaaggcaaccggtgagaaactcgagcgcaccatccgcgtgaaccatcctttgaccttgcacggcatcacgatttatcaggcgagttttgccgacggcggttcggatttgacattcaaggcgtggaatttgggtgatgcttcgcgcgagcctgtcgtgttgaaggcaacatccatacaccagtttccgttggaaattggcaaacacaaatatcgtcttgagttcgatcagttcacttctatgaatgtggaggacatgagcgagggcgcggaacgggaaaaaagcctgaaatccacgctgaacgatgtccgcgccgttactcaggaaggtaaaaaatacaccaatatcggcccttccattgtttaccgtatccgtgatgcggcagggcaggcggtcgaatataaaaactatatgctgccggttttgcaggaacaggattatttttggattaccggcacgcgcagcggcttgcagcagcaataccgctggctgcgtatccccttggacaagcagttgaaagcggacacctttatggcattgcgcgagtttttgaaagatggggaagggcgcaaacgtctggttgccgacgcaaccaaagacgcacctgccgaaatccgcgaacaattcatgctggctgcggaaaacacgctgaacatctttgcacaaaaaggctatttgggattggacgaatttattacgtccaatatcccgaaagagcagcaggataagatgcagggttatttctacgaaatgctttacggcgtgatgaacgctgctttggatgaaaccatacgccggtacggcttgcccgaatggcagcaggatgaagcgcggaaccgtttcctgctgcacagtatggatgcgtacacgggtttgaccgaatatcccgcgcctatgctgctgcaacttgatgggttttccgaggtgcgttcgtcgggtttgcagatgacccgttccccgggtgcgcttttggtctatctcggctcggtgctgttggtattgggtacggtattgatgttttatgtgcgcgaaaaacgggcgtgggtattgttttcagacggcaaaatccgttttgccatgtcttcggcccgcagcgaacgggatttgcagaaggaatttccaaaacacgtcgagagtctgcaacggctcggcaaggacttgaatcatgactga

SEQ ID NO: 38525 - DNA, 369 bp, Neisseria meningitidis
atgaatccgaaaaccttgagccgtttgtcgctgtgtgcggcggtcttggctctgaccgcctgcggcggcaacgggcaaaaatccctgtattattacggcggctatcccgataccgtctatgaaggtttgaaaaacgacgacacttcgttgggcaagcagaccgaaaagatggaaaaatactttgtggaagccggcaacaaaaaaatgaatgccgccccgggtgcgcacgcccatctgggactgctgctttcccgttcgggagacaaagagggcgcgttccgccagtttgaagaagagaaaaggctgtttcccgaatcgggcgtatttatggacttcctgatgaaaaccggtaaaggaggcaagcgatga

SEQ ID NO: 38526 - DNA, 942 bp, Neisseria meningitidis
  misc_feature 4, 5, 6, 7, 8: 'n' is a, c, g or t
gtgnnnnncctgctcctcctcatccccctcgtcctaaccgcctgcggcacactgaccggcatacccgcccacggcggcggcaaacgctttgccgtcgaacaagaactcgtcgccgcatcgtcccgcgccgccgtcaaagaaatggatttgtccgccctgaaaggacgcaaagccgccctttacgtctccgttatgggcgaccaaggttcgggcaacataagcggcggacgctactctatcgacgcactgatacgcggtggctaccacaacaaccccgaaagtgccacccaatacagctaccccgcctacgacactaccgccaccaccaaatccgacgcgctctccagcgtaaccacttccacatcgcttttgaacgcccccgccgccgccctgactagaaacagcggacgcaaaggcgaacgctccgccggactgtccgtcaacggcatgggcgactaccgcaacgaaaccctgctcgccaacccccgcgacgtttccttcctgaccaacctcatccaaaccgtcttctacctgcgcggcatcgaagtcgtaccgcccgaatacgccgacaccgacgtattcgtaaccgtcgacgtattcggcaccgtccgcagccgtaccgaactacacctctacaacgccgaaacccttaaagcccaaaccaagctcgaatatttcgccgtcgaccgcgacagccggaaactgctgattgcccctaaaaccgccgcctacgaatcccaataccaagaacaatacgccctctggatgggaccttacagcgtcggcaaaaccgtcaaagcctcagaccgcctgatggtcgatttctccgacatcaccccctacggtgacacaaccgcccaaaaccgtcccgacttcaaacaaaacaacggtaaaaaccccgatgtcggcaacgaagtcatccgccgccgcaaaggaggataa

SEQ ID NO: 38527 - DNA, 1569 bp, Neisseria meningitidis
atgaaacaccgtactttcttttccctttgcgccaagttcggctgcctgcttgcgctgggtgcttgttcgcccaaaatcgtcgatgccggagccgcgaccgtgccgcacactttatccactttgaaaactgcggacaaccgccccgccagtgtttacttgaaaaaagacaaaccgacgctgattaaattttgggcgagctggtgtcctttgtgtctgtccgaattgggacagaccgaaaaatgggcgcaagatgcaaaattcagctccgccaacctgattaccgtcgcgtctccgggctttttgcacgagaaaaaagacggcgacttccaaaaatggtatgccggtttgaattatcccaagctgcccgtcgtaaccgacaacggcggcacgatcgcccaaagcctgaatatcagcgtttacccttcgtgggcgttaatcggtaaagacggcgacgtgcagcgcatcgtcaaaggcagcatcaacgaagcgcaggcgttggcgttaatccgcgacccgaatgccgatttgggcagcttgaaacattcgttctacaaacccgacactcagaaaaaggattcaaaaatcatgaacacgcgcaccatctacctcgccggcggctgcttctggggcttggaagcctatttccaacgcatcgacggcgtggttgacgcggtatccggctacgccaacggcaacacgaaaaatccgagctatgaagacgtgtcctaccgccatacgggccacgccgaaaccgtcaaagtgacctacgatgccgacaaactcagcctagacgacatcctgcaatatttcttccgcgtcgttgatccgaccagcctcaacaaacagggcaacgacaccggtacgcaataccgcagcggcgtgtactacaccgaccccgccgaaaaagccgtcatcgccgccgccctcaaacgcgagcagcaaaaataccaactgcccctcgttgttgaaaacgagccgctgaaaaacttctacgatgccgaggaataccatcaggactacctgattaaaaaccccaacggctactgccacatcgatatccgcaaagccgacgaaccgctgccgggcaaaaccaagaccgccccgcaaggcaaaggcttcgacgcggcaacgtataaaaaaccgagtgacgccgaactcaaacgcaccctgaccgaagagcaataccaagttacccaaaacagcgcgaccgaatatgccttcagccacgaatacgaccatttgttcaaacccggcatttatgtggacgttgtcagcggcgaacctttgttcagctccgccgacaaatatgattccggctgcggctggccgagcttcacgcgcccgattgatgcaaaatccgttaccgaacacgatgatttcagctacaacatgcgccgcaccgaagtgcgcagccacgccgccgactcacacttggggcacgtcttccccgacggcccgcgcgacaaaggcggactgcgctactgcatcaacggcgcgagcttgaaattcatcccgctggaacaaatggacgcggcaggctacggcgcgttgaagagtaaagtgaaataa

SEQ ID NO: 38528 - DNA, 171 bp, Neisseria meningitidis
atgtattttgaaatctataaagacgcaaaaggcgaataccgttggcgtttgaaagcagccaaccatgaaatcatcgctcagggcgaaggctacaccagcaagcaaaactgccagcacgcagtcgatttgctgaaaagcactaccgccgctacccctgtaaaagaggtataa

SEQ ID NO: 38529 - DNA, 1350 bp, Neisseria meningitidis
atggcaaaccaaaccaatagcaaagcaaaagcattgttaggctggatggacgctcgtttccccctgtctaaaatgtggaatgagcatttggctcaatactacgcaccgaaaaactttaatttttggtactacttcggctctttggccctgcttgtcctcgtgattcaaatcgtcagcggcattttcctgaccatgaactacaaaccggacggcaaccttaacgcctaccatctgcctgctgcctttaccgcagtcgagtacatcatgcgcgacgtgtccggcggttggattatccgctacatgcattccaccggcgcatctttcttcttcattgttgtttatctgcacatgttccgtggtttgatttacggttcgtacaaaaaaccccgtgaattggtgtggattttcggctccctgattttcttggcattgatggcggaagcctttatgggctacctgctgccttggggtcagatgtccttttggggtgcgcaggtaattattaacctgttctccgccatccctgttatcggtccggatttgtccacttggatccgcggcgacttcaacgtttccgacgttaccctgaaccgtttctttgccctgcacgttatcgcggtacctctggtattgctcggcttggttgtggcgcacatcatcgccctgcacgaagtgggttctaacaaccctgacggcgttgaaatcaagaaaaacaaagacgaaaacggtatcccgcgcgacggtatcccattccatccttactataccgttaaagacatcttgggtgtggttgtattcctgattgtcttctgtgccgtattgttcttcgcaccggaaggcggcggctacttcctcgaagcgccgaacttcgatgcggcaaatgcgctgaaaacacctccgcacattgcgccggtatggtatttcacaccgttctacgccattttgcgtgcgattccctcgttcttgggaacgcaggtttggggtgtaatcggtatgggcgcggcggtcgtgttgattgccctgctgccttggctggataggggcgaggtgaaatccgtccgttaccgcggtccgattttcaaaaccgcattggtcttgttcatcatttcctttatcggtttgggtattttgggcgcgatggtggcaaccgatacgcgtactttggtcgcgcgcatcctgtctttcgtctatttcgcattcttcctgggtatgccgttctataccaagctggataaaaacaaaccggttcccgaacgcgtaaccatgagcaccgccaaacaaaaaatcatgttctttgtttacgtcggcattaccgccgtgggtgcttacctgtttgcaaccaacatctga

SEQ ID NO: 38530 - DNA, 468 bp, Neisseria meningitidis
atgactgaactgcaacaccccgtcctcgtcgtcgatgacgaaaccgacattctcgacctgatggaaatgaccctgatgaaaatgggcttgcgcgtccataccgcgtcaggcgttgccgaagccaaaaacaagctcgacagccaacgctattcgctcgtcctgaccgatatgcgtatgccggacagctcggggctagaagtcgtccaacacatcaacagccgcctgctcgatacgccggttgctgtcatcaccgccttcggcaatgccgatcaggcacaggaagccctgcgttgcggcgcgttcgaccccgataccatgcagatacaggactatctcgaccaaatcgaacgcgacatcatcgaacaaaccctcaaacaaaccgaaggcaaccgcacgcaggccgccaaacgcttgggcatcagcttccgttccatgcgctaccgtatggaacgcctcaacatcggctga

SEQ ID NO: 38531 - DNA, 456 bp, Neisseria meningitidis; identical to SEQ ID NO: 38381

SEQ ID NO: 38532 - DNA, 198 bp, Neisseria meningitidis
atgaataccgtcccaaaaagcaggattcccgtcaaaccgctgcccgaaaaaaccacagacgaagccaaagtcgaaaaatggcggcagctcggtgcggaacacggtttgtcgggcgaatgggcagttgccgccagattgggcgaaaacggttttaccgaagaacagatggaaaatatcgccaacctgttcggcagataa

SEQ ID NO: 38533 - DNA, 279 bp, Neisseria meningitidis; identical to SEQ ID NO: 36210

SEQ ID NO: 38534 - DNA, 1410 bp, Neisseria meningitidis
atgaaatacatcagcacgcgcggcgaaaccgcacacaaaccgttcagcgaagttttattgatggggcttgcacccgacggcggcctgatgctgccggaacattatccgcaaatcgggcgcgaaaccttggacaaatggcgcggtttagcttatcccgaattggcgtttgaaattatgcgcctgtttgttacggatattccggaggacgatttgcgcgacattctgaaccgtacttacacggaagcggcgttcggtactaaggaaatcacccccgtccgcacgctttcagacggcatcaaaatccaagccttgtccaacggcccgacgctggcgttcaaagatatggcaatgcagtttttgggcaatgcgtttgaatatgttttaaacaaagaaggcaaaaaactcaatatcttgggcgcaaccagcggcgatacgggttcggctgcggaatatgccttgcgcggcaaaaagggcgtgaacgtatttatgttgtcgcccgacggtaaaatgagcgcgttccaacgcgcgcaaatgtacagcctgcaagacgagaatatccacaatatcgccgtgaagggaatgtttgacgactgtcaggacattgtgaaggcggtgcaaaacgatgccgcgttcaaggaaaaataccatatcggtacagtcaactcgattaactggggacgcatcgtcgcgcaagtggtttattactttgcgggctatttcaaggcgacgcaaagcaatgacgagcaggtcagcttctgcgtgccgagcggcaacttcggcaacgtttgcgcgggacacatcgccaaacaaatgggcctgcctgtccgccgcctgattgtcgcgaccaatgaaaacgatgtattggacgagtttttcaaaaccggcgcgtaccgcccgcgcaacagcgcgcatacttatgttacctccagcccgtcgatggacatttccaaagcgtccaacttcgagcgtttcgtgttcgacctgatggatcgcgatcctcaggaaatcaatacgctgtgggcggaagtagcggcgggcaagggctttgacctgcgatttgccttggacaaagtcggcggcaaatacggctttacttccggcaagtccacccacgccgaccgcctcgccactatcaagcaggtttacgggcaagaccaagaactcatcgacccgcacactgccgacggcgtaaaagtcgcccgcgaagtgcgcgaagaaggggaaacggttgtgtgtttggaaaccgcgttggcagcgaaattcgatgcgaccatacgcgaagccgtcggcgatgccgccattccgcgccccgccgcgctggaaggtttggaaacattgccgcagcgcgtgcaaaccgtgccgaacagtgcggatgcggtaaaaggcatcatcgaacaaacccttgcctga

SEQ ID NO: 38535 - DNA, 606 bp, Neisseria meningitidis
atgaccatctatttcaaaaacggcttttacgacgacacattgggcagcatccccgaaggcgcggttgccgtccgcgccgaagaatacgccgcccttttggcaggacagacgcagggcgggcagattgccgcagattccgacggccgccccgttttaaccccgccgcgcccgtccgaataccacgaatgggacggcaagaaatgggaaatcggcgaagccgctgccgccgcccgtttcgccgaacaaaaaaccgccacggcattccgcctcgcggcaaaggcggacgaactcaaaaacagcctcttggcgggctatccccaagtggaaatcgacagcttttacaggcaggaaaaagaagccctcgcgcggcaggcggacaacaacgccccgaccccgatgctggcgcaaatcgccgccgcaaggggcgtggaattggacgttttgattgaaaaagttgtcgaaaaatccgcccgcctggccgttgccgccggcgcgattatcggaaagcggcagcagctcgaagacaaattgaacaccatcgaaaccgcgccaggattggacgcgctggaaaaggaaatcgaagaatggacgctaaacatcggctga

SEQ ID NO: 38536 - DNA, 483 bp, Neisseria meningitidis; identical to SEQ ID NO: 36360

SEQ ID NO: 38537 - DNA, 558 bp, Neisseria meningitidis
atggatgctttaaaattattgacgaaccgccgatcttccaaaaagctgaagcaccccgcccccgatgcggcggagttggaacaaatatttcaggcggcaacccaagttcccgatcacggcaatatgcgccccttccgttttatcgtgattcaaggcgaggtaggattgcaacgttttcgcgatgtgttgaagcaaacggttgccgaattgaatttcggcgacgatgcgatgaaaaaggcggaaaaagtgggcaatatggcgccgatggtcattggtgtaacgtttgcgccgaaccgcgatgtgcctaagccgaaaccggaatgggagcagatgctgacggcgggttgtgcggcgtatgcgctgcaactggcggcaacggcgcaaggtttcgacaatgtctggattacggggatgtgggtcaacagccccctgttgcgtgaggctttcggatgtgcggataaggataaaatcatcgggctgatgatggtcggcacgccgacagaggaagtgcataagcccaagaataccgatttggaagcgtttgtcagccattggtaa

SEQ ID NO: 38538 - DNA, 507 bp, Neisseria meningitidis
atggatttttttaattttttcgagcaaggatattttaaaaaactcgcggttgaaaatggattaaatactgaatattttatatttcaatttatagtatgtaatctatttagtattttcgttattattttaatgaattttataaaaaattacgctgtgcttattgttttaatagtaattgttagtatattatttggactaattttaaaaaataaaactatgtctttaataaagaataaagaaaaatttttatgtggtttgtttccgttggatgtgccgatttttaaatatacaatgcctagttattttaaacttataaataagaatatgaggtggctttttcacatgaatgttttctgtttattttttatttgtttttcaatatatctaattaataaaggagagaatcagtatattgcttattttagttgttattttttcggacttacttatccattaattaattatttgatattattacacagagaatataaacgtattcagttctaa

SEQ ID NO: 38539 - DNA, 366 bp, Neisseria meningitidis
atgttcaaacgacctgaagaaatcattgtcctgatacttgccgtcctctggattgccggtacgtattttctcgccgccctgtttggagcggatgcttataccgtgttaaaaatcactgcccttaccctgctttggtctgccgcatcattcctcctttggcaaaaaaacctcagccggcatatctggccgctgctgctcggctgcctgactgcctgttggtggccgtatctgaatcaatcggtcgcacccggttctttaccttggtatgcatcatggacgttcaaaaccatcttagccctgattcccgtaaccgcaggttatctgtttaaatggaaacaataccggcagcgcaaaacaaagccgtaa

SEQ ID NO: 38540 - DNA, 1677 bp, Neisseria meningitidis
atgagcttcaaaaccgatgccgaaatcgcccaatcctccaccatgcgcccgattggcgaaattgccgccaagctgggtctgaatgccgacaacattgagccttacggtcattacaaggcgaaaatcaatcctgccgaagcgttcaaactgccgcaaaaacagggcaggctgattttggttaccgccatcaacccgactccggcgggcgaaggcaaaaccaccgtaaccatcggtttggcggacgcgttgcgccacatcggcaaagatgccgtgattgccctgcgcgaaccttctctggggccggtgttcggcgtgaaaggcggcgcggcaggcggcggctatgcccaagttttgccgatggaagacatcaacctgcacttcaccggagattttcacgccatcggtgcggcaaataatctgcttgccgcgatgctcgacaaccatatctatcagggcaacgagttggacatcgaccccaaacgcgtgctgtggcggcgcgtggtcgatatgaacgaccgccagttgcgcaacatcatcgacggcatgggtaaacccgttgacggtgtgatgcgccccgacggttttgatatcaccgttgcctccgaagtgatggcggtattctgccttgccaaagacatcagcgatttgaaagagcgtttgggcaacatcctcgtcgcctacgccaaagacggcagccccgtttacgccaaagatttgaaggcacacggcgcgatggcggtcctgctcaaagatgcgattaagcccaatttggtgcaaaccatcgaaggcacgcccgccttcgtacacggcggcccgttcgccaacatcgcccacggctgcaactccgtaaccgcaacccgtctggcgaaacaccttgccgattacgccgtaaccgaagcaggcttcggcgcggatttgggcgcggaaaaattctgcgacatcaaatgccgccttgccggtttgaaacctgatgcggcggtcgtcgtggcgactgtccgcgctttgaaatacaacggcggcgtggaacgtgccaacctcggtgaagaaaacctcgaagccttggcaaaaggtttgcctaatctcttgaaacacatttccaacctgaaaaacctattcggactgcccgtcgtcgttgcgctcaaccgcttcgtgtccgactccgatgccgagttggcgatgattgaaaaagcctgtgccgaacacggcgttgaagtttccttgaccgaagtgtggggcaaaggcggcgtgggcggtgcagacttggcgcgcaaagtcgtcaacgccatcgaaaaccaaccgaacaacttcaatttttcctacgatgttgagctgagtattaaagacaaaatccgtgcgattgcccaaaaagtgtacggcgcggaagatgttgatttcagcgcggaagcgtctgccgaaatcgcctcgctggaaaaactgggcttggacaaaatgccgatttgcatggcgaaaacccaatattctttgagcgacaacgccaaactcttgggctgccctgaaggcttccgcattaccgtgcgcggcattaccgtttcttccggtgctggtttcatcgttgcgttgtgcggcaatatgatgaagatgccgggtctgccgaaagttccggccgccgagaaaatcgatgtggacgaacacggcgtgattcacggcttgttctga

SEQ ID NO: 38541 - DNA, 1251 bp, Neisseria meningitidis
atgtttgttccgctggcaatgcttgcaggtatgttttcctactacgaaaccttccacgaaacggaagcgttgcaggacgacctgctccgtcaggcggcattgtacgtcgcccccgattccaaacccgaaactttgcccgagggcgacggcgatacgcgtattttggtacagatgccgcagcaggaagaccctgttgtcagcctgcctgcgcatctggcggacggtctgcacacgcttcaggcggacggggacgacgattattaccgcgtctatatccgcacgaccgaacagggacggattgccgttatgcaggaaaacgaataccgtgaagatttggcggcggatgcggcacggcaaagcgtgttgcccctgctggcggcactgccgctgatgatactgctgaccgtgtggattacgcacaaagccatgcgccccgtccgcaaattgtcgcaaagtctcgaacaacgccgaatcaatgacctgtctgccttgagtgtggacaatattcccagtgaaatcagagggttcgtaaccgccatcaacttgcttttgaaacgtgcggatgaagacatccgccaccgtcagcggtttgtcgccgacgcggcacacgaattgcgtacgccgatgacagccctttcccttcaggcggaacggctcaacaatatgtctctgccacccgatgcggcgcggcagtctgccgttttgcagcaaagcatacggcgcaacaaacacctgctcgagcagcttttggcactggcgcgttcgcagtcggacgaaacccctttggcgaaaacgacattcggtctgcaaagccgtttccgccaagtgttgcaggaactgatgccgcttgccttggaaaaacgtcaggacattggtgtggcggtcggaggtgatgtcgaaatatttgccgatgaaactgaaatctataccttggttaaaacgtttgttgataacgcaatacgttataccccgtccgaaggcaggatagatttgggtttcacagacgaagggaaatatcttgccgtgtgggtggaagataacgggaacggcattcccgaatccgaacgcgcccgcgtcctcgatccgttttaccgtattttgggaacggagcagcaggggatggggctgggtctgtccatcgccgacacgcttgccaaaaaatacggcggacatttggaactgaccgacagccgacgtttcggacacggtctgttgatacgggcgttgttggacaaggaaaccctgaaatag

SEQ ID NO: 38542 - DNA, 1413 bp, Neisseria meningitidis
gtgaaaatcctcattttaggcaacggacaggtaggttctaccgtcgcacaaaaccttgccgccatacccaacaacgacgtaaccgttatcgacatcgacgaaaaagcattgcaggaaacaggcagccgcctcgatgtccaaaccgttttcggcaacggcgcatcccccttcacattagaacgcgccggcgcggaagatgccgacttgctgctcgcgctctcccgcagcgacgaaaccaacatcgtcgcctgcaaagttgccgccgacctgttcaacatccccggccgcatcgcgcgcgtccgttccagcgaatacctcgaatacctcagccccaagctcgaaaacaacgaaaacggcagcctttccatattcggcataaccgaaaccatcagccccgaacagctcgttaccgaacagcttgccggcctgatagactgcccgggcgcattgcaggttttacgttttgcagacgaccgcgtgcggatggtcatcatacaggcgcggcgcggcggactgcttgtcggacgcagcattgccgacatcgcccaagatttgcccgacggggccgactgccaaatctgcgccgtttaccgcaacaaccgcctcatcgtccccgcgccgcaaaccgtcatcatcgaaggcgacgaaatcctatttgccgccgccgccgaaaacatcggcgcggtcatacccgaattgcgccccaaagaaaccagcacccgccgcatcatgattgccggcggcggcaacatcggctaccgtctcgccaagcagctcgaacacgcatacaacgtcaaaatcatcgaatgccggccgcgccgtgccgaatggatagccgaaaacctcgacaacaccctcgtcctgcaaggttcggcaaccgacgaaaccctgctcgacaacgaatacatcgacgaaatcgacgtattctgcgccctgaccaacgacgacgaaagcaacattatgtccgcccttttggcgaaaaacctcggcgcgaagcgcgtcatcggcatcgtcaaccgctcaagctacgtcgatttgctcgaaggcaacaaaatcgacatcgtcgtctccccccacctcatcaccatcggctcgatactcgcccacatccggcgcggcgacatcgttgccgtccaccccatccggcgcggcacggcggaagccatcgaagtcgtcgcacacggcgacaaaaaaacttccgccatcatcggcaggcgcatcagcggcatcaaatggcccgaaggctgccacattgccgccgtcgtccgcgccggaaccggcgaaaccattatgggacaccataccgaaaccgtcatccaagacggcgaccacatcatctttttcgtctcgcgccggcgcatcctgaacgaactggaaaaactcatccaggtcaaaatgggctttttcggataa

SEQ ID NO: 38543 - DNA, 441 bp, Neisseria meningitidis
atgaacatccgccgcgcctcaccgtccgactgcgccgcactcgccgcgctcgatgccgtctgcaacccgtccgcgtggacgcaacgccaatttgagtccgcattggtttcgccgtccgaacaggttttcctcgcggaaaaagacggcgggattgccgcctttatcgtttggcagaacctgcccgacgaatccgaactgcacctgattgccaccgcgcccgaatgccgccgccgtggcgttgcgtccgccctgctcgaatattggttcgcacatctgcccgaagacacgcaacgcctgctgctcgaagtccgtgcaggcaacaccgccgcacaggcactgtacgcggcgcacggctttaccgatgcgggcaggcggaaaaactattaccgtacagccgacggtaaaaccgaagatgctgtcttaatggagaaaatatgttaa

SEQ ID NO: 38544 - DNA, 1350 bp, Neisseria meningitidis
atgaaattatcggtgatgtcgcccgaacattcggcgcaacttcaggcgtttgaggcaaaaatcctgtccaatcacgccaaaatcgaggcgtggttccgcacgcagtggagcgtacaccgcccgccgttttacggttcggtcgatatacgcaatgccggttacaaaatttcgtctatcgatatgaatttgttccccggcggcttcaataatctgaatcccaactttatcccgctggcggcggttgccgcgcaagatgcggtgcaacgcgcctgtgaaacggcgaaatccgtattgattattcccgaaaaccacacgcgcaatacgttttacctgcaaaacgtttacgccctcggcgagattttgtgttcggcagggtatgaagtgcgcttgggcagcctgaatccggaagtaaccgaaccgaccgaatttgaaaccgcattgggcgacaaaatcctgttggaacctttattgcgtacccgcgaccgcgtccatcttgcagacggcttttcgccttgcgtggttttgttgaacaacgatttgtccgccggtattcccgacatcctcaaaggcatcagccaaaccgttttgccgccgttgcacggcggttggacgacgcgccgcaaaacaaatcatttcggcgcgtacaaccaagttgccgccgaatttgccaagttaatcggcatcgacgaatggcaaattaacccttattttgaaaaaatcggcggtttggacttccaagggcgtgaaggcgaagacgcgttggcggaggcggtagaatgtgtgctggcgaaaattcaagccaaatacgacgaatcgggcattaccgacaaacctttcgtcatcgtcaaagccgatgccggcacttacggcatgggcgtgatgagcgtcaaatccgccgacgaagtgcgcggattgaaccgtaaaaaccgcaataaaatggcgaaagtcaaagaaggtttggaagtcagcgaagtgattgtccaagaagggatttatacttatgaaaccttaaacagcgcggtgtgcgaacccgtcgtgtatatgatggaccgcttcgtcatcggcggctttttccgcgtacacgaagggcgcggtgcggacgaaaacctcaacgccggcggtatggtgtttgttccgctgtctaacagcattcctaccggtaacggcgataattcccaagaagcgcccgaagcctgcaagcgcgtattcgaacaatgggactcgctgggtatgccgcgctctgaaaaagactgcgacgtggacaacgaacacaaccgcctctacgtttacggcgtaatggcacgcctgtcgcttctggcggcttcaatcgagttggaagaaacggcgtaa

SEQ ID NO: 38545 - DNA, 1131 bp, Neisseria meningitidis
atgattaaaatcagcacccgcttcgatgccggctcggtcgtcgtcaaagacctgaccgatccttccaacatccgcctcgccctgcgtcccgacaacgcctccgattttgcacaatggttctacttccggctgcaaggcgcggcatatcaaaactgcatcatgcattttgacaatgcggcagaagccgcctacccgaaaggctgggaaggctatcaggcgtgtgcctcatacgaccgccgcaactggttccgcgtaccgacttcctacgaaaacggcgtactgaccgtcaatcatacgccgctgtccaacagcgtgtattacgcctatttcgaaccttactccgaagaacagcatttaaacctcctcggcgacgcgcaaggcagcggcctgtgccgcatcgacgacttgggcagcaccgtgcaagggcgcgacatcaatctgctgaccataggcaatcaggtcgaaagcgatttgaaaatctggattaccgcccgccagcatccgggcgaaaccatggcggaatggtttgtcgaaggactgctcggcaggctgctcgatccgcaagacccgacagcacgcaccctgctcgaccgcgccacgttctatatcgtccccaatatgaaccccgacggttcggcactgggcaaccttcgtaccaacgccgccggtgcgaacctcaaccgcgaatgggaaaatccgactttggaaaaaagccccgaagtgttcttcgtgcgtgaaagaatgttggaaaccggcgtggatttgtttttggatatccacggcgatgaagggctgccctttgtctttgttgcaggaactgaaggcgtgccgaactacaatccgcgcatttccgcgttggaaacacagttcaaaaccgcccttttgaacgccagccccgatttccaagacgaatacggttacgaaaaagatgcaccgggcgaagcgaatatgaccttggcgaccaactgggtcggcaaccgtttcaactgccttgcctacacgctggaaatgccgtttaaagacaatgccaatctgcccgacgacgacttcggatggaacggtcagcgttcattgcgcctgggcgaagccgcattgtccgccatcctcaacgtcatcggcgatttgcgctga

SEQ ID NO: 38546 - DNA, 1578 bp, Neisseria meningitidis; identical to SEQ ID NO: 38145

SEQ ID NO: 38547 - DNA, 696 bp, Neisseria meningitidis
atgagtgagttgattttgaaatgcgaaggcgtgggcaaacgctaccgcgacggcggtttggacgttcgggtgctgcacggcttggatttggaaatccgcgcgggggaaagcaccggcatcatcggttcttcgggcagcggaaaatcgacgctgctgcatattctgggcgggctggatatgccgtctgaaggcaggttgctgctgatgggcgaggatttgcgtacattaagccagcgacaactgggcatcctgcgcaaccgccatctcggtttcgtgtaccagttccaccatcttctgccggagttttccgcactggaaaacgtgatgatgccgcttctgatcggcaaaaaaagccgtgaagaggcagcagaaacggcaatggcgatgctggaaaaggtcggactgaaacaccgttcgacgcaccgcgcgggcgaactgtccggcggcgaacgccagcgtgccgccattgcgcgcgccttggttacgcaaccaaaatgcctgcttgccgacgaaccgaccggcaacctcgaccgtgcgaacgccaggaatgttttggatatgatgctggaactgaaaacggaattgggaacggggctggtggtcgtaacgcacgacgacgaactcgccggccgcttcgagcgcgtgatggtcatgaaagacggcagcctgcaccccaaacagggcgcaaacgcctaa

SEQ ID NO: 38548 - DNA, 1107 bp, Neisseria meningitidis
atgtctctttatccgatttacaatttttccgccggccctgccgtattgcccgaagccgtgttggaaacggcgcggcaggaaatgttggactacaacggtacgggttttcccgtgatggcgatgagccaccgttcggaaatgtttttgagcatcctgcatcatgcggaacaggatttgaggcagcttttgaaagtgcctgacaactataagatattgtttctgcagggcggagcaacaacccaatttaatatggcagccatgaatctggcacacggtttccgcactgccgacgcggtggtaacgggcaactggagccgtatcgcttatgaacagatgagccgtttgaccgatacggaaatccgtttggcggcgcatggcggcgagcagttcgactatctcgacctgccgcctgtggaaacgtgggatgttgcacccgattcggcgtttgtccattttgccgtcaatgaaacggtcaacgggctgcaataccgtgaagtgccgcgcctttcagaaggcatgccgccgctggtgtgcgatatgtccagcgagattctgtcgcgcgagtttgatgtgtccgattacggcttgatttacgcaggcgcacagaaaaacatcgggccggcaggagttacggtggtgattgtgcgtgaggatttgctcgagcgttgtccgaacgatattcccgatgtgttcaactaccgttcgcatttgaaccgcgacggtatgtacaacacgccgtcaacttacgcgatttatatgtcggggctggtgttccgctggctacaggcgcagggcggtgtgaaaaaaattgaagcggtcaatcggctgaaggcgcaaaccttgtatgagacgatagacggcagcgatggtttttatatcaaccgtatccgtccgaatgcgcgttctaaaatgaatgtcgtgttccaaacgggggatgaggagcttgaccgccgttttgtgctggaagccgaattgcagggcttgtgcctgcttaagggctataaaaccgtcggcggtatgcgcgccagcatttataatgcgatgccgcttgaaggcgtgcgggctttggcagattttatgcgcgatttccaacggcgttacggttga

SEQ ID NO: 38549 - DNA, 1056 bp, Neisseria meningitidis
atgattacacttgccgtagatgccatgggcggcgaccaaggacttgccgttaccgtacccggcgcaaccgcattcctccaagcacaccccgatgtccgcctgattatgaccggcgacgaaacgcaactgcgccaagccctgaccgcggcaggcgcaccgatggaacgcatcgacatctgccataccacccaagttgtcggcatggatgaatcccctcagtccgccctaaagaacaaaaaagactcctccatgcgcgttgccatcaaccaagttaaagaaggcaaagcccaagccgccgtatccgcaggcaacacgggcgcactcatggcaaccgcacgtttcgtcctcaagaccatacccggtatcgaacgccccgccatcgccaaattcctcccgtccgacaccgaccatgttaccctcgccctcgaccttggcgcgaacgtcgactgcacgcccgaacagctcgcccaatttgccgttatcggcagcgaactcgtccacgcactccatcctcaaaaaggacagccgcgcgtcgggctggtcaacgtcggcacggaagacatcaaaggtacggacaccgtcaaacaaacctacaaactgctgcaaaacagcaaactcaactttatcggcaacatcgaaagcaacggcatcctgtacggcgaagcagatgtcgtcgtcgccgacggctttgtcggcaacgtcatgctcaaaaccatcgaaggcgcggtcaaattcatgagcggagccatccgccgcgaattccaaagcaacctgttcaacaaacttgccgccgttgccgccctacccgccctcaaagggctgaaaaacaaactcgatccgcgcaaattcaacggggccatcctgctcgggctgcgcggcatcgtcatcaaaagccacggcggcacagacgaaaccggtttccgctacgcactcgaagaagcctaccacgaagccaagtccgccggcctttccaaaatcgaacaaggcgttgccgaacaactcgccgcactcgaaactgccaaagccgtccaaaacgaaaatgccgacggtctgtaa

SEQ ID NO: 38550 - DNA, 384 bp, Neisseria meningitidis
atgaagctgaccgtccgcaactaccatctcgacggctacggccatgtcaacaatgcgcgctacctcgaatttttcgaagaagcgcgctgggcgttttttgaagaacgcggactgctgcacgagttggcaggcctcatactgattgtcgcccgcatcgacatccgatacagccgccccgccgtcgaaggcgacgtattgcagttttcatgccgcctgaaaacccccggcacgcgccgtattgtgctgacccagacgattacactgccaaacggcaaaaccgccgcagaagccgacatcaccctgatgcccgtccacgccgccacacaacgcaccgtcagcctgcccgccacccttgcccgcgcattggaagccttgtccgaatga

SEQ ID NO: 38551 - DNA, 369 bp, Neisseria meningitidis
ttgaataatattcctgttgaaatccgtttgttgaaaaaccgtaccgtgttggttttgacttatggggacgaacctaaaaatctgcctgccgaatttttacgcgtctattcgccgagtgcggaagtgcgcggacacggtgtgggacaggatgttttgcagaccggtaaggcagatgtgcaaattacggatttgcagcctgtcggacagtacgcgctgaaaatcagtttttcggacgggcacgacagcggtctttacgattgggcgtatctgcacagactggcatacggatacgatgcgatgtggcaggaatatttggacaaattggcggcggctggtgcgtcgcgttttgaaaagcaatcagattgttaa

SEQ ID NO: 38552 - DNA, 834 bp, Neisseria meningitidis
  misc_feature 8, 9, 10, 11, 12: 'n' is a, c, g or t
gtgtgtgnnnnnacccccgcagtcgtgttttccgtcgcactgctgcatttggcaatggtggcattgctctggcaggcgcacaagctgcccgtgatagagtcaggaaatgttatcgaatttgtcgatttgggtgattttggcggaggggacggtgcacccgaaggcgcaggtgcgcctgctgcgcctgagccgcaacctgagcctgagccgcccaaacctgtcgagccgcccaagccggttttgaagccggtggttacgaaaaaggcggatgcggatattcagcagcctaaggaagagccgaaacctgaagaaaagccgaaacccgaagaaaaaccgaaaccagagcctaagccggaagcgaagcctgtcccgaaaccggcggaaaaaccggtcgagaagccgtctgaaaaacctgccgaacatcccagcaatgcttctgccaaagcagacagcgagcagggtaatggggaagataagggaaccggtaccaaaggagacggaacggggcgcggagaaggcagcggtaaaggtagcggcggtgtcaaaggcgaacacggggaaggagccggcagcagcaaaggcaatcctttacgcgccaacggcagcattccgcgcccggcttatcccacgctttctatggagaatgacgagcagggtacggttgttttgagcgttttggtttctccgggcggtcatgtcgagtccgttaaaatcgtgaaaagcagtggtttttctcggttggacaatgcggcacgcaaggcggcgcaaaacgggcattttcaagccaatgcctggacggagtttaaagtccccgtcaagtttgaattgaattag

SEQ ID NO: 38553 - DNA, 855 bp, Neisseria meningitidis
atggcagaaattactgcaaaaatggttgccgacctgcgcgctgctaccggcctgggcatgatggaatgcaaaaaagccttggttgaagccgaaggcaacttcgacaaagccgaagaaatcctgcgtatcaaatccggtgcgaaagccggtaaactggccggccgtaccgctgccgaaggcgtattggcttacgcgatcaacggcaatgtcggcgcattggtcgaagtaaactgcgaaaccgacttcgttgcgaaagacgcgggcttcgtagaatttgccaacttcgttgcgaaaaccgccgccgagaaaaaaccggcttctgttgaagaactgagcgaactggttgaagcagaacgcaaagccatcatcgccaaattgggcgagaacatgtctgtccgtcgcttccaagtgatcgacactgccaaccaactggttgcctacatccacggcgcattggcgaccgaaggcgtattggttgagtacaaaggctctgaagacgtagcacgcaaaatcggtatgcacattgttgccgctaaaccacaatgcgtaagcgaagccgaagtagatgccgaaaccgttgaaaaagaacgccacatctacaccgaacaagccatcgcttccggcaaacctgccgacatcgccgctaaaatggttgaaggccgtattcgcaaattcttggctgaaatcactctgaacggccaagcattcgtgatgaaccccgatcaaactgttgcccaattcgctaaagaaaacggcactgaagtggttagcttcgtacgctacaaagtaggcgacggtatcgagaaagccgttgtcgactacgcagccgaagtagccgcagccgccaaagtgtaa

SEQ ID NO: 38554 - DNA, 678 bp, Neisseria meningitidis; identical to SEQ ID NO: 37180

SEQ ID NO: 38555 - DNA, 369 bp, Neisseria meningitidis
atgaaaccgttgaaacgacatcccgcccttatcgggctttcgcgtgaccaccaccattcgctttccctgtgcgtgcgtctgttgcggacgccggaagaaaggcatcgggacgaactcgaaccgcattttgccgaattggaaacccattttcgcgaagaagaagccaagtttgccccaatttggcagaatgtcgcccccgaattgaaacaacgtttcgagaaagaccacgcccgactgcggcagatgatggcaagccccgaatacggtaacgcggcgtggaataccgcttttgccacaaccctgcgcgaccacgcgcgctttgaagaacgcgagctgtttcccgccgccgaaccgtttttgccggcatga

SEQ ID NO: 38556 - DNA, 1218 bp, Neisseria meningitidis
atggagattattttaggtatcgtgatgtttaccgtcatcgttttggttttggcactgatgattctatttgccaaatccaaactggtcagcgaaggcgacatcaccatcaaagtcaacggcgaaaaagagctgacgatgcccgccggcggcaaactcttgggcgcgcttgccaacgaaggcatctttatcccctccgcctgcggcgggggcggttcgtgcggacaatgccgcgtcgtcgtaaaaagcggcggcggcgacatcctgccgaccgagctgtcccacatcagcaaacgcgaagcacgcgaaggctgccgtctgtcgtgccaagtcaacgtcaaaaccgacatggacatcgaagtccccgaagaagtgttcggcgtgaaaaaatgggaatgcaccgtcatctccaacgataacaaagccacgttcattaaagaactcaagcttgccattcccgaaggcgaagaagtccccttccgcgccggcggctacattcaaattgaagccccaccgcacaccgttgcctacaaagacttcgacattcccgaggaatatcacgaagactgggacaaatacaatctgtggcaatacgtttccaaagtggacgaaccgattttgcgcgcctactctatggcttcgtatcctgaagaaaaaggcatcattatgctgaacgtgcgtatcgccacgccgcccccgcgcgtacccgatgcgcctccgggacaaatgtcgtcctacatctggtcgctcaaacccggcgacaaagttacgatttccggcccgttcggcgaatttttcgccaaagacaccgatgccgaaatggtatttatcggcggcggtgcgggtatggcaccgatgcgttcccacattttcgaccagttgaaacgtttgaactccaaacgcaaaattaccttctggtatggcgcacgttccaaacgcgaaatgttctatgtcgaagacttcgaccaactcgcggcagaattcccgaacttcacgtggcacgtcgccctgtccgatccactgccggaagacaactgggacggctacacaggcttcatccacaacgtggtttacgaaaaccacctgaaaaaccatgaagcaccggaagactgcgaattctatatgtgtggccctccaatcatgaaccagtccgtgatcaaaatgctcaaagacttgggcgtggaagacgaaaacatcctcttggacgatttcggcggttaa

SEQ ID NO: 38557 - DNA, 639 bp, Neisseria meningitidis
  misc_feature 620, 621, 622, 623, 624: 'n' is a, c, g or t
atgaaaaaatacctattccgcgccgccctgtacggcatcgccgccgccatcctcgccgcctgccaaagcaagagcatccaaacctttccgcaacccgacacatccgtcatcaacggcccggaccggccggtcggcatccccgaccccgccggaacgacggtcggcggcggcggggccgtctataccgttgtaccgcacctgtccctgccccactgggcggcgcaggatttcgccaaaagcctgcaatccttccgcctcggctgcgccaatttgaaaaaccgccaaggctggcaggatgtgtgcgcccaagcctttcaaacccccgtccattcctttcaggcaaaacagttttttgaacgctatttcacgccgtggcaggttgcaggcaacggaagccttgccggtacggttaccggctattacgagccggtgctgaagggcgacgacaggcggacggcacaagcccgcttcccgatttacggtattcccgacgattttatctccgtccccctgcctgccggtttgcggagcggaaaagcccttgtccgcatcaggcagacgggaaaaaacagcggcacaatcgacaataccggcggcacacataccgccgacctctcccnnnnncacacacttaattaa

SEQ ID NO: 38558 - DNA, 507 bp, Neisseria meningitidis
atgcccctactagacagtttcaaagtcgatcacacccgtatgcatgcccccgccgtacgcgtggcgaaaaccatgactacgcccaaaggcgacaccattaccgtgtttgacctgcgcttttgcgttcccaacaaagaaatcctgcctgaaaaaggcatacacacgctggagcatttgttcgccggctttatgcgcgaccacttgaacggaaacggcgtggaaatcatcgacatttccccgatgggctgccgcaccggtttctacatgagccttatcggcacgccttccgaacagcaggtcgccgatgcgtggctggcttcgatgcaggatgttttgaatgtcaaagaccaaagcaaaatccccgagttgaacgaataccaatgcggcacttatcaaatgcactcgctcgccgaagcgcagcaaatcgcgcaaaacgtgttggcgcgcaaagtggcggtgaacaaaaacgaagagctgacgctggatgaagggctgctgaacgcctaa

SEQ ID NO: 38559 - DNA, 792 bp, Neisseria meningitidis
atgtccgaacaccgagtcaaccacgaacccgtcttcctgttggcttcctcgccctggcgcgaaagcagcctgcgggtcgaagcgttcagccgccgttacgggcgtgtggcacttttggcaagaagcgcgcgcaaacggcagagcgaattgcgcggcgtgttggtgccgtttgtgccggtgagtgcgtcttggtatggttcgcaagagttgaagaccctacatcgcgccgaatggataggcgggtggccgcagccgcagggtagggctttgttcagcggattgtatgtgaacgagttgatgctgaagttgaccgtccgcgaagatccgttgcccgagttatacgacgcgttggcggaagtgatggaggcggtgtgctgcaaagccgcttatatcgacgacttgcgccgtttcgagtggcggctgctgaacctgttgggcgttgcccccgatttgaaccgcgacggggacggcgggacgattgcggcaggcggcacataccttgtccgcccggaaacagccgtcttccccgtcggaaaaggatttgccgtaccgccgcacgccgccggcgttgtcgcccccgggcagagcctgatcgatttgcgcgaaggcagtttccgcaccgccgaaagcctgcaacaggcattgaaaatcacacggctttttatccgccacctgttgcccgaggggctgaaatcgcggcaggtgttggaacagatacggcagtttgaccgcaaagaaaccgcccgggaaaccgtcccgacttcggacggcacggcttcaaatgccgtctga

SEQ ID NO: 38560 - DNA, 507 bp, Neisseria meningitidis; identical to SEQ ID NO: 38430
  misc_feature 8, 9, 10, 11, 12: 'n' is a, c, g or t

SEQ ID NO: 38561 - DNA, 450 bp, Neisseria meningitidis
atgaaaatcggaacaccttggcagacggcatccgctatgctggttttgcgtctgtttgccgcatatgaatttttggaatcgggtttgcaaaaatggaacggggagaattggttttccgaaatcaacgatcagtttccattcccgttcaacttgctgccggacgcgttaaactggaatctcgccatgtatgcggagcttttactgcccgtactgttgcttttgggtttggcaacgcgtctgtcggcattagggctgatggtcgttaccgccgtcgcttgggctgcggttcacgccggttcgggttacaatgtctgcgacaacggttataaaatggctttaatttatatcgtggtattaatcccgctgcttttccagggtgcgggcggatggtcgctggatacgctgctgaaaaaacggttttgcccccaatgccgtctgaagcaagattga

SEQ ID NO: 38562 - DNA, 474 bp, Neisseria meningitidis
atgactgatttttccgtttgggagaccgccccctttggtgcaaccgtcgatcatatcctgcaacgctaccacaatgtccaccgcgcacaatttgaagaattggtgccgctggcgcagaaagtggcccaagtccatgccgatacctttccggcagaaattgccgggctgcttgcctatatgcagaacgaactgctgatgcatatgatgaaggaggagcggatgctgtttccgatgattaatcagggtgtcggacgcggtgcggcgatgcccatcggcgtgatgatgcacgaacatgaagaacacgaccgcgccatcgcacggctcaaagagctgaccgacaatttccaaccgccagaaggggcttgcggaagctggacgcggctttacgcgctggcgaaagaaatggtggaggatttgaacgaccacattcatttggaaaacgatattttgtttgcccgcgtactcgattcttaa

SEQ ID NO: 38563 - DNA, 672 bp, Neisseria meningitidis
atgatgaagacttttaaaaatatattttccgccgccattttgtccgccgccctgccgtgcgcgtatgcggcagggctgccccaatccgccgtgctgcactattccggcagctacggcattcccgccacgatgacatttgaacgcagcggcaatgcttacaaaatcgtttcgacgattaaagtgccgctatacaatatccgtttcgagtccggcggtacggttgtcggcaataccctgcaccctacctactatagagacatacgcaggggcaaactgtatgcagaagccaaattcgccgacggcagcgtaacctacggcaaagcgggcgagagcaaaaccgagcaaagccccaaggctatggatttgttcacgcttgcctggcagttggcggcaaatgacgcgaaactccccccggggctgaaaatcaccaacggcaaaaaactttattccgtcggcggtttgaataaggcgggtacaggaaaatacagcataggcggcgtggaaaccgaagtcgtcaaatatcgggtgcggcgcggcgacgatacggtaatgtatttcttcgcaccgtccctgaacaatattccggcacaaatcggctataccgacgacggcaaaacctatacgctgaaactcaaatcggtgcagatcaatggccagtccgccaaaccgtaa

SEQ ID NO: 38564 - DNA, 1227 bp, Neisseria meningitidis
atgaataccgataacctgcacgacatcttggacgaaatggttcaagtgtattctcaaaaaaaacaaagccgatccgaaaccccggccgaaatcggcgcacacttccacccgctgctcgaccgcctgtgcgaaaccgcagaagcacaaaacgcgtccgacatccttatcagcaaaggattcccgccctcgttgaaaatcaacagcgcattaaccccgcagccgcaaaaggcgctgacgggcgaggaaaccgccgccatcgccgcatcgacgatgaacgccgaacaatcggaaatattccggcgcgacggcgaaatcaactactccgtccagtcgcgcagcggcacgcgctaccgcgccaacgcctaccacagccaaggcagcgcaggtttggttttgcggcgcatcaaccacgtcatcccgcaaatgcaggaattgggcctgcccgaaaaactcaaagacctcgccgtcgcaccgcgcgggctgctgattatcgtcgggcctaccggttcgggcaaatccaccacgatggcgactatgctcgaacaccgcaacaaaaccctgcccagccatatcgttaccatcgaagacccgattgagtttatctacaaaccgcgccgctgcatctttacccagcgcgaaatcggcgtcgacaccataaactggcagacggcggtacaaaacgctatgcgccaatcccccgacgtggtctgcatcggcgaagtccgcagcagggaaagtatggaatacgcgatgcagctcgcccaaaccggccacctgtgcatttttacgctccacgccaacaccgcgccgcagtcgctcgaacgcatactcaacttctaccccaaagaacagcacaaccaaatactgatcgacatcgccctcaacctgaccggcatcatctgccaacgcctcgccctcaaacaagacaaaacgggcaggacggcggttgtcgacttgctcatcaacacgcccgccatccaagacttcatcctgaagggcgacctgatgaacatcagtaaaatcatggaaaccgccaaaaccgacggaatgcagacgatggatcaaaaccttttcgaactgtaccgtcacggcatcatcagttacgaagaagccctgcgccagtccgtttccgccaacaacctgcgattgcacatccaactgcacaaagaaggcaaaacgcccgaactcctttacgacagggtcaacggtctcaacctcatttcctga

SEQ ID NO: 38565 - DNA, 1206 bp, Neisseria meningitidis
atgcaaactttaatttcagcagataatcatttgctgctgtgggcttttgttatgttagctgccgctgctgcgatttttattgagcaaaacagtcgcttggctgggaaagtccctggtgcagtattagctttattgattgcgttgattgcttctaatttgggtgttattccgacggatgctccagtatttgatgctgtatggtcttatattgtacctcttgctattccgttgttattgtttcaattagatcttcatgctctatttaaggaaagtggacgtatgctgtttattttcctgattagttcactagggacggtcattggaacgcttgtctcatttgcactattgaaaaactatattcctgaactagataaggtagctggcatgatttcagcatcttatacgggaggtggtgttaattttgcagctatgtcagctaagcttaaccctgctaaagatgttattgcagcaacaattgttgctgataatttgatgatggcttgttacttttttattttgattggtatctcttcctcatattgggtcagaaaagtttggggaagtccatatcaggataaattggagcaggaatatcatgatccgagtgtgaataaggctgccgagtattggaaacctaaatccatttcgctacagagtatagccttatctttggctgcctcgattttgttggtcgcagtttcattctcattatccagttttttgcaaaatcattttcaaagtgttgatggtgttgcattaaaaatgctgacaggtttaattagtgacaaatatttgctgttaacgacatttacattggcagttgttttatttttccgtaaaggcattcaaaaactagatggcagtcaagaattagggacatattgtatttatctgttttttgttgtgattggtgttcctgcctctataccgttaattattaaaacagcaccattactctttgtttttactttgattattgcggtattgaatttgttactgacgttagtgttaggcaagctgttcaaattcagtattgaagaaattgtattggcttgtaatgccaatattggagggccgactactgcagcagccttagccatcagtaaaggttggcgtgatttagtcggtgcaattttgttaattggtactgtaggctacattatcggtaactatataggttcgtttgtatatgccctattgagctga

SEQ ID NO: 38566 - DNA, 783 bp, Neisseria meningitidis
atgcaggaaacccgtttttccatactgctggacgaattggcggcaaaacaggaggcagccatcgccccccacctgcttgccgacgggagcaaggtatggatacgcaaagcaggcaggcacaatgcacgatggcgttacgcgctgctcggtatggttgcccgatatttgaaactgggggtgttgaagccggtccccagcctcggcggcgagcctgccattgcaaccgaatcaaaacgcctgtacgaattgcgcgcggcggggatagccgttcccgaattgctcgccgtccggaaaaatgcccttatgttcggcaatttggaaggcatcccgctcgatacgcaaatccgccaagaagccgaggctggaaagtcggacgcttggcttgccggtttggaagccattgcacgcgtgcataaaaaacggcagttcctcagtcaggcgtttgcgcgaaatatgatgtcggacggaaaaaacatcagctttttggattttgaagacgacccttccgaagtcctgaccatagcgcaatgccaagcccgcgattggctctgctacatccattcgaccgcgctgatattgaaaaacggcggactgctggaagcggctgcggaaaaatggggcggcgtattgtcagatcagcctgccgaaatacaaaagctgattgccgccaccgtcaaaccgatcctcccgatacgcaggctggaacacccccgctggggacgggacgcactcaggctggcagcctcgatttccctgatttcccttgccgatatgccgccgtaa

SEQ ID NO: 38567 - DNA, 384 bp, Neisseria meningitidis; identical to SEQ ID NO: 36608

SEQ ID NO: 38568 - DNA, 966 bp, Neisseria meningitidis; identical to SEQ ID NO: 38346

SEQ ID NO: 38569 - DNA, 939 bp, Neisseria meningitidis
atggatgcctaccccgaagccgaagccccgccgcaaagcatcgtcgagctggttcccgtattgattgccgttaccgacggcggcctgcgggtgttgaccgtcgcccaaggcacgctcctgcccaacggcccgctctcccctctgcgcaattccctgcaggcgggcgtgaagctgtgggttgccaagcagacttcgcagcctatgggctatgtggaacagctttacacctttgtcgatacccaccgccgcaacgaacacggcatgcccgtcttgtacgtcagctatttggggctggtgcgcgaggcagccgacagcatcctgcatcccgatgcgaaatggcaggactgctacggctatttcccgtgggaagacttgcgcaccgacggcgggcagcgcgacgccgtcgtcggccgcctgcgcatttgggcaaactcggcggacacggaggaagtccgccaaaagcggctcaagcgcattcatttgtgttggggcgtcgaaccggaaaactggtcggaagaatacgttttgcaacgctatgaaatgttgtatgaaagcggcctgatagaggaagccgccgagccgcaggcaaacttcgacttcgcgcttacggggcagcccatgcgccacgaccaccgccgcgtactggcgaccgccctgtcccgcctgcgcgccaaaatcaaataccgccccgtgattttcgaactgatgccgcccgaattcacgttgctgcaactgcaaaacagcgtcgaagccatcagcggcagattgctgcacaagcaaaacttccgccgccagattcagcagcaaaaccttatcgagccgtcggataccggcgtatcgggcagcaaaggccgtcccgcgcagctttgccgcttccgcgacgacgtcctgcccgacaggctgatttcggacatcggattgccgctgggcagccgttag

SEQ ID NO: 38570 - DNA, 960 bp, Neisseria meningitidis
  misc_feature 937, 938, 939, 940, 941: 'n' is a, c, g or t
atgaatatcctcagtaaaatcagcagctttatcggaaaaacattttccctctgggccgcgctctttgccgccgccgcttttttcgcgcccgacaccttcaaatgggcggggccttatattccttggctgttgggcattattatgttcggtatgggtttgacgctcaaaccttccgacttcgatattttgttcaaacatcccaaagccgtcattatcggcgtgattgcccaattcgccatcatgccggcaaccgcctggctgctgtccaaactgttgaacctgcctgccgaaatcgcggtcggcgtgattttggtcggctgctgcccgggcggtacggcttccaatgtgatgacctatctggcgcgcggcaatgtggctttgtcggttgccgttacgtctgtttccaccctgatttccccattgctgactcccgccatcttcctgatgcttgccggtgaaatgctggaaatccaagcgggcagtatgttgatgtccatcgtcaaaatggttttgctccccattgttttgggtttgattgtccataaggttttgggcagtaaaaccgaaaagctgaccgatgcgctgccgctggtttccgttgccgccatcgtgctgattatcggcgcggttgtcggggcaagcaaaggcaagattatggaaagcggcctgctgatttttgccgttgtcgcactccacaacggcatcggctacctgctcggcttctttgccgccaaatggaccggcctgccttatgatgcacaaaaaacgctggccatcaaagtcggtatgcaaaactcggggctggccgccgcgcttgccgccgcacactttgccgctgcgccggtcgttgccgttccgggcgcattgttcagcgtgtggcacaatatctccggctcgctgctggcaacttattgggcggccaaagccggtaacatannnnncacacacttaattaattaa

SEQ ID NO: 38571 - DNA, 621 bp, Neisseria meningitidis
atggaattgaaagtaattgacgctaaaggacaagtttcaggcagtctgtctgtttctgatgctttgttcgcccgcgaatacaatgaagcgttggttcatcagctggtaaatgcctatttggcaaacgcccgctccggcaatcgcgctcaaaaaacccgtgccgaagtaaaacactcaaccaaaaaaccatggcgtcaaaaaggtaccggccgtgcccgttccggtatgacttcttctccgctgtggcgtaaaggtggtcgcgcgttcccgaacaaacccgacgaaaacttcactcaaaaagtaaaccgcaaaatgtaccgtgccggtatggcgactattctgtcccaattgactcgtgacgagcgtttgtttgcgattgaggcgttgactgccgaaactcctaaaaccaaagtttttgccgaacaagtgaaaaatctgggtctggagcaagtgttgtttgtaaccaaacagctcgacgagaatgtttacttggcttcacgcaacttgccaaacgtgttggttttggaagctcaacaagttgatccttacagcttgctgcgttacaaaaaagtaatcatcactaaagatgcagttgcacaattagaggagcaatgggtatga

SEQ ID NO: 38572 - DNA, 1446 bp, Neisseria meningitidis
atgacccaatacacattgaaacaggcaagcgtcctgttgcagtccaaacagatttccgccgtcgaactggcaagcgcataccttgccgccatcgccgaaaaaaatcccgccctcaacggctatatcaccatcgaccaagataaaacccttgcagaagcccgtgccgccgacgaacgtatcgcgcagggcaacgcctccgcgcttaccggcgtacccgtcgcctacaaggatattttctgccaaaccggctggcgcagcgcgtgcgcttccaaaatgctcgacaacttcatctccccctacaccgccaccgtcgtccaaaacctgctcgacgaaggtatggtaacgctcggccgcaccaatatggatgagttcgctatgggttcgaccaatgaaaactcattctacggcgcggccaaaaatccgtggaatccggaacacgtccccggcggttcgtcaggcggttccgccgccgtcgttgccgctcgccttgcccctgccgcgctcggttcggataccggcggctctatccgccagcctgcatcgcactgcggcattaccggcatcaaacccacatacggcacggtttcccgcttcggtatggtcgcctacgcctccagcttcgatcaagccggcccgatggcgcaaactgccgaagactgcgcgattctgttaaacgcgatggcaggtttcgacccgaaagactccaccagcctcgagcgcgaaaaagaagactacacccgcgatttgaaccaaccgctcaaaggtttgaaaatcggcctgcccaaagaatatttcggcgaaggcaacagcgccgatgttctgacggcattgcaaaacaccattgatttgctgaaagcccaaggcgcggaattgattgaagtttccctgccgcaaaccaagctgtccatccccgcctactacgtcctcgcctccgcagaagccggcaccaacctttcacgttacgacggcgtgcgctacggacaccgtgccgcccaattcggcgatttggaagaaatgtacggcaaaacccgcgccgaaggtttcggcagcgaagtcaaacgccgcatcatgatcggcacttatgtactgtcgcacggctactacgatgcctactatctcaaagcccaaaaactgcgccgcctcgttgccgatgattttcagacggcatttgcacggtgcgacctcatcctcgcgccgaccgcacccactgcagccccaaaaatcggagcggatgcttcgccggttgaaacctacttgagcgatatctacaccatcgccgtcaacctcgccggactgcccgcattgaccctgcccgcaggcttcagcggcggcggactgcccgtcggcgttcagcttgtcggcaactacttcgccgaagccaaaatcctcggtgcggcgcatcaaatccaactcaacagcgattggcacggcaaacgacccgaatga

SEQ ID NO: 38573 - DNA, 1302 bp, Neisseria meningitidis
atgaccgaatccctccgcctccctgccgcctcgctcaaaccttccactgtcgccctgcccggctccaaaagcatcagcaaccgcaccctgctgcttgccgccttgtccgacaatgcttgcgaaatccattccctgctcaaatccgacgataccgaccgtatgctcgaagcactcgataaactcggcgttgaaatcgaatatcttgccgaagaccgtctgaaagtgcacggcacaggcggacgcttccccaaccgcactgccgatttgtttttgggcaacgcgggcacggcgttccgcccgctgaccgccgcgcttgccgttttgggcggcgattatcgcctgcacggcgttgcgcgtatgcacgaacgccccatcggcgatttggccgatgcactgcggattgccggcgccgatgtcgaatatctcggcaaggaacactatccgccgcttcatatcggcgaacgccaagacaacggcgagcgcgtgattccgattaaaggcaatgtatccagccagtttctgaccgcccttttaatggcgttgccgctgaccgggcaggcgtttgaaatccgtatggtcggcgagttaatttccaagccctatatcgacattactttaaaactgatggcgcaattcggcgtacaggttatcaatgaaggctaccgcgtcttcaaaattcccgccgatgcgcactatcacgcgcccgaacacttgcacgtcgaaggcgatgcctccagcgcgtcctacttcctcgcagccggtttgattgccgccacgcccgtccgcgttaccggtatcggcgcaaacagcatacagggcgatgtcgcctttgcctgcgagctggaaaaaatcggtgcggacgtggtttggggcgaaaacttcgtcgaagtctcgcgcccgaaagaacgtgccgtccaagcctttgatttggatgcaaaccatatccccgatgccgccatgaccctcgccatcgtcgcgcttgctacagggcaaacctgcacgcttcgcaacatcggttcgtggcgcgtcaaagagaccgaccgcattgccgcaatggcgaacgagttgcgcaaactcggggcaaaagtcgtcgaagaagccgaagcaattcacatcaccccgcccgaaacgctgacacccgacgccgtcatcgacacttacgacgaccaccgcatggcgatgtgtttctcgctggtttcgctgttgggcgtacccgtcgtcatcaacgatccgaaatgcacccacaaaaccttcccgacttatttcgacgtgttctcatcgctgaccgaaacagcggaataa

SEQ ID NO: 38574 - DNA, 618 bp, Neisseria meningitidis
atgtttacaggcattgttcaaggcttgggaaaactgacggcaatccaccgcccgtcggaggcatttcagacttatgtcgtcgagcttccgcaagaggcggcggacaatctgcaacgcggcgcatcggtcgccaacaacggctgctgcctgacgattaccgaaatcgaaggaaaccgcgtcagtttcgatttaatggcggaaactttggcaaaaaccaatttagggctgctgaaggaaggcgattgcgtcaacatcgaacgggcggcgcgtttcggagacgaaatcggcggacacgtcatgagcggacacattatggcaaccgtgcctattgtcgaaatcgaacgggacgggtacaaccgcacggtttggtttgcgctcccgcacgaactcaaaccctatatcctgaccaaagggttcgtcggcttggacggttgcagcctgaccataggcaaagtcgaagacagccgtttcaatgtccatctgattcccgaaactttggaacggacgctgttcggcagcagaaaggtcggtgacaggatcaacatcgaaatcgatccgaatacgcaggcaatcgtcgataccgtcgaacggctgatggcgcaaagatatgcaaagtga

SEQ ID NO: 38575 - DNA, 2106 bp, Neisseria meningitidis
gtgtttttgttgagtgcttgtttgggcggaggcggcagtttcgatcttgattctgtcgataccgaagccccgcgtcccgcgccaaagtatcaagatgttttttccgaaaagccgaaagcccaaaaagaccaaggcggatacggttttgcaatgcgcttcaagcggcggaattggcatcctctggcggttccgaaagaaaccgaggttaaactgaacctaaatgattgggaggagacgggattaccaagtgaccctaaaaacttacccaagcgacagaaatcggttattgaaaaagtagaaacagacagcgacagcaatattcattcttccccctatctcgcgcaatcaaaccatcaaaacagcaacactaatggcggtacaaagcaaccaaaaaacgaagtaacagattacaaaaatttcaaatatgtttattccggctggttttacaaacacgcgaaaagcgaaatcaaaaacgaaaacggatcagtaagtgcaaaaagaggcgacgacggctatatcttttatcacggtgaaaaaccttcccgacaacttcccgcttctggaaaaattacctataaaggtgtgtggcattttgtaaccgatacgaaaaagggacaaaaatttaacgatattcttgaagcctcaaaagggcaaggcgacaagtatagcggattttcgggcgatgaaggcgaaacaatttccaatagaactgattccgagcttaagacggatcaagagggttatggttttacctcaaatttagaagtggatttcggcagtaaaaaattgacgggtaaattaatacgcaataatagagttacaaacgctactactaacgataaatacaccacccaatactacagccttgatgcacaaataacaggcaaccgcttcaacggcacggcaacggcaactgacaaaaaagagaatgaaaccaaactacatccctttgtttccgactcgtcttctttgagcggcggctttttcggcccgcagggtgaggaattgggtttccgctttttgagcaacgatcaaaaagttgccgttgtcggcagcgcgaaaacccaagacaaagccgaaagcgggggcagtaacggtgcttcaggcggcacagatgcggcagcatcaaacagtgcggcaggcacgtcgtctgaaaacagtaagctgaccacggttttggatgcggtcgagctgaaatcgggcggtaaggaagtccaaaagctcgacaacttcagcaacgccgcccaactggttgtcgacggcattatgattccgctcttgcccaaggattccgaaagcgggggcaatcaggcagataaaggtaaaaacggcggaacagactttacctacaaaacaacctacacgccggaaagtgataaaaaagacacccaagcccaaacagtcacgaacggcacgcaaaccgcttcgggtactgagagcgttaacggcgggcaggcaggaacgaaaacctatgaagtcgaagtctgctgttccaacctcaattatctgaaatacgggttgctgacgcgcaagactgccggcaatacgggggaaggcggcaacggcagcccaaccgccgcccaaacggacgcgcaaagtatgttcctccaaggcgagcgcaccgatgaaaaagagattccaaaagagcaaaacgtcgtttatcgggggtcttggtacgggcatattgccaacgacacaagctggagcggcaatgcttcagataaagaggtaggcaacagggcggaatttactgtggattttgccgataaaaaaattaccggcaagttaaccgctgaaaacaggcaggcgcaaacctttaccattgagggaatgattcagggcaacggctttgaaggtacggcgaaaactgctgagtcaggttttgatctcgatcaaagcaataccaccggcacgcctaaggcatatatcacagatgccaaggtaaagggcggtttttacgggcccaaagccgaagagttgggcggatggtttgcctatccgagcgataaacaaacgaaaaatgcaccagatgcatccggcaatggaaattcagcaagcagtgcaactgtcgtattcggtgcgaaacgccaacagcctgtgcgataa

SEQ ID NO: 38576 - DNA, 921 bp, Neisseria meningitidis
atgagaatcaggctggggcggcacaacgcgcccgactttccgcacggggccgccgtaaccataggcaattttgacggcgtacacctcggacacaaacacatcctccaaaaactccgcctcgaagccgatacgcgcggattacccgtcgtgaccgtcgttttcgaaccccaacccaaagaatttttcgcactccgcaccggcaggatgccaccgtgtcggatcagccccctgcgcaccaagctcgaattattggaaggcacaggctgtgtcgatgccgtctgggttttgcgtttcgatcaaaatttttccgaaatatccgcgcaagggtttatcgaccgcctgctgcgtcaaaccttgaatacgcgttatttgctcgtcggcgatgatttccgtttcggtgcggggcgggaaggctgttttgaacttttggcacaacagcccgatatgcagaccgagcgtacgccttccgtcatcgtcgaagacatccgcaccagcagtaccgccgtgcgacaagccctttcagacggcaaccttgcctatgcgaaaaaacttttgggacacgactacgtcttgagcggcagggtggtgcacggcagaaaactcggacgcaccttaaacgccccgactgccaacatccgcctgccccgccaccgttatgcactcggcggcgtgttcgtcgtcgaagcggacggcgcattcggcacgcggcgcggcgtggcgagcttcggcttcaatcccaccgttgatagcggctgttctcaaaagcttgaagtccacctgttcgactttcaaggcgacctgtacggacaacggctgaacgtccgcttcctgcacaaactgcgcgatgaggaaaagtttgacggtatggaagaactgaaaaggcagattgaagccgatatggaagccgcaaagcgttggtag

SEQ ID NO: 38577 - DNA, 306 bp, Neisseria meningitidis
atgattaccttgacgcattatttggtattgggtgcgctcctgttcggtatcagcgcaatgggtatctttatgaaccgcaaaaacgtgctggtattgctgatgtcgatcgagctgatgcttttggcggtgaacttcaactttatcgccttctcgcaacatttgggcgatactgccggacaaattttcgtattcttcgtattgaccgttgccgctgccgaatctgccatcggtttggcgattatggtgctggtgtaccgcaaccgacaaacaatcaacgttgccgatttggacgagttgaaagggtaa

SEQ ID NO: 38578 - DNA, 1548 bp, Neisseria meningitidis
atgcagcttaatcctgctgaaattagcgatttgattaaagccaagatcgaaaatctgtctgtaaatgccgaagtgcgtactcgtggtacggtgatttcggtaactgacggtatcgttcgcatccatggtttgtcagatgcaatgcaaggtgagatgctcgaattcccgggtaacactttcggcttggcgatgaacctggagcgcgactccgtcggcgccgtagtgttgggcgagtacgaacatattaaagaaggcgacacggttacctgtaccggtcgtatcttggaagtgccggtcggacgcgaactggtcggacgcgtcgttgatgcattgggtcggcctatcgacggcaaaggcccgattaatacaactttgaccgcccctatcgaaaaaatcgcaccgggcgtgattgcgcgcaaatcggttgaccagccgatgcaaaccggtctgaaggcgattgactctatggttcctgtcggtcgcggtcagcgtgagttgattattggcgaccgtcaaaccggtaaaacggccgtagcattggatgccatcgtcaaccaaaaaggtacgggtgttatctgtatctatgtcgctatcggtcaaaaagcatcttctattgccaacgtggtccgcaaattggaagagcatggcgcgatggaacacacgattgtggttgctgcaactgcatctgaagcggcggcattgcaatatatcgcaccttactccggttgtacgatgggtgaattcttccgcgatcgtggcgaagatgccttgattgtttatgacgatttgtccaaacaggctgtggcttaccgtcaaatttccctgcttttgcgccgtccgcccggccgcgaagcctatcctggcgatgtgttctacctgcactcccgtctgttggaacgtgcggcacgtgtcaatgaacacgaagtggagaaattgaccaacggcgaagtaaaaggcaaaaccggttctctgaccgcgttgccgattatcgaaacccaagcgggcgacgtatctgctttcgttccgactaacgtcatttcgattaccgacggtcagattttcttggaaaccgacctcttcaacgccggtatccgtcctgcaatcaatgccggtatttccgtatcccgcgtaggcggtgctgcacaaaccaaagtgattaaaaagctgggtggcggtatccgtttggcgttggcacaatatcgtgaattggcggcgttctcgcaatttgcatccgatttggatgaagctacgcgcaaacaattggagcatggcgaagtcgtaaccgaactgatgaaacagaaacagttcagtacgttgaatacggctgaaatggctttgaccctttgggcaatcaacaacggttcgtattctgatgttccggttgctaaagctctggcttttgaatctgaatttttgagctttgtccgtacccaacatccggaagttttggaagccgtcaatgcttcaggtgcaatgtccgacgagagcgagaaaacgcttgaagcagccatgaaatccttcaaatcttcttacgcctatcaggcataa

SEQ ID NO: 38579 - DNA, 174 bp, Neisseria meningitidis
atgagtttcggacgacgtaatacggattggcaggcttggggacaacaccgcaggcgtgcgacggcgcgaatggcgcaaaaaagccgggagcgcgaaatcgaggaatatcaggcgcagtttgaagataaggacggcaaaggtcgtctgaaaacggaaggaaacaaagatgaatga

SEQ ID NO: 38580 - DNA, 810 bp, Neisseria meningitidis
atgattgattttgacaaaccggctgaagaagacgccatttatcaaagtcgtttgaaaaaaatcgtttcagacgaccttgtcctctacaacgaaaattcccttaacgtcatgcggaagatattggaaaaatatccaaacggctgttttgatatgattttctcagacccgccttactttctttccaatgacggcttcagttgtcaaaacggacaaatggtttccgtcaataagggcaactgggataaatccaaaggaatggcggcagatttggaattctacgaagaatggctccgactgtgttacgccttattaaaaccaaacggcacaatttgggtttgcggcacattccataatatttatttaatcggctacctgatgcaaactatcggataccatattttgaacaatattacttgggaaaaacccaatcctccccctaatttgtcctgccgtttttttacccattcgacagaaacaatcttatgggcaaagaaaaataaaaaagccaaacacacgtttcattatgaaatgatgaaagcacaaaatgatggcaaacagatgaaatgtgtttggacatttcctcctccaaacaaagccgaaaaaacattcggcaaacatccgacacaaaaaccactccccttgcttgaacgctgcatactctcagcttcaaacatcggagatttaatttttgaccctttcatgggcagcggcacaacaggcgttgccgccttaaaacatggtcggaaattttgtggttgcgaactggaagaagatttttttgaattagcaaaaaaaaggttagaaaaatga

SEQ ID NO: 38581 - DNA, 1092 bp, Neisseria meningitidis
atgagtttgaaatgcggcatcgtcggtttgcccaacgtcggcaaatccaccctttttaacgcgctgacccaatcgggtatcgaagcggcaaactatcctttctgtaccatcgaacccaacgtcggcatcgtcgaagtccccgatccgcgtatggccgaattggcaaaaatcgtcaatccgcaaaaaatgcagcctgccatcgtcgagtttgtcgatattgccggtttggttgcaggcgcgagcaaaggcgagggcttgggcaaccagttccttgccaacatccgcgaaaccgatgcgattgtgaatgtcgtgcgctgctttgacgacgacaacatcgtccacgtttccggcaaagtcgatccgattgccgacatcgaaaccatcggtacagagttggcgcttgccgacttggcaagtgtggaaaaagccatcgtccgcgaagaaaaacgcgcccgttccggtgacaaagacgcgcaaaagctggtcgatttgtgcaaaaaactgctgccgcatctggacgaaggcaaacccgtgcgttccttcggtttggacgcggaagaacgcgcgatgctcaaaccgctgttcctgctgaccgccaaacctgccatgtacgtcggcaacgtttccgaagacggttttgaaaacaacccgcacctcgaccgcctgaaagaattggcggcaaaagaaaacgcccccgtcgtcgccgtgtgcgccgcgatggagagcgaaatcgccgagttggaagacggtgaaaaagccgagttcctcgccgaaatgggcttggaagaaccgggcctgaaccgcctgatccgcgccggttacgaccttttggggctgcaaacctacttcactgccggcgtcaaagaagtccgcgcgtggacgatacacaaaggcgacaccgccccgcaagccgccggcgtgattcatacggattttgaacgcggcttcatccgcgcccaagtgattgcctacgatgattttgtctcgctcggcggcgaagccaaagccaaagaagccggcaaaatgcgtgtggaaggcaaagaatacgtcgtgcaggatggggatgtgatgcactttttgtttaacgtgtaa

SEQ ID NO: 38582 - DNA, 1302 bp, Neisseria meningitidis
atgccgtctgaacatcaacacacatcatcattacttgatttcgaccgtacccatctgctccatccctatacttccatgaccgatccgcttcccgtttatcctgtcaaacgtgcagaaggggtgtttatcgaattggcggacggcacgcggctggttgacgggatgtcgtcctggtggtgtgcgatacacggttacaatcatcctgttttgaatcaggcggttgagacgcagattaaacaaatgtcgcatgtgatgttcggcggtttgacgcatgagcctgcggtggagctgggtaaattgttggttgggattttgccgcaggggttggaccgtattttttatgcggattcaggttcggtttcggtggaagttgcgttgaaaatggcggtgcaataccggcaggtgcgggggttgacggcgaagcagaatattgcgacggtgcggcgcgggtatcacggcgatacttggaacgcgatgtccgtctgcgatccggaaacggggatgcaccatattttcggcagcgcgttgccgcagcgttattttgtcgataacccgacaagccgtttcgacgatgaatgggacgaggcggatttgcagcctgtccgcgccttgtttgaagtgcatcatgcggatattgccgcctttattttagagccggtcgtgcagggcgcgggcggcatgtatttttatcatccgcagtatcttcgcggattgcgcgatttgtgcgacgagtttgatatcgttttgatttttgatgaaatcgccaccggattcgggcgcacgggcaagatgtttgcctgcgaacacgcggaggtcgtgccggatattatgtgcatcggcaagggtttgagcggcggctatatgacgctggcggcagcaatcacttcgcaaaaagttaccgaaacgatttcgcgcggcgaagcgggcgtgtttatgcacggcccgacgtttatggcaaacccgctggcgtgtgccgttgcctgcgcttcggtcaaactgcttttgtctcaagactggcaggcaaatatccgccgcattgaaagcatcttaaaaggccgtctgaaagccgcgtgggacattcgcggcgtgaaagacgtacgcgttttgggtgccatcggcgtgatcgagctggataaaggcgtggatatggcgcgttttcaagcagattgcgtggcgcagggcatttgggtgcgcccgttcggcaggctggtatatctgatgccgccgtatattatttcagacggcgttttgaccaaacttgccgacaaaaccgtgcaaatcttgaaggaacacagcaaatga

SEQ ID NO: 38583 - DNA, 606 bp, Neisseria meningitidis
atgatgaccctctattccggcattacctgccccttcagccaccgctgccgcttcgttttgtacgaaaaaggcatggattttgaaatcaaagacgtcgatatttacaacaagcccgaagacctcgccgtcatgaacccgtataaccaagttcccgtgctggtcgagcgcgatttggtactgcacgagtccaacatcatcaacgaatacatcgacgaacgcttcccccatccgcagcttatgcccggcgatcccgttatgcgcggcaggggccggctggtgctgtaccgtatggaaaaagaattgttcaaccacgtccaagttttggaaaaccccgccgccaccaacaaggaacaggcaaaagcgcgcgaagccatcggcaacggtctgaccatgcttgccccttcgttcagcaaaagcaaatacattctcggcgaagatttttctatgattgatgtcgcccttgccccgctgctgtggcggctcggccactacgatgtcaaactgggcaaaagtgccgcgccgctgctcaaatacgccgagcgcatcttccagcgcgaagcctttatcgaagcactgacacccgccgaaaaagccatgcgcaaataa

SEQ ID NO: 38584 - DNA, 1239 bp, Neisseria meningitidis
gtgattgcatcgctgacgggcgcggccgtgggcggcacgccggtagatgcgcaaaccggaggtgcggtcggacagaatgcggtggaaaacaacctctatctgacatcggaagccttaaagaaggacaagcagacagctcgtaaaatttattccgtcataaaagagcaagtcaagcatgaatgcagttccacaggaagaattaccgaatgtcgtcaaaatataggacgcattatcgaatttacccaagacaaacgctttgacagtaggtttaaggacttaaaaaaagaatccttatattacctaaataaacatcctgatttagtagcctcttatttgaaggctgaatacgaaaagctggatagggaagacaaaagtatcctgcaccgctacatctcacccggggctgaaatcgtttcgggcagtttgggggttgttctttcaggagtagccggaggcggatcttgtgccgagactttcggcttaggctgtgccgccgctttggttggtgtaacgtcttcctacgatcatgtcattactgggacgaaaaacttcggaaaaaaagccagcgagcaacgaccgacgattgcggttcaggccttgaagcagttggggctgtcggagcaggctgcggaatatgttcagttctctatagatttgttcagtgtgggtaaatcggggggcggtatacctaaggctaagcctgtgtttgatgcgaaaccgagatgggaggttgataggaagcttaataaattgacaactcgtgagcaggtggagaaaaatgttcaggaaacgagaagaaggagtcagagtagtcagtttaaagcccatgcgcaacgagaatgggaaaataaaacagggttagattttaatcattttataggtggtgatatcaataagaaaggcacagtaacaggagggcatagtctaacccgtggtgatgtacgggtgatacaacaaacctcggcacctgataaacatggggtttatcaagcgacagtggaaattaaaaagcctgatggaagttgggaggtgaaaacgaaaaaaggtgggaaagtgatgaccaagcacaccatgttcccaaaagattgggatgaggctagaattagggctgaagttacttcggcttgggaaagtagaataatgcttaaggataataaatggcagggtacaagtaaatcgggtattaaaatagaaggatttaccgaacctaatagaacagcatatcccatttatgaatag

SEQ ID NO: 38585 - DNA, 933 bp, Neisseria meningitidis
atgctctcacaactggagtatggcattgcgaaggaaaacagaccgaaccggcaggcagaccgctttgccggttcggttttaccgcttgccgccagtctgacccacaagccgaacatcatgaaacccataccgaccgacacattccaacctgccatactgccccaagcctttgaaaccgaaatcaaatccacctgcacggggcgaatctatcggattcagacggcgacactcggcgaaatgccgtctgaaggctatcccgtcctcttcgttttggacggcgaagcctttttccccgcacttttcaacatcatgcagtcgctgatgcccaaccccgttacccgaagcaacgccccctgcctgattgtcggtatcggctacacgacaggcagtgtgcgcgatttggcacaacgtgccgccgactacacgccgccgcttggagacaacgccacagcagacgaacggcagcagttcggacaggcagaccgcttcgccgcctttatcgacagcgagctgaccgcctttttagaaagccgctacaccctcaaccgcaatgaaaccgccgtattcggacactcgttcggcgcactgttcggactgtattccctgctttcccaccgccgtttcagacggcattggctcgtatccccatcgatttggtggcacaacaggcggatactcgactttatgccgtctgaaaaccggctaaacggcatcgatgtctgcctcaacatcggcgcgctagaacggggtagcgattgtaaacgcagggaagaacgcgatatggcagggcaggccgaacaaatggcggcagagttagacaggcacggggccgccgtctttttccgggaatatccgaatgccgaccacggcaatgtcccgttctactcgctgaccgattgcgtcgaatatttgaggaaggcttggcagaggtag

SEQ ID NO: 38586 - DNA, 1194 bp, Neisseria meningitidis
atgttcttcaagcacatcgaagccgcccccgccgatccgattctcggtttgggcgaagcgttcaaagccgaaacccgccccgaaaaagtcaacctcggcatcggcgtttataaagacgcatccggcgcgacacccctcgtcaaagccgtcaaagaagccgaaaaacgcctgttggaaagcgaaaccaccaaaaactacctcaccatcgacggcgttgccgactacaacgcgcaaacccaaatcctgctgttcggcaaagaccacgaaatcatcgccagccgtcgcgccaaaacagcgcaaagcctcggcggtacgggcgcattgcgtattgcggccgagtttgccaaacgccagttgaacgcgcaaaccatctggatttccaatccgacttggcccaaccacaacgccatcgccaaagcggtcggtatccaagacaaaccttatcgttactatgatgccgccaaacacggtttggattgggacggcatgattgaggacttgagccaagcgcaaaaaggcgacatcgtcctgctgcacggctgctgccacaatcctaccggcatcgaccctacgcccgaacaatgggaaactttggcaaaactttctgccgaaaaaggctggttgccgctgtttgactttgcctaccaaggcttcggcaatggtttggaagaagatgcctacggcttgcgcgtgttcttgaaacacaatacagaattgctgattgccagctcttattccaaaaacttcggtatgtacaacgagcgcgtcggcgcgttcactttggtggccgaagatgaagaaacagcagcccgcgcccacagccaagtcaaaaccatcatccgtaccttgtattccaacccggcttcacacggtgcgaacaccattgcgctggtgttgaaaaatgatgatttgaaagcccaatggattgccgaactcgatgaaatgcgcggccgcatcaaagccatgcgccaaaaatttgttgcgttgctcaaagccaaaggtgcaagccaagactttgatttcattatcgaacaaaacggtatgttctctttcagcggtctgactcccgaacaagttgaccgtttgaaaaacgagtttgccatttatgccgtccgctccggccgcatcaacgttgccggcattaccgacgacaacatcgattatctgtgcgaaagcatcgtgaaagtactgtaa

SEQ ID NO: 38587 - DNA, 906 bp, Neisseria meningitidis
atggacattctggacaaactggtcgatttcgcccaattgacgggcagtgtggatgtgcagtgccttttgggcggacaatggtcggtacggcatgaaaccttgcaacgcgaaggattggtacacattgttacatcgggcagcggctatctctgcatcgacggcgaaacttccccgcgtccggtcagtacaggggatattgtatttttcccgcgcggcttgggtcatgtgttgagccacgacggaaaatgcggagaaagtttacaaccggatatgcggcagcacggtgcgtttacggtcaagcagtgcggcaacggacaggatatgagcctgttttgcgcccgtttccgctacgacacccacgccgatttgatgaacgggctgcctgaaaccgtttttctgaacattgcccatccgagtttacagtatgtggtttcaatgctgcaactggaaagcaaaaaacctttgacggggacggtttccgtggtcaacgcattgtcgtccgtcctgctggtgcttatcctgcgcgcctatctcgaacaggataaggatgtcgaactctcgggcgtattgaaaggttggcaggacaaacgtttgggacatttaatccaaaaggtgatagacaaaccggaagacgaatggaatgtcgacaaaatggtggcggctgccaatatgtcgcgcgcgcaactgatgcgccgtttcaaaagccgggtcggactcagcccgcacgcctttgtgaaccatatccgcctgcaaaaaggcgcgttgctgctgaaaaaaaacccggattcggttttgtcggtcgcactgtcggtaggctttcagtcggaaacgcacttcggcaaggcgttcaaacggcaatatcacgtttcgccgggtcaataccggaaagaaggcgggcaaaaataa

SEQ ID NO: 38588 - DNA, 375 bp, Neisseria meningitidis
atgattattcaaaatgaatttaatttatatcctagtgatatgcttcctgaaaggttttgttatcctgaaaagtatgttcgtatctctaacgatacatctttaataccttatattcagccacataattttcactggtggtttgagaattatggaacagaaggggcagaagtaacttatatatttagaaattctatcctgcctgatttaaatcttatcccattcgctagtaatggagaatgggaagcttattttgatggtaatgatgtaacaggaaatcctagggttattgtcattaatttagataatatagaaaaccatgaattttttaatagttttgaagagtggcttgaattagcaattaaggatacttggtaa

SEQ ID NO: 38589 - DNA, 1254 bp, Neisseria meningitidis
gtggacaaactgaaaatctccgcaaacggcccactcaacggggaaataacggtctcgggcgcgaaaaacgcggcattgccgctgatgtgcgcgggtttgctgacatcgggtacgttgcgcctgaaaaacgtccctatgctggcagatgtgaaaaccacgcaaaagctgcttcaggggatgggcgcgcgcgtcctgaccgacaatatcagcgaatttgaaattaacggcggcacggtaaacaatacctgcgccccttacgaattggtacggacgatgcgcgcctcgattttggtgctgggcccgacgctggcgcgtttcggcgaggcgcaagtcagcctgccgggcggctgcgccatcggttcgcgccccgtcgatcagcatttgaagggcttggaagcgatgggggcggaaatcgtcatcgaacacggttacgtcaaggccaaaggcaaactcaaaggtacgcgcgtggcgatggatgtcgttaccgtcggcggcacggaaaacctgctgatggcggcgactctggcggaaggtacgacggttttggaaaactgcgccatcgagcccgaggtggtcgatttggcggaatgcctggttaaaatgggcgcgaaaatcagcggcatcggaacatcgaccatgatcgtggaaggtgtggacgagctgcacggctgcgaacacagcgtcgtccccgaccggatcgaggcggggacgttcctgtgcgcggtggcgataaccggtggcagggtggttttgcggaatgccgcgccgaaaacgatggaagtggtgttggacaaactggttgaggcaggtgcggtgattgaggcgggcgacgattggatcgccatcgatatgcggcagcgtccgaaggcggtggacatccgcacggtcgtccaccccggcttccccacggatatgcaggcgcagtttatggcattgaatgccgtggcggagggaagctgccgcgtggtggaaacgatttttgaaaaccgctttatgcacgtccccgagttgaaccggatgggggcgaacattacaaccgagggcaatacggcatttgtgcagggtgtggaacggctttccggcgcagtcgtcaaggcgacggatttgcgtgcgtccgcaagcctcgttatcgccggtttggcggcgcgcggcgaaaccgtggtcgaacagatttaccacttggatcgcggttatgaaaatattgaaaaaaaactcggcagcgtcggcgcgaaaatcgagcgcgtatccggctga

SEQ ID NO: 38590 - DNA, 270 bp, Neisseria meningitidis
atgactgaaacattccgatggcgtgttgcttcggacaataaggctgtacataaattcgatgtccgttccgtccgctttggcgacggctacgagcaacggcagcctaaatctttgaaaccgaagctgcgaagctgggagattaagatagtcggacaaaaggctttgatgggagaaatcaaagccttttttgatgcccggcgcggtgttgagccgtttaattggagaccgcccgacggcgtgcctgtattggtcaaggtatcggaatattag

SEQ ID NO: 38591 - DNA, 822 bp, Neisseria meningitidis
atgtctttgcaaaacattatcgaaaccgcctttgaaaaccgcgcggacatcaccccgtccactgttgctcccgaagttaaagaagccgtgttggaaaccatccgccaactcgattccggcaaactgcgcgttgccgaacgtttgggcgtgggcgaatggaaagtcaacgaatgggcgaaaaaagccgtgttgctgtccttccgcatccaagacaacgaagtcctcaacgacggcgtgaacaaatacttcgacaaagtgccgaccaagtttgccgattggtctgaagacgagttcaaaaacgcaggcttccgcgccgttccgggtgcggttgcccgacgcggcagctttgttgccaaaaatgtcgtgctgatgccgtcttatgtcaacatcggcgcatacgttgacgaaggcgcgatggttgatacttgggcgaccgtcggctcttgcgcgcaaatcggtaaaaacgtccacttgagcggcggtgtcggcatcggtggcgtactcgaacccctgcaagccagcccgaccattattgaagacaactgcttcatcggtgcgcgttctgaaatcgttgagggcgtgattgtcgaagaaggcagcgtgatttcgatgggcgtgttcatcggtcaatccaccaaaatcttcgaccgcaccaccggcgaaatctaccaaggccgcgtaccggcaggttcggtcgtcgtgtccggcagtatgccttccaaagacggcagccacagcctttactgcgccgtcatcgtcaaacgcgtggacgcgcaaacccgtgcgaaaaccagcgtgaacgaattgttgcgcggcatctga

SEQ ID NO: 38592 - DNA, 195 bp, Neisseria meningitidis; identical to SEQ ID NO: 38181

SEQ ID NO: 38593 - DNA, 969 bp, Neisseria meningitidis
atgaacgagaaaaccatcatccttgccaatccgcgcggcttctgcgctggtgtggatcgggcaatcagtattgtcgaacgtgctttggaagagttcggcgcgccgatttatgtgcgccacgaagtcgttcacaacaaattcgtcgtggacaacctgcgtgaaaaaggtgcggtgtttattgaagacttggcggaagtgccgccgggcgcgacactggtttattcggcacacggcgtatcgaaggcggtgcggcaagaagcggcggagcgcggtttccgcgtgtttgatgcgacttgcccgctggtgacgaaagtgcataaggaagtcgcccgactggatgcccaagactgtgaaatcatcatgatcgggcataaggggcacgtcgaggttgaaggaacgatggggcagcttgcgccgggcaaaatgcttttggtcgaaacggtcggagatgtggcaaaactcgaagtcagaaaccccgacaaactcgcctatgtcagccaaaccacgctctcggtcgatgaaaccaaagacatcatcgccgcgctgaacgcgcgtttccccaatatccgcaatccgcacaaggaagatatctgctatgcgacgaccaaccggcaaaccgccgtcaaagagttggcagaacagtgcgacatcgtgattgtggtcggttcgcccaattcgtccaacagcaaccgcttgcgcgaagtggcggcatcgcgcggaatcgatgcgtatatggtggataatgcaggctacctgcaacgcgcatggtttgagggcaaaaacaaagtcggcgtaacggcaggcgcgtccgcgcccgaagtgttggtgcgggaagtactggcaaccatacgcggatgggggcacgaaaccgtacgcgaaggcgagggtgaggaagaaagcattgtgttcgtcctgcccaaagagctgcgccgcgagggcgaaaccaaacccgatttgtgcaaacgttga

SEQ ID NO: 38594 - DNA, 465 bp, Neisseria meningitidis; identical to SEQ ID NO: 38444

SEQ ID NO: 38595 - DNA, 660 bp, Neisseria meningitidis
atgtcaaaccaaaaagccttggtcatcttttcgggcggtcaggattcgaccacctgcctgattcaggcaatccaaacctacgggcgcgaaaacgtccaagccattactttccaatacgggcaacgccatgccgtcgagctggaacgtgcccgctggattgcgcaggatttgggcgtcaaacaaaccgtactcgacttgagcctgatgcggcagattacgcacaatgccctgatggacgacaccgccgccatcgaaactgccgaaaacggcgttccgaatacctttgtagacggccgcaacgcgcttttcctgctctatgccgcgatttacgccaaagggcaggggatacggcacatcatcgcgggcgtgtgcgaaaccgacttctccggctatcctgactgccgcgacgtgttcgtcaaatccatgaacgttacccttaatttggcgatggactatgatttccaaatccacacgccgctgatgtatctgaccaaggcgcaaacgtgggcgttggcggacgaaatgggcgtgctggactatatccgcgagcaaacccacacctgctataacggcatcgtcggcggctgccgcgaatgcccgagctgtatcttgcgcgaacgcgggctggcggaatatctggaaagtaaaaaggccgtctga

SEQ ID NO: 38596 - DNA, 873 bp, Neisseria meningitidis
atgagctggttagataaaatcctgccacccaaaatcaagaatcgcggaaaagacggttcttccaatgttcccgagggtctatggcacaaatgcccgtcttgttcggcaaccgtttattctaccgagttgcagcagaacaatcaggtttgtccgaaatgcaaccaccacaatccgttgtcggcacgacaacgcctgaatctgcttttggatgaggatggcagagaggagattgccggaaatgtcaaaccgaccgatcctttgaagtttaaagacagcaaaaaatatccggatcgtttgagtgcggcacgcaagctgaccggggaagatgatgctttggtggtaatgaaaggcaagatgaacggtctgcccgtcgtcgttgccgcgtttgaattccgctttatcggcggttcgatgggttcggttgtgggcgaacgattcgtacaaggtatccgtcgggcggttgccgacaattgtccgttcgtctgtgtggcggcttccggcggtgcgcgtatgcaggagggtgtgaactcattgatgcagatgacgaaaaccagtgccgcgctgcatttgctgacggaaaaacgcctgccatttatatcggtgttgaccgatccgactatgggcggcgtatccgccagcttcgcatttttgggcgatgtcgtgcttgccgaaccgaacgcgctgatcggttttgccggtccgcgcgtgattgagcagacggtgcgcgaaacgctgccggaaagcttccaacgcgccgagttcctgctggaaaaaggcgcaatcgaccagattgtcgaccgccgcgatatgaagcggcgcatcagtgatttgattacgctgttgtgccgtcaggacaaagtttccgccgcttga

SEQ ID NO: 38597 - DNA, 561 bp, Neisseria meningitidis
  misc_feature 542, 543, 544, 545, 546: 'n' is a, c, g or t
atgaaagcattacttttaggcgcgccgggcgcgggcaaaggcactcaggcgcaattcatcaccgccgcgttcggcattccgcaaatctctaccggcgacatgctccgcgccgcgattaaggctggcacgcccttgggtttggaagcgaaaaaaatcattgacgaaggcggcttggtgcgcgacgacatcattatcggcatggtcaaagaacgcatcgcgcaagacgactgcaaaaacggtttcctgttcgacggtttcccgcgcacattggcacaagccgaagcgatggttgaagcaggcgtggatttggatgcagtcgttgaaatcgacgtgcctgacagcgtgattgtcgaccgtatgagcggccgccgcgtgcatttggcttccggccgtacttaccacgttacctacaacccgcccaaagttgaaggcaaagacgacgtaaccggcgaagatttgattcagcgcgacgacgacaaagaagaaaccgtgaaaaaacgccttgccgtttaccacgagcaaaccgaagttttggtcgattnnnnncacacacttaattaa

SEQ ID NO: 38598 - DNA, 324 bp, Neisseria meningitidis; identical to SEQ ID NO: 36328

SEQ ID NO: 38599 - DNA, 552 bp, Neisseria meningitidis
atgaaggttttgaacggttggtcggacaggaagatgtggcgggttttgagtgctttgccgataggcgtggtgttttttgatttgatctacggttttgtgttgaatgtgttgcagggtttggatttgcagcgtgccgtgccggattcggaaggcgtgttggcggttacgcccgatattgcattcaacagtttgcagattgtcgccaacggcggtatggcggcggtggtctgtttcgggttggcggttgtgtttttgctcaaccgttcggtgcggcggcggcaggtgttggaaatcggggtgttccggatgttggggctggtggcggtattggcgttcagcgcgccgtcggtgtgggagtgggcgaacgcgctgccgctgctgctgaagggcgcggacgtggtcaatacggggaatgcgcgttatgtgctgacggctttgtgtatgccctttccggcggtgtcgtgcgtcatcgggctggtggggcggttcaggcttcagacggcatcgggcagggcggcaaaggcagggggtgcggtcaaggcgggcggatag

SEQ ID NO: 38600 - DNA, 684 bp, Neisseria meningitidis
atgccgtctgaaaaatgttcagacggcatttcttataaccttttgtttgcagcacataaccaatcagtctttcctattccgttccgaaatgcataccatgcgcccgtacccaatatttgcgaacaaggaaagaaaatggcacgtttaaccgtacacaccctcgaaaccgcccccgaagccgccaaagcgcgcgtcgaggcggtacttcaaaacaacggctttatccccaaccttatcggcgtattatcaaacgcccccgaagccttggcgttttaccaagaagtcggcaagctcaacgccgccaacagcctgaccgctggcgaagtcgaagtcatccagatcatcgccgcccgtaccaaccaatgcggtttttgcgtggcagggcacaccaaactcgcaaccctgaaaaaactcctgtccgaacaatccgtcaaagccgcgcgcgctttggcagcaggcgaatttgacgatgccaaactcggcgcgctcgccgccttcacccaagccgtaatggcgaaaaaaggcgcggtatccgatgacgaactcaaagcatttttcgacgcgggctacaaccagcagcaggcagttgaagtcgtgatgggcgtagccttggcaactttgtgcaactacgtcaacaacctcggacaaaccgaaatcaaccccgaattgcaggcttacgcctga

SEQ ID NO: 38601 - DNA, 2157 bp, Neisseria meningitidis
atgtcagttttccgcatcaatatgaccgccgccacggttttggcagcactttcgtcttcggtttttgccgcacaaacggcggatttggaaaccgtccatattaagggtcagcgttcgtacaacgcgattgccaccgagaaaaacggcgattacagctcgtttgccgccaccgtcggcacaaaaatccccgcttctttgcgcgaaattccgcaatctgtcagcatcatcaccaatcaacaggtcaaagaccgcaatgttgatacgtttgaccagttggcacgcaaaacgcccggcctgcgcgtgttgagcaacgacgacggacgctcttcggtttacgcgcgcggttacgaatacagcgaatacaacatcgacggcctgcccgcgcagatgcagagtatcaacggcacgctgcccaatctgtttgccttcgaccgtgtggaagtgatgcgcgggccgagcggcttgttcgacagcagcggcgagatgggcggcatcgtaaatctggtgtgcaaacgcccggccaaagcgttccaaggtcatgctgcggcagggttcggtacgcacaaacaatataaagccgaggcggacgtatcgggcagcctcaattcagacggcagcgtgcgcggccgcgtgatggcgcagaccgtcggcgcgtctccgcgtcccgccgagaaaaacaaccggcacgaaaccttctacgcggcggcggattgggacatcaaccccgatacggttttgggcgcgggctatctttaccagcaacgccacctcgcgccgtacaacggcttgccagccgatgccaataacaaattaccgtccctgccgcaacacgtatttgtcggcgcggattggaacaaatttaaaatgaacagccacgacgtgtttgccgatttgaaacattacttcggcaacggcggctacggcaaagtcggtatgcgctattccgaccgcgatgccgactccaactatgcctttgccggcagcaagctgggcatgaaaaccctggcaggccgcccgggctgcaatacggctgacgacaaagcctgcgcggtgggtttgggtacagaaatcaaacaaaaagccctcgcgtttgacgccagctacagcaggcctttccgcttgggcaatacggccaacgaatttgtcatcggcgccgattacaaccgcttccgcagcaccaacgaacaaggccgtactactttatatgcacgcggcggcctggctttaaacgagttccgcagcataccgcaggttgatttgattgccaacgcgcgcaaaggcgtgcgcggttacagccataccgtcgctaccgaaaacctcgacgaattcggcatttacggcaaatccaccttccatcctgccgacgggctgtcgcttatcggcggcggacgtttgggacactataaaatcgagtcgggcgaaggcaaaaccctgcacaaagccagcaaaaccaagttcaccggctacgcaggcgcggtttacgacttgaacgacaacaacagcctctacctgagcctgtcccagctctacacaccgcaaaccaacctcgatgccgacggcaagctgctcaaaccgcgccaaggcaaccagtttgaagtcggttacaaaggcagctacatggacgaccgcctcaatgcccgagtttcgttctaccgcatgaaagacaaaaacgccgccgcaccgttgaacccgaacaacaaaaaaacccgttacgccgcattgggcaaacgcgtgatggaaggcgttgagaccgaaatcagcggcgcggttacaccgaaatggcaaatccatgcaggttacagctatctgcacagccaaatcaaaaccgcctccaattcacgcgacgacggcatcttcctattgatgcccaaacacagcgcaaacctgtggacgacttaccaagttacgcccgagctgaccatcggcggcggcgtgaacgcgatgagcggcattacttcatctgcagggatgcatgcaggcggttatgccacgttcgatgcgatggcggcataccgcttcacgcccaagctgaagctgcaaatcaacgccgacaacatcttcaaccgccattactacgcccgcgtcggcggcgcgaacacctttaacattcccggttcggagcgcagcctgacggcaaacctgcgttacagtttttaa

SEQ ID NO: 38602 - DNA, 516 bp, Neisseria meningitidis
atgaaatcaaaactccccttaatcctaatcaacttttccctgatttcaagcccattgggtgcgaatgcggccaaaatctacacctgcacaatcaacggagaaaccgtttacaccaccaagccgtccaaaagctgccactcaaccgatttgcccccaatcggcaactacagcagcgaacgctatatcccgccccaaacgcccgaaccggtatcatcaccgtcaaacggcggacaggttgtcaaatataaagccccggtcaaaacagtatccaagccggcaaaatccaatacgccgccgccgcaacaagcaccctcaaacaacagcagacgctccattctcgaaacagaattgagcaacgaacgcaaagcattggttgaagcccaaaaaatgttatcacaagcacgtctggcaaagggcggcaacatcaaccatcaagaaataaatgcattacaaagcaatgtattggacaggcagcaaaatattcaagccctgcaaagggaactggggcgtatgtaa

SEQ ID NO: 38603 - DNA, 1170 bp, Neisseria meningitidis
atgccgcaaattaaaattcccgccgtttactaccgtggcggtacatcaaaaggcgtgtttttcaaacgttccgacctgcccgaggcggcgcgggaagcgggaagcgcacgcgacaaaatcctcttgcgcgtactcggcagcccggatccctacggcaagcagatagacggtttgggcaacgccagctcgtccaccagcaaggcggtgattttggacaagtccgaacgcgccgatcacgatgtcgattaccttttcgggcaagtttccatcgacaaaccttttgtcgattggagtggcaactgcggcaacctcaccgccgccgtgggcgcatttgccatcgagcaaggcttggtcgataaaggcaagattccttcagacggcatctgcacggtcaaaatctggcagaagaacatcggcaaaaccattattgcccatgtaccgatgcaaaacggcgcagttttggaaacaggcgattttgagctcgacggcgtaacgttcccggcagccgaagtacaaatcgaatttcttgatccagccgacggcgaaggcagtatgttcccaaccggcaatttggtcgatgaaattgatgtgccgaatataggccgtttgaaagccacgctcatcaacgcgggcattccgaccgttttcctgaatgccgccgacttgggctacacgggcaaagagttgcaagacgacatcaacaacgatgccgcagctttggaaaaattcgagaaaatccgcgcttacggtgcgctgaaaatgggtctgatcagcgacgtatccgaagctgccgcccgcgcgcacacgccgaaagtcgccttcgtcgcgcccgccgccgattacaccgcctccagtggcaaaaccgtgaacgccgccgacatcgatttgctggtacgcgccctgagcatgggcaaattgcaccacgcgatgatgggtaccgcctctgttgccattgcgaccgccgccgccgtgcccggtacgctggtcaaccttgcctcaggcggcggaacgcgtaaagaagtgcgcttcgggcatccttccggcacattgcgcgtcggtgcagccgccgaatgtcaggacggacaatggacggccaccaaagcggtcatgagccgtagcgcacgcgtgatgatggaaggttgggtcagggtgcctgaggattgtttttaa

SEQ ID NO: 38604 - DNA, 354 bp, Neisseria meningitidis
gtgaacagacaaaccgcttacctccttacctctttcagcctgatcgcactgataatcctgtcccttgcttgggaactgtggattgcaccgttacgcccgggcggttcgtggctcgcgctcaaagccctccccctctgtctgccgctttcaggcatcttgaaaaagaaaatctatacttaccaatacagctccatgctggttctgatttactttgccgaagccgtcatgcgcctgttcgacgcctatcccgcagaacaaatttgcgccgcgctttccgcagtattcagcatcatcttcttcatatcctgcctgtcgttcgtcaaacaatacaaggaaacaaacaatgcccgctga

SEQ ID NO: 38605 - DNA, 330 bp, Neisseria meningitidis; identical to SEQ ID NO: 37077

SEQ ID NO: 38606 - DNA, 573 bp, Neisseria meningitidis
atgacttatgaaattcaagcctctgttcgtgaagcacaaggcactggtgcgagccgccgcctgcgtcgcgaaggccaaatccccggcattctgtacggtgaaggtcaagagcctgttgcaatcgctgtggatcacaaaaccgtattctacgcattggaaaaagaatctttccatactgcgttgattaagttgtctctgaacggtgaaaccaaagacgttatcgtccgcgatttccaaatgcacccgttccgccgcgaagttcaacacatcgacttccaagctgtgaaagcagaccaacccgtacgcatccgcgttcccctgcacatcgttaacgctgaaaattcccaagcggtcaaactgcaaggcggccgcgtatctctgttaaacacttctgttgaagtagttgctttgcctgccaacatccctgctttcttggatttggattgtgccgaagtggttgccggtgacattttgcacttgtcagacatcaaattgcctgaaggtgtagaaagcgtttccctgaaacgtaacgaaaatctggctgttgccaccgttaccggtaagaaacgctaa

SEQ ID NO: 38607 - DNA, 207 bp, Neisseria meningitidis
atgtttacttttttaaataaaaatatatttatcaaaacaattgtacttggctgtttttattcctttttattttttagtttttttgtatctggtaagtcatttggttattcatttgaaatttttaatatggatacaagtgcgcttgcttttttaagtgtatatatgggcttttttataagcgtggctgtgcatatttacgatatttaa

SEQ ID NO: 38608 - DNA, 606 bp, Neisseria meningitidis
atgccgtctgaaatgcggatgtcccgattgatgttattgctgtcggcatttgtgcttgctgcgtgtaatgcccaaaaccggcaatccggtgtacggcatcaggatttcgcgcgtgtagccgtcgatttgtttcggagtgcctgcgtcctgactcaaggcagttttgaatcggtttccaagtttgccgctgtcggacattttgtccctgtcggaaaggaagacctgtcccatctgccgcccactgttgcagaacccgatgtacaggcgttgtggacgcttgaacgcgatggcggcatttattatttgagcctgacgcgcgacagttgcagtgtgaaagccgagcgggcagacagtgccgcgctgttggaacattttgacggacttgtccgacagccgccgaaaaatgccaatatagaattgagggcggaacagtcggtgcaggcatcatttgaaatccgccaagtcagctatgcctggcgggaagcaggcagctccgaagaaaccgtattgaccgcacaaaccgccgattccccggatttacccgtacaggcagttttgaacctgacgcaccgttcccacaacgggaaacccctaattctcccctaa

SEQ ID NO: 38609 - DNA, 513 bp, Neisseria meningitidis; identical to SEQ ID NO: 38230

SEQ ID NO: 38610 - DNA, 432 bp, Neisseria meningitidis
atgagcagcaacgcatggctgttttgggcattggcatcggcaggcttcgcctcattgaccgccgttttcgccaaaatgggtttacagggcatcgattccgatttcgccacctttatccgcaccttggtgatcctcgccgctttggtattgtttttgacctacaccggcaaatggcagggtgtgaacggctttacggggcgcaactggacattccttatcctatccggccttgctaccggcgcatcctggctcgcctacttcaaagccctgcaactgggcaacgcctcgcaagtcgcccccatcgacaaattcagcctggtcttggtcgcgctgatggcggtggttttcttggacgaacgcccgaacacgcaggaatggataggcttggggctggtaacggcgggcgtgttggtgctggcgttgaaacgttaa

SEQ ID NO: 38611 - DNA, 633 bp, Neisseria meningitidis
atggagaatacaaaccgtgtgccggagcaggcacgttatgatgccgaacgcaggcaggcagacgaagcattggcgggcgtgtttccggcagtcagtatcttcggcagcgcgcgcacgccgcagaatcatgcggattatgcgttcgcctgccgtctggcgcggcggctgtcggattcgggcattgccgtcatttcgggcggcgggccggggattatggaggcggcaaacaagggcgcgtttgccgggaagtcggtttcggtggggctgaacatcgttttgccgcacgagcagaaaccgaatccgtatcaggacatcgccttgcggttttcccgttttgccgaacgcaaggcggtgtttttccgctattcccaagcatatgtcgtgatgccgggcggcttcgggacgctggacgaattgtttgaaatcctgaccttggtgcagacgggcaaagtgccgccgcgtccgattgttttggtcggaaaggcgttttggtcgggcttggcggagtggataaacgcgcagcttttggcgtgcgggctgatttccgaaggggcggtctctttgtttgccatatcggacgatgaagacgaaatcgttgcgtatctgtcggaacacgggcttcagacggcatag

SEQ ID NO: 38612 - DNA, 2178 bp, Neisseria meningitidis
atgcaacaaaaaatccgtttccaaatcgaaggcatgacctgtcaggcatgtgcttcgcgcattgaaaaagtgttgaacaaaaaagactttgtcaaatcagcgggagtgaacttcgccagcgaggaggcgcaggttacgtttgacgacagcaaaacttccgctgccgacattgccaaaatcattgagaaaaccggttacggcgcgaaggaaaagacggaagatacattgccgcaacccgaagcagaacaccatatcggctggaggttgtggcttttgctggccatcaatatcccgttccttatcggtatggtagggatgatgctaaaagggctgaattggacacggcatgattggatgttgtcgcccttgttgcagtttgcattggcgagtgtggtgcaactttggctggcggtgccattttacaaaagcgcgtgggcgagcattaagggcggactggcgaatatggacgtgctggttaccatcggcacggtctcgatttacctgtattccgtctatatgctgtttttcagcccgcacgcggcgtacggtatggcgcatgtgtattttgaagtgggcgtgatggtgattggttttgtgtcactgggcaaatttttggaacaccgcaccaaaaaatccagcctgaacagcttgggcttgctactgaaactcacgccgactcaagtcaatgtacaacgcaatggcgaatggaaacagcttcccatcgaccaagtgcaaatcggcgaccttatccgcgccaaccacggcgaacgcattgccgccgacggcatcatagaaagcggcagcggctgggcggatgagagccatcttaccggtgaatccaatcccgaagagaaaaaagcaggcagcaaagtgttggcgggcgcgctgatgactgaaggcagcgtggtgtaccgcgccacacagctcggcagccaaacattgctcggcgacatgatgaacgcgctctctgaagcacaaggcagtaaagcaccgattgcgcgtgtggcagacaaggcagcggcggtgttcgtgccaactgtcgtgggcatcgcgcttttgacttttatcgccacttggctggtgaaaggcgattggacggttgcgctgatgcacgccgtcgccgttttggtgattgcctgcccgtgtgcgctcggtctggctacacccgccgcgattatggtcggcatgggtaaagcagtgaaacacggcatttggtttaaagacgcagcggcaatggaagaagccgcccacgtcgatgccgtcgtgttggataaaaccggcacgctgaccgaaggcaagccgcaggttgccgccgtttattgcgttcccgacagcggctttgacgaagatgctttgtaccgcatcgccgccaccgtcgaacaaaacgccgcccatccgctcgcccgtgccatcgtctccgccgcccaagcgcgcggcttggggattcccgccgcacaaaacgcgcaaaccgttgtcggcgcaggcattgccgccgaagtaaaaggcgcgggtttggtaaaagcaggcaaagccgaatttgccgaactgaccttgccgaagttttcagacggcgtttggaaaatcgccagtgtggttgccgtatctgtaaacggcaaacctatcggcgcattcgcactcgccgacgcgttgaaagccgataccgccgaagccataggccgtctgaaaaaacacaatatcgatgtttacatcatgagcggcgacaaccaaggcacggtcgaatacgtcgcccaacaactgggtatcgctcacgccttcggcaatatgagtccgcgcgacaaagccgccgaagtgcagaaactcaaagccgccggcaaaaccgtggcgatggtcggagacggcatcaacgacgcacctgcgctcgccgccgccaacgttagcttcgccatgaaaggcggcgcggacgttgccgaacacaccgcatccgccacgctgatgcaacattcggtcaaccaactcgccgatgccctatcggtatcgcgggcgacgttgagaaacatcaagcaaaacctgtttttcgccttcttctacaatattttgggcattccgcttgccgcgctcggttttttaaaccctgtcatcgcaggcgcggcaatggcggcaagctcggtttccgtgttgagcaacgccttgcgcctgaaacgggtaaaaatcgattga

SEQ ID NO: 38613 - DNA, 1161 bp, Neisseria meningitidis
  misc_feature 1142, 1143, 1144, 1145, 1146: 'n' is a, c, g or t
atgcacatccctttcaagcccgtattggctgccgccgccatcgcccaagcgtttcccgcctttgcggcagaccccgcgccgcagtccactcaaacgctgaacgaaattaccgttaccggcacgcacaaaacccaaaaactcggcgaagaaaaaatccgccgcaaaaccttagacaagctcttggtcaacgacgaacacgacctggtgcgctacgaccccggcatttccgtcgtcgaaggcggcagggcgggttctaacggctttaccatacgcggtgtcgataaagaccgtgtcgccatcaacgttgacgggctggcgcaggcggaaagccgctcttccgaagccttccaagaattgttcggcgcgtacggcaacttcaacgccaaccgcaacacttccgagccggaaaacttttccgaagtaaccatcaccaaaggcgcggactcgctcaaatccggcagcggcgcattgggcggcgcagtcaattaccaaaccaaatccgcaagcgattatgtttccgaagacaagccctaccatttggggataaagggcggcagcgtcggcaaaaacagccaaaaattcagcagcatcaccgccgccggcaggctctttggtttggatgccttattggtttatacccgccgcttcggcaaagaaaccaaaaaccgctcgaccgagggcgatatcgaaattaaaaacgacggatatgtctataacccgaccgatacaaacggacccagcaaatggctggattacgtagccacaggggttgcgcgctcccaacccgacccgcaagaatgggtaaacaaaagcaccctgttcaagctgggctacaatttcaacgaccgcaaccgcatcggctggatttttgaagactcccgcaccgaccgttttaccaacgagctgtctaatttgtggacgggtacgaccacgtctgccgcaacgggcgactaccgccaccgccaagacgtgagctaccgccgccgctccggcgtcgaatacaaaaacgaattggaacacggcccgtgggacagcctcaagctgcgctacgacaagcagcgcatcgatatgaacacttggacttgggacatcccgaaagattacgatacaaacggcatcaacggccaggtttaccattcgtnnnnncacacacttaattaa

SEQ ID NO: 38614 - DNA, 1857 bp, Neisseria meningitidis; identical to SEQ ID NO: 38136

SEQ ID NO: 38615 - DNA, 1047 bp, Neisseria meningitidis
atgtcagacgacaaaagcaaagcacttgccgccgcactggcgcaaatcgaaaaaagtttcggcaaaggcgccatcatgaaaatggacggcagccagcaggaagaaaacctcgaagtcatttccaccggatcgctcggattagacctcgccctcggagtcggcggtctgccgcgcgggcgcatcgtcgaaatcttcggcccagaatcctccggcaaaaccaccctctgcctcgaagccgtcgcccaatgccagaaaaacggcggcgtgtgcgcctttgtcgatgccgaacacgccttcgatcccgtttacgcccgcaaactcggcgtaaaagtcgaagagctttacctgtcccagcccgataccggcgaacaggctttggaaatctgcgacacactcgtccgttcgggcggcatagatatggtagtcgtcgattccgtagccgcactcgtccccaaagccgaaatcgaaggcgatatgggggacagccatgtcggactgcaggcgcgcctgatgagccaggctttgcgcaaactgaccggacacatcaaaaaaaccaacacgctggttgtgttcatcaaccaaatccggatgaagatcggcgtaatgttcggcagccccgaaaccaccaccggcggcaacgcgctgaaattctattcttccgtccgcctcgacatccgccgcaccggatccatcaaaaaaggcgaagaggtattgggcaacgaaacccgcgtcaaagtcatcaaaaacaaagtcgcccccccgttccgtcaggcagagtttgacatcctctacggagaaggcatcagttgggaaggcgaattgatcgacatcggcgtgaaaaacgacatcatcaacaaatccggcgcgtggtacagctacaacggcgcgaaaatcggtcagggcaaagacaacgtccgcgtctggctgaaggaaaatcccgaagtcgccaatgaaatcgacgcaaaaatccgcgccctcaacggcgtagaaatgcacatcaccgaagggacgcaggacgaaaccgacggcgaacgccccgaagaataa

SEQ ID NO: 38616 - DNA, 1209 bp, Neisseria meningitidis
atgagtgaagcagaatatttttcccatttcatatctaacggcaatgggaagttattagaaattccgcaacgtaggggcaggcaggacggcgtttttatagattggttgtcattcacactgcacgaagattccttgctgaaagtttccggatgccccttagtttccgatgccgaatatatgtttgttttaagcaaaaaattggaggaaatattagggtttggcatcacgagcagatgcaaatcgaagggcaataaattttacgattcgatgtttaggttgggatcggaagaagttgactacggcgaagtccattacggaggtcagcgaaatacggttttaatcgaattgaaaggtgtaggttgcaacattgcaaatccaggttgggaattgaggcttaagcagtttttggaagattcattgaggccgaggataacgcgggtagatttggcacttgatttttttgatggggagtacacgccggaacaggcacttttggatcacgataacggttttttcgataacagtaacatgaggccgaaatctgaaatggttggaacggcttggcggagagaggacgggagcggcaagacattttatgtaggtcgcaagaaaaattctcgttttgtgcgtgtttatgagaaaggcaggcagctaggcgataaagaaagcaagtgggtaaggttcgaaattcagtttaatcatggagatatggaaatacctttggatattctgataaatcaaggttcttacttttcaggcgctttcccgatttgtcagaaatttaaaaatatgccgaatccggaaaggttcgattaccgtaaaaaagtggctaatttaacttttcagcataaattgagatacgcaaaaaacgcggtcggcaaactgattaatttcatgtttgatatgggttttgatagtgatgaaattgtcagatatctgaaggcagatttggggtatcccaaagggctagaacctgaaaaatattcgttggccggattgaaggaatctttgaaattcggctttatccacgaacaaccggatgtagatttagaggttgaattggaagaactcggaattatcaaatttaagcaatcagataaattcgatccggataaaaggcttttcgatccacatcacgatgtagaaagtgagaggcaatatcagctttatctcgacagaatgtatgatcttcatgcaaatcaaaattaa

SEQ ID NO: 38617 - DNA, 201 bp, Neisseria meningitidis; identical to SEQ ID NO: 38240

SEQ ID NO: 38618 - DNA, 1101 bp, Neisseria meningitidis
  misc_feature 1078, 1079, 1080, 1081, 1082: 'n' is a, c, g or t
atggatttcagttggttggcagaaccgcatacctggataggttttgccacgcttttggtgttggaagtcgtattggggatagacaaccttgtctttgtggcgattttggcaaacaaggtccagcccgcacggcgcgaccgcgcacggattatcgggctggggctggcagtcgtcatccgcatcattatgcttgcttttatggcgcacatcatcacgctgaccgagccgctgttccaaatcggcggcctcgccgtttccggcaaggacatgattatgctcgcgggcggtattttcctgctttacaaagccaccaccgaactgcatgaacgcctcgaagggcacaaccgttttactgttgccgacaaccaaaaaaaacacgcgccgttttggggcgtggtcgcgcaaatcctgatactggatgccgtgttttccatcgattcggtcattactgcggtggcgatggtcgatcatatcgtcgtggcgatgggtgcggtcgtcgtcgcaatggctgtaatgatttctgccagcaaactcttgaccgaatttgtcgacagacaccctaccgtcgtgatgctctgccttggttttttgttgatgatcggtttcagcctgattgccgaagccttccatttccacattcccaaaggctacctctacgccgccatcggcttctcgattttaatcgaactgtttaaccagatttcccagcgcaacagccgcaaaaacgactacatcggcagctcgtggcgcaaacggactgctgaaaacgttttgggtatgatgggcatacgcgaaagcgtgcttgccgacgcgggcggcgaatccggggacgacgcgcattttgaagaaaacgaaaaatcgatgatacgcagcgtgctgacgcttgccgaacgcccgattatgggggtgatgatcccacgccgcgacatcgaacggctggacatttcccaaagccgcgaagaacagtgtgcccaactgcaaaacacgccttacagccgcctgctcgttgtcggtaaggcgggcgtggacgaacctttgggctacatcaacaaaaaagacctgctgtcccaactgctgnnnnncacacacttaattaattaa

SEQ ID NO: 38619 - DNA, 744 bp, Neisseria meningitidis
atgctcatcatccgcaacctgatttactggctgatactctgttccaccctgattttcctctttccctttatgctgctcgcctcgcctttccgggacggggcgcacaagatggcgcgggtctgggtcaaaatcctcaacctctcgctcaaacacatcgtcgggctcaaataccgcatcatcggcgcggaaaacatccccgaccgccccgccgtcatctgcgccaaacaccaaagcggctgggaaacgctcgcccttcaggacatttttccgccgcaggtttacgttgccaaacgcgagttgttcaaaatcccctttttcggctggggcttgaaactggtcaaaaccataggcatagaccgcaacaaccgccgcgaagccaacgagcagctcataaaacaggggttggcgcgcaaaaacgaaggctattggattaccattttccccgaaggcacgcgccttgcacccggaaagcgcggcaaatacaaactcggcggcgcgcgcatggcgaaaatgtttgagatggacatcgtccccgtcgccctcaacagcggcgaattttggccgaaaaactcctttctgaaatatccgggggaaatcaccgtcgtcatctgtccgaccatcccgcacgcaagcggcagcgaagccgaattgatgggaaaatgcgaacacctcatcgaaacgcagcagccgctcatttccggcgcaggcccgtttgccgccaaaatgccgtctgaaaccgcatga

SEQ ID NO: 38620 - DNA, 1509 bp, Neisseria meningitidis
atgaccaccacccccgcaaacatcctcgcctccgtcgatttgggttccaacagtttccgcctccagatttgcgaaaacaacaacggacagttgaaagttatcgattcgttcaaacagatggtgcgcttcgccgccggtctggacgaacagaaaaacctgagtgccgcttcccaagaacaggctttggactgcctggcaaaattcggcgaacgcctgcgcggcttccgccccgaacaggtgcgcgccgtggcaaccaacaccttccgcgtcgccaaaaacatcgcagatttccttcccaaggccgaagcggcactgggtttccccatagaaatcatcgccgggcgcgaagaggcgcggctgatttataccggcgtgatccacaccctcccccccggcggcggcaaaatgctggttatcgacatcggcggcggttcgacagaatttgtcatcggctcgacgctgaatcccgacattaccgaaagcctgcccttgggctgcgttacctacagcctgcgcttcttccaaaacaaaatcaccgccaaagacttccaatctgccatttccgccgcccgcaacgaaatccagcgcatcagcaaaaatatgaggcgcgaaggttgggatttcgccgtcggcacatcgggttcggcaaaatccatccgcgacgtgcttgccgccgaaatgccccaagaggcggacattacctacaaaggcatgcgcgccctcgccgaacgcatcatcgaagccggttcggtcaaaaaggccaaatttgaaaacctgaaaccggaacgcatcgaagtttttgccggcggacttgccgtgatgatggcggcgtttgaagaaatgaaactcgacaggatgaccgtaaccgaagccgccctgcgcgacggcgtgttttacgatttgatcgggcgcggtttaaacgaagatatgcgcggacaaacggttgccgagttccaacaccgctaccacgtcagcctcaatcaggcgaaacgcaccgccgagaccgcgcaaacctttatggacagcctctgccacgctaaaaacgttacagttcaagagcttgccttgtggcaacagtatctcggacgcgccgccgcgctgcacgaaatcggtttggacatcgcccacaccggctatcacaagcattccgcctacatcctcgaaaacgccgatatgccgggtttctcacgcaaagaacagaccatacttgcccaactggtcatcggtcatcgcggcgatatgaaaaaaatgagcggcatcatcggcaccaacgaaatgttgtggtatgccgttttgtccctgcgccttgctgccctgttctgccgttcgcgccaagacctgtctttcccgaaaaatatgcagttgcgcacggatacggaaagctgcggcttcatcctgcgtattgacagggaatggctggaacgccatcccctgattgccgacgcattggaatatgaaagcgtccaatggcaaaaaatcaatatgccgttcaaagtcgaggtcgtctga

SEQ ID NO: 38621 - DNA, 918 bp, Neisseria meningitidis; identical to SEQ ID NO: 37376

SEQ ID NO: 38622 - DNA, 2847 bp, Neisseria meningitidis
atgaataaaaaatatgcaacaaaagccgaaattaatgccgccgcgcatgaccggtggcgtgaggttttagaagcgtgcggcataccgtccgaaattttagataaaaaacatcacccctgtccgtcatgcggcggctccgaccgattcaggtttacggacggtagcggttcaagtcgcgggagtggtgtttggatttgcaatcaatgcaagccggaaggcggcagtccgtttgatttgttgatggatgtttgcgggtatagttttaacgaggctagagacaaagttgcctccttgcttgggttggcgcatggggatttggtagataaggctccgaagctgttacctcctcctgctccagtaaaggaggaggagcgtgatttgtggaagccaatcgttcctgtgcctgaatatgcgctgaattctatgagctttgggaatggatttagaaaatcagacgacctgatttttaaatctgttttccgcgatagctccagcgcggttttgggcggtgttgcccgatttagaaaatcagacggcggaaaaatcgatctgccttatacgttttgcgagcataagaaaacaggcgaaaagatgtggcgttggcgttgttgggataacccgcgcccattgtacggtcttgattctttggttgctgacccatcattaccggttttggttgtcgagggggagaaatgtaagaacgcggcagatgctcagggttataactatgccgtcctgacgtggcatggcggttgtaataactgggataagtcggattggtcggcggtcgttgatcgtgatgtcgtcttgtggcctgattgcgattcgctgcgccaaaagctaacaaagaaagatcgcgatgatggtgttgaccctgaatccaaaccgtttctgccgcgcaatgagcagggcggaatgaaggcgatgcttggtattgctgaggtactgacaaagcagaattgccgtgtttggttggtcaatattcctgctccagggatatggcctcatggtttcgatattgccgatgcgattgcagacggcgggcgcatctgcgacccttccgaagtgttgagctggatgggcgcggcggattggttggttgagtatgtgccggaagcggaaatgccgtctgaaaactctcccgcacccattcaagatatggagccggaatctgagcagttgcatgaatctctcgaagcaacaggcaatcaagggggtgcgggggatgtggatgacgaatatttggccaaattgcaaaagctgaaatcagaatttgggctggttgaaggtaaagaccacggcgtgaacagaaaaacaggggttacatatacccgaaaggcaatgactgttcatttcggcaaagacgttgtcgatgcttggtatgaatggggccgtgcgccggtgctgactatgtacgaaatcaaccgtctgaaaaaagactacgcattgattcaggcggtaaaagatgatgacacgcaagatatgatggagcgtttcatttatcttgatggttcggcatcgatttgggacaacaaactatggcgcgttgtccctgaaaaggcggctcgtctgtcgatgacgcctgatggttttaaaatttgggtcaatagcccgagccgaattgtaaaacggttcgaccgattggtctttgagcctggtcgggtgttgtctgacgactatatcaacatcttccgaggcatgccgattgaaccgaaattcccgattcccaaagaggatatgcccgaaacaaactacgaattgtatagattattccctgaaatcaagccgattctgaatttgattaatcacttatgtaatggggattaccaacaggtcgaatacattttgaattggctggcttatccgttacaaaacgtaggcgcgaagatgacgaccgccgttgtcatgcacggtcatatacacggtgcgggtaaatctttctttttcgaggaaatcgtgaagccgatgtacggcgaatacggcgcaacatatggtcaagaggacttggaaagcaactatacggcaaaccgatcaggcaaaatgttcggtatttttgaagaggtttacacaaatcagcaaaaatacaataaaacaggcagccaaaaacatatgattaccggcaagacgatgcgcgtcgagcggaaattccaggatgcttacgaagaagcaaaccatatgaattgtgtgtttttgcgtaatgaatctcatcctttcaaaattgaggaaaacgaccggcgttatttcgttgtatggcctgagaaaaagttggacaaaaaattgcgcgatgaagttttagactgtatcggcaacgatggtgtccgtttgttttacagtttcctgctgtgttggaatttttatctgacttacgggcaacagggagcagaaaacgaaaaaggatacgaggtaatcaaactggaagagcctgtaagattcgatccaaacacgccgccgccgatgactgccgcgaaacaaaacgtcatttcctatggccgatatgcttggcaaaccttttattcggagtgggctggcggtggtattaaagacctgccgttttgctgttgcattacagacgacctttggttggtttacaaagagtggtgcaggcaaaacggcgagcgggaaactggtaaaacaaagtttctccaacacattgctgagaagatgccgcgggcgcggcgctggtggcggacgaaaaataaagatggcgacgtatcgtgtcaaaactggatttttaagccggctggctggcaagcggcggacggattgccggaaatggatgccctgggcaatgaggttttacgattccgcagcgctggttggaggtatcgcggcggtgaagaagtttga

SEQ ID NO: 38623 - DNA, 453 bp, Neisseria meningitidis
atgcaaattattctgttagaaaaaatcggcggtctgggcaacttgggcgatatcgtaaccgttaaaaacggctacgcccgcaactttctaattcccgcaggtaaggcaaaacgtgcgaccgaagcgaatatgaaagagtttgaagcacgccgtgccgaattggaagccaaacaggctgaaattttggcagatgcccgagtccgtcaggaaaaattggacggtcaaaccgttaccgttgctcaaaaagccggtgtggacggccgcctgttcggttccgttaccaatgccgacattgctgctgcaatcgttgctgccggcatcgaagccgtgaaagcaaatgtacgtctgccgaacggtcctctgaaagccgttggcgagtacgaagtggaagtggctttgcacactgatgccgttgctaaaattaccgttgccgtcgttgccgcaaccgagtaa

SEQ ID NO: 38624 - DNA, 1041 bp, Neisseria meningitidis
  misc_feature 6, 7, 8, 9, 10: 'n' is a, c, g or t
gtgtgnnnnnctgcgctgcaacgccccggccgtttcgaccgccaagtggttgtccccctgccggacatccgggggcgcgaacagattttgaacgtccattctaaaaaagtgcctttggacaaatctgtggatttattgtccctcgcgcgcggcacgccgggtttttccggcgcggatttggcgaacttggtcaacgaagccgccctgtttgccggccgccgcaataaagtcaaagtcgatcagagcgattttgaagacgccaaagacaaaatctatatgggtccggaacgccgcagtatggtgatgcacgaagacgaaaaacgtgcgacggcgtatcacgaatccggacacgcgattgttgccgaaagcctgccctttaccgaccccgtccacaaagtaaccattatgccgcgcggacgtgcgctgggtctgacttggcagcttccggagcgcgaccgcatcagtatgtataaagatcagatgttgagccagctctccatcctgttcggcggacggattgccgaagacatcttcgtcggacgcatctccaccggcgcatcaaacgactttgaacgcgcaacccaaatggcgcgcgaaatggtaacgcgctacggcatgagcgacaaaatgggcgtgatggtttatgcggaaaacgaaggcgaagtcttcttaggacgcagcgtaacccgttcgcaaaacatttccgagaaaacccagcaggacatcgatgcggaaatccgccggattttggacgagcagtatcaggttgcctacaaaatcctcgatgaaaaccgcgacaagatggaaaccatgtgcaaagccctgatggaatgggaaaccatcgaccgcgatcaggtactggaaatcatggcgggcaaacaacccagtccacccaaagattacagccacaacctgcgcgagaatgcggacgcggcggaagataacgcgccgcacgctccggctcgggaagaaaccgaagcacctgccccggcagacaccgcttcgtcagagtccgagcagcggcctgaaaacaaggcttaa

SEQ ID NO: 38625 - DNA, 618 bp, Neisseria meningitidis; identical to SEQ ID NO: 38509

SEQ ID NO: 38626 - DNA, 465 bp, Neisseria meningitidis; identical to SEQ ID NO: 37404

SEQ ID NO: 38627 - DNA, 321 bp, Neisseria meningitidis
atgaacaagccgtttatcactcaggcgcagttggcactttataaatatcagccgtctagcaagtattttgggcaatcgatggcattaattgcgtctaaggaatttgaagagtttgtaagaaatgtaaaagaatacgacgtaatagaatgtttctcttattttttaaataagagggtaacgcataatatttggaaaatttatttttctgatgagtctaatatttttattaggaagtcagaagaaaatggaaaaatttcgcatgaatttatttactcggaattttctgatagcaacaccgattttaatgtgttgttctcttag

SEQ ID NO: 38628 - DNA, 570 bp, Neisseria meningitidis
  misc_feature 6, 7, 8, 9, 10: 'n' is a, c, g or t
gtgtgnnnnngcagaaaatccgtcaaaaaaccgggcaatatgcccgttttggacgtgatttccgccggcgcgaaagccgcgctggcaacgacgcgcaacaataaaatcggcattatcgccaccaatacgacagtcaacagcaacgcctatgcgcgcgccatccacaggaacaaccccgatacgctcgtccgcacgcaggccgcgccgctgctcgtccctttggtggaggaaggttggttggaacatgaagttacccgcctgaccgtatgcgaatacctcaaaccattgcttgcggacggcatcgatacgctggtgttgggctgcacgcactttcccttgctcaaacccttaatcggcagggaggcgcacaatgtcgcactggtcgattccgcgattacgactgccgaagaaaccgcacgcgtccttgcgcaggagggattactcaataccgacaacaacaatcccgactaccgtttttatgtcagcgatattcctttgaaattcagaaccatcggcgagcgttttctgggcaggacgatggagcagattgaaatggtgtctttgggttag

SEQ ID NO: 38629 - DNA, 2631 bp, Neisseria meningitidis
atgcaagaacattaccaacccgccgccatcgagcctgcggcgcagaaaaaatgggacgacgcccgtattttcaacgtctccgaagacgcttccaaacccaaatattattgcctctccatgttcccctatcccagcggcaagctgcacatggggcatgtgcgcaactacaccatcggcgatgtattgagccgcttcaaacttttaaacggcttcaacgtcatgcagcctatgggttgggacgcgttcggcatgccggcggaaaacgcggcgatgaaaaacaacgtcgcccctgccgcttggacgtacgataacatcgaatacatgaaaacccagctcaaaagcctgggttttgcgattgactgggcgcgcgaaaccgcaacctgcaaacccgaatactaccgctgggaacaatggctgtttaccaagctgtttgaaaaaggcatcgtctatcgcaaaaacggcacggtgaactgggacccggtcgaccaaaccgtccttgccaacgagcaagtcatcgacggacgcggctggcgttcgggcgcgttgatcgaaaaacgcgaaatcccgatgtattacttcaaaatcacggattacgccgaagagctgctcaacgacttggacaagctggaacactggccggaacaagtcaaaaccatgcagcgcaactggatcggcaaatcgcgcggtatgaccgtgcgcttcgccgtttcagacgacagcaaacaaggcttggaaggcgattacgcgaaattcctgcaagtttataccacccgccccgacacgctgatgggtgcgacttatgttgccgttgccgccgagcatccgctggcagccgccgcagccgccgacaaacccgaattgcaggcatttattgccgaatgcaaagccggttcggttgccgaagccgatatggcgacgatggagaaaaaaggcgtgccgaccggtcgctacgtcgtcaacccgctcaacggcgacaagctggaagtgtggattgccaactatgtattgtggggctacggcgacggcgcagtgatggcggttccggcgcacgacgaacgcgattttgagttcgccgccaaatacaatctgcctaaaaaacaagtcattgccgtcggcgacaacgcattcgacgcaaaccgatggcaagaatggtatgccgacaaagaaaacggcgtattggtcaacagcggcgacttggacggcttggattttcagacggcattcgatgccgttgccgccaagctgcaaagccaaggcgcgggcgaaccgaaaacccaataccgcctgcgcgactggggcatttcgcgccaacgctactggggctgcccgattcccatcgtccattgcgaacaatgcggcgacgtacccgtccctgccgaccaattgccggtcgttttgcctgaaaacgtcgtacccgacggcatgggttcgccgctggcaaaaatgcccgagttttacgaaactgcctgcccatgctgcggcggcgcggcaaaacgcgaaaccgacaccatggacaccttcatggaatcgagctggtatttcttccgctatatgtcgccaaaattttcagacggcatggtcgatcctgccgccgcgaaatactggggcgcggtcgaccaatacatcggcggcatcgaacacgcgattttgcacctcttgtacgcgcgtttcttcaccaaactgatgcgcgacgaaggtctagtcaatgttgacgaaccgtttgaacgcctgctgacgcaaggcatggtcgtttgcgaaacctactaccgcgaaaacgacaaaggcggcaaagattggatcaaccccgccgatgtcgagctgacgttcgacgacaaaggccgccccatttccgccgtcctcaaagccgacgggctgcccgtcgtcatcagcggcacggaaaaaatgtccaagtccaaaaacaacggcgtcgatccgcaagaactgattaacgcctacggcgcggacaccgcccgcctgtttatgatgttcgccgcaccgcccgaacagtccctcgaatggagcgacagcggcgtcgaaggcgcacaccgcttcctgcgccgcctgtggcgtaccgtttacgaatacttgaagcaaggcgaagcggtcaaagcgttcgcaggcagccaagacggtttgtctaaagaactcaaagacctgcgccacaaactgcacgcgaccactgccaaagtcagcgacgactacggccgccgccagcagttcaacaccgccatcgccgccgtgatggaattgctcaaccaatacgacaaaaccgacaccggcggcgaacaaggacgcgccgtcgcccaagaagtattggaaaccgccgtacgcctgttgtggcccatcgtgccgcacatctgcgaaaccctgtggagcgaattgaacggcgcgaaactgtgggaagcaggctggccgacagtcgacgaagccgccttggtcaaatccgaaatcgaagtgatggttcaagtcaacggcaaactgcgcggcaaaatcactgttgccgccgacgcatccaaagccgacctcgaagccgccgcactcgccaccgaaggcgcggtgaaattcatggaaggcaaaccggcgaagaaaatcatcgtcgttcccggacgcttggtgaatatcgtcgtctaa

SEQ ID NO: 38630 - DNA, 747 bp, Neisseria meningitidis
gtgcagcctgaaacctccgcccaataccagcaccgtttcgcccaagccatacgcgggggcgaagccgcagacggtctgccgcaagaccgactgaacgtctatatccgcctgatacgcaacaatatccacagctttatcgaccgctgctataccgaaacgcggcaatactttgacagcgaagaatggagccgtctgaaagaaggtttcgtccgcgacgcgcacgcccaaacgccctattttcaagaaatccccggcgagttcctacaatattgccaaagcctgccgctttcagacggcattttggcactgatggattttgaatatacccaattgctggcagaagttgctcaaattccggatattcccgacattcattattcaaatgacagcaaatacacaccttcccctgcggcctttatccggcaatatcgatatgatgttaccgatgatttgcatgaagcggaaacagccttgttaatatggcgaaacgccgaagatgatgtgatgtaccaaacattggacggcttcgatatgatgctgctagaaataatgggttcctccgcgctttcgtttgacaccctcgcccaaacccttgtcgaatttatgcctgaggacgataattggaaaaatattttgcttgggaaatggtcaggctggactgaacaaaggattatcatcccctccttgtccgccatatccgaaaatatggaaggcaattccccgggccaaaaccatctatccgcataa

SEQ ID NO: 38631 - DNA, 1473 bp, Neisseria meningitidis
atgaaccagacaagccgcgatctgacccgcatcagccacaacaccaaaatcgtcgccaccttggggccgggcagcaacaacgtcgaactgttggaagacatgatccgcgtcggcggtctgaacgtcgtccgcttcaacttcagccacggcacgcccgaattccatcaggaaaacgcccgcattgtgcgcgaggcggcaaaacgcgccggacaggaaatcgccatcattgccgacctgcaagggccgaaaatccgcgtgggcaaaatcgccggcggcggcatcgaattgaacaaaggcgaaacgctggtactggatgccgcgctcgaaggcgaaggcacgcgcgaggcggtcggtttggactaccgcgacctgcccgacgacgttaccgcaggcgacgtattgtggctggacgacggcctgctgaccctgaccgtggaatccgtcgaaggcagcaggattatcacaagggtggaaaacagccacgtcctgaaaagcaacaagggcatcaacaaacgcggcggcggtctatctgcaggcgcgttgaccgaaaaagacttccgcgacctgaaaaccgcgattgccatcggttgcgactacctcgccatcagctttgtgaaatccgccgaagatttgcatatcgcgcgcgccaaagtcgaagaagaaatgaagggcagcactgccgtgcgccccagtttggtttccaaaatcgaacgcgtagaagcgattgaaaacttggacgaaatcatcctcgccggcgacggcattatggttgcgcgcggcgacttggcggtcgaagtcggacacgccgccgtccccgccctgcaaaaacggatgatccgccgcgcccgcgagttgcgccgcttcagcattacggcgacgcaaatgatggaatcgatgattaccaaccccgtaccgacccgcgccgaagtgagcgacgtggccaatgcggtattggacggtaccgatgcggtaatgtgttccgctgaaaccgcggtgggtgcgtatccgtttgaaacggtcagccaaatggcggttatttgtgcggcggccgaaaaagagcaggactccctcaacggcgttgccgaacaggcggagtatcccgaagcggtcagcaccaatctggcggttgccggcggagcggtcagcgtggcgcgcgcggttcacgccaaagcgattgtcgccctgaccgaaagcggttcgaccgcctttgaaatcagccgccacaacatcaccctgccgattttcgcgctgaccccgagcgtttccgcccaacgccgtatggcgatgtaccggggcgtgcgtccgatgattttggcgaccagtaccgaccacgatactgcgctgaatgaagtggaagctgtgttggtcgaacaccaaattctgtgttccggcgaccaatacatcattaccagcggctcgaaaatgcgtgaatccggttcgaccaatacgctggaagtgctgcgcgtcaaataa

SEQ ID NO: 38632 - DNA, 966 bp, Neisseria meningitidis; identical to SEQ ID NO: 38346

SEQ ID NO: 38633 - DNA, 171 bp, Neisseria meningitidis
atgaaatacggcgtattttttgcggcggcaaccgccctcctgctctcggcctgcggttacaaaggcgacctctacctgcccaaagaaggcgacaaggcgcgtttcggcgtaatccaaaccggtttgcagcttcaaagcaaaccgcaatccgctccaccaacccaaaaatga

SEQ ID NO: 38634 - DNA, 564 bp, Neisseria meningitidis
gtgcaggacaaaaacaacctctgctggctcgatatggaaatgacggggcttaatcccgaaaccgaccgcattatcgaagtcgcgatgattattaccgactcggatttgaatgtattggcgcaatccgaagtttacgccgtccaccaaagcgacgagctgctcgacaatatggacgaatggaacaccgccacacacggtaggacggggctgacacagcgcgtgcgcgaatcgttgcataccgaagccgaagtcgaacagaaactgctggactttatgtcggaatgggtacccggacgcgccacgccgatgtgcggcaactccatccaccaagaccggcgttttatggtcaaatatatgccgaaactggaaaactacttccactaccgcaacctcgacgtttccacgctcaaagagcttgccaaacgctggaatccgtccgttgccaaaagcgtcgtcaaacgcggttcgcacaaggcattggacgacattttggagagcatcgaagaaatgcgccactaccgcgaacactttctgatttccgccccgagagccgaagcgcaataa

SEQ ID NO: 38635 - DNA, 738 bp, Neisseria meningitidis
atgttaagcgcgcgctacctccacctgcacgaagctttgggtttaggcccgatgtggctgaaacaggccgccgccgtcctgccgcccaaaaacacacccgcaaccccggcacaggcacgtcctcaaaccgtccgcgccgccccgatccgcccttcccaaccccataacggtcaggcgcggctcgaaacgatgaaagcgttggaaaccgccgccgtacatacgcgcaaacccgcgcctgaaaccgaaacgcccccgcccggcctttcagacggcatcgcccccgttcccgccgcttcgggcataaccaaacttgccgtcgtcagcctttgcccaccgattgaggatgcggtttacgggcaactgttctacggcaaagcgggtgttctgcttgacaacatactcaaagccgtaggactggatgccgcctatgtccacaaaacctgttgggtgaaaaccgccgccgtcggcaacccgatgccgtctgaagcggcaatcgaaaccgcgacggtttccgtcatgcaggaactcgacggctgccgcgcccccgccgtcctattcctcggacaggcttttgtccagcctgaacggcaaacgatgattgaaactttgtgcggcagccgtcccttcttcatcatcgaccatcccgcccggctgttgcgccaacccgaacttaaagcccgcgcctggcaggtgttgaaacagttgaaacgcgccttgcggcaaggcggcggcagttga

SEQ ID NO: 38636 - DNA, 4266 bp, Neisseria meningitidis
atgggcggcaaatcgggcggaggacaacggacaccttatgaagccccaaacagtttatccagcgcccagtcgctgcggattattgatgcggtatccgaaggtgtggtttcggggtttgccaacggcgatgatgcgccgttcaaaagcgtgtattttgatgacactcctgtccaaaattcggacggcagctacaattttaatggagttacgggttatttccagcgtggcgagcaagaccagtcctatgttccgggtttcgatgcttccgagcgcaccgtagccgtttcggctgcggtgaagcagaatcagccgatggttcgcgccgttaccgacgaattggtcagccgtttgcggattacggtcgctgtcgagcggaatgcacaggttgaagacaacggcgacaccgtgcctgctgataccttaatgcgcgttgagttgataaacagcaatggtgtgcaggcatcaaatcaggtgcgtttcaatgaaaaatccagcgggacatattatcaggatgtcgaatttgatgtggtgccgcaagtgccgttcaatatccgcgttttccgaatttcgcctgattccaagaccgacaaggtcagcaacaatacctatttttcgtcctacgttgaaatcgttgatgcgaaattgagctatccgcataccgcgtttgcggcattgtcgattgattcggcgcagttcgggaatcagattccgcgtcgcaattatttgatgaaaggccgcttggtcaaagtgccgtccaattacaatcctgaaacccgccaatatacgggtggaacatgggatggcagtttcaaaaccgcatggacaaacaacccggcatgggttttttacgatgtgctgacccagccgagattttccacgctggcacgtcgtctgaatgtggcagacatagacaaatggagcctgtaccaaatcgggaaatattgcgacgagccggtcgatgacggcttcggcggcaaagagccgcgtttcgtctgcaacgcctacattaccgacctgatgcaggcaggtgaatttttgaacaatcttgccagcgtctttaccggtttaccggtttggaacggacagcaagtatccgtcgtcatggatgccgacgccgatccggtggcgcaatataccaatgccaatgttaaagacggcctgtttaattatgcgggtgcagcgttgaagtccattcatactgctgttcatgtgcagtatatagacaaatacgatggctatcgcgctaaaacagaatatgtagccgacaacgaagccattgcccgctatggtttgaatatcaagcagattactgcgttcggctgcgattcgcgcgggcaggcggcacgtttcggcgcatggacgctgcaaactgagttgcggcagcagaacgccgtaacgtttgaaatcgggcgtgaggggttgaagcatctgccttacgacatcgtgcagattatggacaatcaatacgcaggtgcagagttgtctggacgtgttgccgccatttcgggcaatgtgctgacgctggatcgacctgtatccgatgcggtcggagccttggtgttttattctgaaggcggtagtctgaaatcagcgaagataactgcggcagcaggcaataaggttactttggagcgtgaggtgccgttgcaggctggcgatacgtgggttttatccggcaaagtcaagccgcgcctctaccgtgccatcggcatcaaagagaatacggatgcgggtacttataccgttaccgcgttgctgcatgacccgaaaaaatatgctgccgtggatagttttgcgcattttgaccatgaaattaccacgctgcacaacactgcccctgtgttgaccgatgcggctgtcaataccgacggtgggacagttgtggtgacatgggacaacctggccgcaaacggtcaggttttaacttacgatattaagatttaccgtaacaacagcctataccgccatatccctgatgcacagacagcggaaattcgtttggaaaatctgccgaacggcaattatcgggcggaaatacgcggccgtaatgcacggggtgtactgtccgcaccgttggttaaggcttggagtatcgactataccgttaccggattgaggacgacgccgaaaacactgtctgtgaccgtggattgggtattgccgcaaaccgttgtttccgatttggttttcgagctgtggtatagcaagaccaacaatcttcagacggcaacgaaactcgcgtcgctggcgtatccgcaaaacagttataccttaaccggcgtcggcgttgccgacgtttattatttctgggtgcgcatacgtgatattgcaggaaatacgggggaatttaccgctgccgtacagggtagggcagataacaatcctgcgccgatagtgcagcagattcagggtgcaatcgggaagtctgcattaagcagggagctgatagacacgctgaatcgtgatatggctgcggctgcggggttgaaagtgtctgcagaggcagcggaacgtgctaaagccttacaggaggaagcacgggcgcgaacggcggcaatacaggcggaatcatctgcccgaactgccgagcttgccagaaagtcatccgaaatcggtacgcgtattgccgcaacagaagctgtcaatgagcagcaggcgcagcaaatccaaactgttacgtctgtgcaaggcaataccgccgccgggctggaagccgaaaaaaaagcccgtgccgatggcgacagagccgaggcgcaggcgcgtgaaacactggctgtcagacttggtaatgcagaaagcggtatttcggcattgcgggaaaccgtaacacgtcaggatgctgccaggtcgtctgagatcaacacgttgacggcgaagctggagaatgttgaagtcggcggtcggaattatgccttatcaacaggaacagccggcaaagtgttgaccgctagcgggaataatcagaccaaaaccgtcactatcgacgtttcgtctgctttggatctgaagcaaggcgatagtttgattatctcgtgcgatatcgaactggtaaacgccacatcgcctcatggcaaaccatacccgcgaatcggtgcggaattttccgtaatctatgcggacaactcggtaggttattttgctgcgtggtacggcgaagccgtcagcggtacgaccaaaacgctgaaacagcgtattgtcgccaaacgcacggttgccaaagaggttaaagcacttcgaagcttcatcgttcaggcgcggtatcagacatcagaatccatcaaggtttcaaatgtgaaactggaacgcggaacggtagcaactgactggagtcctgcgccggaggacagtaacgccgatacgtctgctctgacggccttgtcggctaaagttcagcaggctagttctgctgttgcagagataggagggaaaatacagtctttgtacacgctgaagactgaggcaatagcaggcggtcgtcgggcagttgcaggggttgcagtgggagccgatggaaagacgggaagtggcgaaatcctcctgatggcagataaagttgcttatgtcgatccgaaagataagacggttacgcccgctttcgttaccgttatcgaaaacggcaaggcgaagcaggctttgaacggcgacctgttcgcgactggttcgatactggcaaagcacatcgctgccaaccagactatcgaagccccaacgctgaatggtgcaaccgtcaatgcaggtctaattaagggtggtacgatacgtggcgcgcgaattgaagccgtggatttggaggccgctaatatcatcggagatgtcgtggcggtcaggacgtttgagctgaagcagtcgccattaggttatcaggaattgatatgccaaatccctgatagccgaaaaacacgccggacggttatcgtgccgccggtttttgctgttgcagaaaacggtgcagttgtcagtctacaactgcacatggatggtgtgattcagcgggaggttacgattcagtcacctgaaaagaggatagcgcgtaacgaaaagttttccgtatgggttcctggccctccgccgctgtatatagggactccgctggaggtgcctcttagtttttccgtcccattccatctaccaaagacaggcagtatatcttttcagaagggtatcgatggtgcagcacattcgttgcatatcctctgccgcattagcggcaattttgattattcacccttgggcgatttatcgggtattgtctgtcttattgtttaa

SEQ ID NO: 38637 - DNA, 828 bp, Neisseria meningitidis
atggatggagaaggtatgtcggttgggcattatgagaattttcccgtcggttcgctgattttgccgcgcaggttgaggaagccgattcatgcggtgtacgcgtttgcacggacggcggacgatatggcggacgagggcagtatgccgtctgaagccaggttggcggggttggagggtttgcagcgcgagttggacgtgttggcatcgggcggccggtcggcgcatcctttgattgcacgattggatgccgaggcggttgtgccgttcggtttggatttgcagccgttttatgatttgctttctgcattttctcaggatgtggttaaaacaaggtatggaaatttcggcgagctggccgattattgtcggcgttccgccaaccctgtcggacgcattatgctggctttgtacgggaaaacggatgcggtgtgcgtggcgcaaagcgacggcatctgtacggctttgcaactggtgaatttttggcaggatgtggctgtggattggcaaaagggcagggtttatattccgcaggacgatttgttgaaattcggtgtttccgaaggacagattgcggagggtagggcggatgcggcgtttcagcggctgatggcgtatgagtgccggcgcgcattccgtatgctgaaggcgggttcgcctttggcgcgcgaattgaaagggcgtatcggtttggaactccgtatgattgtgttgggggcgcagttgattttgcagaaactggacgcgtgccgatacgatgtgtttgcacaacgtccggttttggataagaaggattggttgattatgttgaaacgcgcgttgtggaaatga

SEQ ID NO: 38638 - DNA, 849 bp, Neisseria meningitidis
atggacttcaaacaatttgattttttacacctgataagtgcttccggctgggagcatctggctgaaaaggcgtgggcgttcgggctgaaccttgccgccgcgctgcttatttttttggtcggaaaatgggcggcgaaacgcattgtcgctgtgatgagggcggcgatgacgcgcgcgcaggtcgatgccacgctgattagttttttgtgtaatgttgccaatatcggcttattgattttggtgattattgccgcattgggcagattgggcgtttccacaacatccgtaaccgccttaatcggcggcgcgggtttggcggtggcgttgtccttgaaagaccagctgtccaattttgccgccggtgcgctgattatcctgttccgcccgttcaaagtcggcgattttatccgcgtcggcggttttgaaggatatgtccgagagattaaaatggtgcagacttctttgcggacgaccgacaacgaagaagtcgtgctgcccaacagcgtggtgatgggcaacagcatcgtcaaccgttccaccctgccgctttgccgcgcccaagtgatagtcggcgtcgattacaactgcgatttgaaagtggcgaaagaggcggtgttgaaagccgccgtcgaacaccccttgagcgttcaaaacgaagagcggcaggccgccgcctacatcaccgccttgggcgacaatgccatcgaaatcacattatgggcttgggcaaacgaagcagaccgctggacgctgcaatgcgacttgaacgaacaagtggtcgaaaacctccgcaaagtcaatatcaacatcccgttcccgcaacgcgacatacacatcatcaattcttaa

SEQ ID NO: 38639 - DNA, 1443 bp, Neisseria meningitidis
gtgaattatttccccattttcgccaacctcgccggccgccccgtattggtcgtaggcggcggttcggtcgccgcgcgcaaaatcagcctgttgctggatgccggcgcgcaagtcagggttgttgcaaatcagttgaatgctgaattaagtgcgctggcggcagaaaacaaaatcctgtggcttgccgaagaatttcgtgccgaacacatccgcacagttttcctcatcattgcggcaagcagcgaccaagccctcaaccggcgcgttttccagcttgccgaaagctgccaaaaaccggtcaacgtggtggacgatcgcgattattgcagttttatttttccttcgattatcaatcgcaatccgattcaaattgccgtttccagctccggcagcgcgcccgtcctcgcccgtttgctgcgtgaaaaactggaagccctgctgccgccgtctttgggcgatatggcggaaatctccggaagatggcgcgatgcggtcaaagccaaactgaaatccgttaccgaacgccgccgtttttgggaaaagcagttcaacggccgttttgccgccctcgttaaaaatcaacaaaccgcccaagccgaacaggagttggcaaagcagttggaacaaaattatcaaggcggttttgtgtctttggtcggtgcgggtcccggcgatgcggggctgctgacgctcaaagggctgcaggaaatccagcaggcagacgtggtgctttacgacgcgctggtttcagacggcatactgtccctcgtccgccgcgatgcggaacggatttttgtcggcaagcgcgcccggggcggccgcaccccgcaagaggacaccaatgcgcttatggtcaggctggcccgcgaaggcaggcgcgtggtgcgtttaaaaggcggagaccctttcgtgttcggacgcggcggcgaagaattggaaaccttggcacgccatcagatcccgttttcggtcgtccccggcattaccgccgccgtcggcgcgaccgcctatgccggcatcccgctcacgcaccgcgattatgcccaaagtgcggttttcgtaaccggccaccgcaaggcggatgcgcccgacatcgaatggcagaccctcgcccgcagccgccagaccttggtgatttatatgggtgcgctcaaagccgccctgattgccgaacggctgcaacagcacggacgctcgcccgacacgccggcagccgttatcagccaaggcacgctgccggctcaaaaaaccgcaaccggcacgctcgccaaccttgccgaactcgccgaaaccgcgccgaatccggcattgattgtcataggcgaagtggtggggctgcacgaaaaactcgcctggttcggtgaaaacggcgaaggagaaaaccgggtcgggcaggcgtatcccgcattgggcggactgaatgccggacaacgggcggcataa

SEQ ID NO: 38640 - DNA, 648 bp, Neisseria meningitidis
  misc_feature 6, 7, 8, 9, 10: 'n' is a, c, g or t
gtgtgnnnnngaaacgccttaaacggcatccctgatgaattttccgacatcgactgcctcatcaacaatgccgggctggctttgggtctggacacggcggacaaggcggattttgaagattgggaaacaatgattcaaaccaatgttttgggtttgacgtttctaacgcgcaagattttgccgaatatggtggctcggggcggcggttatgtgatgaatttgggttcgattgcaggcaattatgcttatgccggcagcaacgtttacggggcgaccaaggcgtttgtgcgccagttcagcctgaatttgcgcgcggagttggcggataagaacatccgcgttaccaatatcgagccgggtttgtgcggcaatacggagttttccaacgtgcgcttcaaaggcgatgacgagaaggcagcaggcgtgtatgagggtgtggaatttatccgccccgaagatattgcggaaaccgcattgtggctgtaccgccggccggcgcatatgaatgtgaacacgattgaaattatgcccgtggcgcagacttttgcaggaatgaaggtgataaaaaaagccgtgccggaagtgcgggaagactttgaaaaacagagtatgtcgctgttttcccgcatcagatcttggttcaaatga

SEQ ID NO: 38641 - DNA, 3216 bp, Neisseria meningitidis
atgcccaaacgtaccgacctaaaatccatccttatcatcggcgccggccctatcgttatcggtcaggcctgcgaatttgactattcgggcgcacaggcctgcaaggctttgcgtgaagaaggctataaagtcattttggtaaactccaaccccgccaccatcatgaccgaccctgaaatggcggatgttacctacatcgagccgattatgtggcagacggtggagaagattatcgccaaagagcggcccgatgcgattctgcccacgatgggcggccagaccgcgctgaactgtgcgctggatttggcgcgcaacggcgtgctggcgaaatacaacgtcgagttaatcggcgcgacagaagacgcgattgacaaggcggaagaccgtggccgctttaaagaagcgatggaaaaaatcggtttgtcttgcccgaaatcttttgtctgccacacgatgaacgaagccttggcggcgcaagaacaggtcggcttcccgacgctgattcgtccgtctttcacgatgggcggttcgggcggcggcattgcctacaataaagacgagtttttggcgatttgcgaacgcggtttcgatgcgtcgcccacgcacgagctgctgattgagcagtccgtcctcggctggaaagagtacgagatggaggtggtgcgcgataagaacgataactgcatcatcatttgctcgattgaaaacttcgacccgatgggcgtgcatacgggcgactcgattacggttgcgccggcgcaaacattgacagacaaagaataccaaatcatgcgtaatgcttcgttggcagtattgcgcgaaatcggcgtggacacgggtggctcaaacgtgcagtttgcggtgaaccctgaaaacggcgagatgattgtgattgagatgaacccgcgcgtgagccgttcatccgcgctggcttccaaagcgacgggcttcccgattgcgaaggtggcggcgaaactggcggtcggctttacgctggacgagttgcgcaacgacatcaccggcggtcgcacgcccgcgtcgttcgagccttcgattgattatgtggtaaccaaaatcccgcgtttcgcgtttgaaaaattccccgccgcagacgaccgcctgactacgcagatgaaatcggtgggcgaagtgatggcgatgggacgcacgattcaggaaagcttccaaaaagccttgcgcggcttggaaacaggcttgtgcggcttcaaccctcgcagcgaagacaaagcggaaatccgccgcgaactggccaaccccggccctgagcgtatgctttttgtagccgatgcgttccgcgcaggcttcacactggaagaaatccacgaaatctgcgccatcgacccttggttcttagcgcaaatcgaagacttggtgaaggaagaaaaagcggtttcagacggcattttgagtgatttggatttcgccgccttacgtcgtctgaaacgcaaaggcttctccgacaaacgcatcgcgcagcttttgggcgtaaaagaaaaagaagtgcgcgaacaccgctacgtgctgaacctgcatccggtttacaaacgcgtcgatacctgcgccgccgagttcgccaccgaaaccgcctacctctattccacttacgaagaggaatgcgaagcgcgtccttccgaccgcaaaaaagtgatgattctcggcggcggcccgaaccgcatcggtcagggcatcgagtttgactactgctgcgttcacgccgcgctcgccctgcgcgaatccggttttgaaacgattatggtcaactgcaacccagaaaccgtgtccaccgacttcgacaccagcgatcgtctgtactttgagccgctgacgctggaagacgtgctggaaatcgtccgcaccgaaaatccgtggggcgtgattgtgcattacggtggtcaaaccccgctgaaactcgccaacgcattggttgaaaacggcgtgaacatcatcggcacatccgccgacagcatcgacgccgccgaagaccgcgaacgcttccaaaaagtgttgaacgacttaggtctgcgccaaccgcccaaccgcatcgcccacaacgaagaagaagcactcgtcaaagccgaagaaatcggctatccgctggtcgtgcgcccgtcttatgttttgggcggccgcgccatgcagattgttcactctgccgagcagttgcaaaaatatatgcgcgaagccgtgcaggtttccgaagacagccccgtgttgctcgatttcttcctcaacaacgcgattgaagtcgatgtggactgcgtttcagacggcaaagacgtggttatcggcggcattatgcagcacgtcgaacaggcgggcatccactccggcgactccggctgctcgctgccgccctactccttaagcgaagaaatccaagacgaaatccgccgccaaaccaaagcgatggcgtacgcgctgggcgtggtcggtctgatgaacgtgcagtttgccgtgcaggacggcgtggtgttcgtgttggaagtgaacccgcgcgccagccgtaccgtgcccttcgtctccaaagccaccggcgtgccgctcgccaaagtcggcgcacgctgcatggcaggtatttccctgaaagaacaaggcgtggaaaaagaagttgtccccgatttctatgccgttaaagaagccgtgttcccattcatcaaattcccgggcgtagacacgattttgggaccggaaatgcgctccaccggcgaagtgatgggcgtgggcgcaagcttcggcgaagcctactacaaagcccaactcggtgcgggcgaacgcctcaacccgaccggcaaaatcttcctctccgtgcgcgaagaagacaaagaacgcgttatcaaaaccgctaaaaacttccaggttttaggctacggcatctgcgccacacgcggcacggcgcaatacctgaccgaacacgggctgattgtccaaaccatcaataaagtccccgaaggccgcccgcacatcggcgacgcactgaaaaacggtgaaatcgcactggtcgtgaataccgtttccagcgatccgcaatccgtgtccgacagccacatcatccgccaaagcgcattgcagcaacgtgtgccgcaatacaccaccactgccggcggcgaagcgatgagcgaaggtgcgaaaagccgagaccatctgggcgtgtacagcgttcaagagttgcacgggcgtttgaaaaaccgcaactga

SEQ ID NO: 38642 - DNA, 225 bp, Neisseria meningitidis
ttggttttttggttgcagcgtttgaaatacccgttgttgctttggattgcggatatgttgctgtaccggttgttgggcggcgcggaaatcgaatgcggccgttgccctgtgccgccgatgacggattggcagcattttttgccggcgatgggaacggtgtcggcttgggtggcggtgatttgggcatatctgattattgaaagtgaaaaaaacggaagatattga

SEQ ID NO: 38643 - DNA, 1284 bp, Neisseria meningitidis
atgtttgaacgcagtgtgattgcaatggcttgtatttttgccctttcagcctgtgggggcggcggtggcggatcgcccgatgttaaatcggcggacacgctgtcaaaaccggccgctcctgttgttgctgaaaaagagacagaggtaaaagaagatgcgccacaggcaggttctcaaggacagggcgcgccatccacacaaggcagccaagatatggcggcagtttcggcagaaaatacaggcaatggcggtgcggcaacaacggacaaacccaaaaatgaagacgagggaccgcaaaatgatatgccgcaaaattccgccgaatccgcaaatcaaacagggaacaaccaacccgccgattcttcagattccgcccccgcgtcaaaccctgcacctgcgaatggcggtagcaattttggaagggttgatttggctaatggcgttttgattgatgggccgtcgcaaaatataacgttgacccactgtaaaggcgattcttgtaatggtgataatttattggatgaagaagcaccgtcaaaatcagaatttgaaaatttaaatgagtctgaacgaattgagaaatataagaaagatgggaaaagcgataaatttactaatttggttgcgacagcagttcaagctaatggaactaacaaatatgtcatcatttataaagacaagtccgcttcatcttcatctgcgcgattcaggcgttctgcacggtcgaggaggtcgcttcctgccgagatgccgctaatccccgtcaatcaggcggatacgctgattgtcgatggggaagcggtcagcctgacggggcattccggcaatatcttcgcgcccgaagggaattaccggtatctgacttacggggcggaaaaattgcccggcggatcgtatgccctccgtgtgcaaggcgaaccggcaaaaggcgaaatgcttgctggcacggccgtgtacaacggcgaagtgctgcattttcatacggaaaacggccgtccgtacccgactagaggcaggtttgccgcaaaagtcgatttcggcagcaaatctgtggacggcattatcgacagcggcgatgatttgcatatgggtacgcaaaaattcaaagccgccatcgatggaaacggctttaaggggacttggacggaaaatggcggcggggatgtttccggaaggttttacggcccggccggcgaggaagtggcgggaaaatacagctatcgcccgacagatgcggaaaagggcggattcggcgtgtttgccggcaaaaaagagcaggattga

SEQ ID NO: 38644 - DNA, 444 bp, Neisseria meningitidis
atgtatttgacacaacatacggactacgggctgcgcgtccttatctacactgccatcaacgacgatgcgctggtcaacatcagtaccatcgccgtaacctacggcatttccaaaagccatctgatgaaggtcgttaccgcgctggtcaaaggcggcttcctccacagtgtgcgcggaaaaggcggcggtctgcggcttgccgcaccgcccgaccgcatcaacatcggctcggttgtccgccacctcgaaccgatgcagctggtcgagtgcatgggcgagaacaacgaatgcctgattacaccgtcctgccggctgacgggcatactcggcggcgcgatgaagtcgtttttcacgtatctggacggtttcacgctccaagacctgctcaacaagccgacctacgacctgctctacgaaccgagaattccgattgcggtgcagtaa

SEQ ID NO: 38645 - DNA, 324 bp, Neisseria meningitidis
atgtttaaggacgaactaaatgaatttatccgattgatatccgatccggaaagtgaattggatgaatggtatttgagtgattttaaagatgaacatatatgggaaatgcaaagttacgaagcattttcatgtttgcgggaagcagtcccctatttgtttgcttatccccgatacgggtatgaactgttggagataatttccgcgttaaaagaaacatctgatacgacagaattattttatgagccgggtatcgtgcctttgctgattgatttatataaagaagatagttatctggtaaatatggtcaaacggatattcaaatga

SEQ ID NO: 38646 - DNA, 693 bp, Neisseria meningitidis
atgaccgcctttgtccacaccctttcagacggcatggaactgaccgtcgaaatcaagcgccgtgccaagaaaaacctgattatccgccccgccggcacacataccgtccgcatcagcgtcccaccctgcttctccgtctccgctctaaaccgctggctgtatgaaaacgaagccgtcctgcggcaaacactggcgaaaacaccgccgccgcaaactgccgaaaaccggctgcccgaatccatcctcttccacggcagacagcttgccctcaccgcccatcaagacacgcaaatcctgctgatgccgtctgaaatccgtgttcccgaaggcgcacccgaaaaacagcttgcgctgctgcgggactttttggaacggcaggcgcacagttacctgattccccgcctcgaacgccacgcccgcaccacacaactgttccccgccccctcctcgctgacctctgccaaaaccttctggggcgtgtgccgcaaaaccacaggcatacgcctcaactggcggctggtcggcgcaccggaatacgttgccgactatgtctgcatacacgaactctgccacctcgcccatcccgaccacagccccgccttttgggaactgacccgccgcttcgccccctacacgcccaaagcgaaacagtggctcaaaatccacggcagggaacttttcgccttaggctga

SEQ ID NO: 38647 - DNA, 876 bp, Neisseria meningitidis
atgttacaaggtagcctggttgccctgattaccccgatgaatcaagacggcagcatccattacgaacaactccgcgacttaatcgactggcacattgaaaacggcacggacggcatcgtcgccgtcggcacgacaggcgaatccgccaccctctccgtcgaagaacacaccgccgttatcgaagccgtcgtcaaacacgttgccaaacgcgtccccgtcatcgccggcacaggggcgaacaacaccgtcgaagccatcgccctttcccaagccgccgaaaaagccggcgcggactacaccctctccgtcgtcccctattacaacaaaccttcgcaagaaggcatgtaccgccatttcaaagccgttgccgaagccgccgcgattccgatgatactctacaacgttcccggccgtaccgtcgtcagcatgactaacgacaccatcctgcgcctttcagaaatccccaatatcgtgggcgttaaagaagccagcggcaacgtcggcagcaacatcgaactcatcaaccgcgcccccgaaggcttcgtcgtcctgtccggcgacgaccacaccgccctaccgttcatgctctgcggcggacacggcgtgattaccgtagccgccaacgccgcgcccaagctctttgccgatatgtgccgcgccgcgcttcaaggcgatatcgcccttgcacgcgaactcaacgaccggctgattccgatttacgacaccatgttctgcgaacccagccccgccgcaccgaaatgggcggtatccgccctgggcagatgcgaaccgcacgtccgcctgccgctcgttccgctgacggaaggcggacaggcaaaagtccgcgccgccctgaaagcctcaggacaactttaa

SEQ ID NO: 38648 - DNA, 231 bp, Neisseria meningitidis; identical to SEQ ID NO: 37019

SEQ ID NO: 38649 - DNA, 477 bp, Neisseria meningitidis
atgaaaacaaatttcaaacagaaaattatcgaacaggcacgcagcgaaggcttgcaggtaaccgctttgcgcgagcaggtattagatattgtcttgcagcaaagcggcgtgattaaagcctacaacgtcttgtcgcagatgcagcagcaaagcgagggcgtgcttgcaccgcctaccgcctaccgcgcccttgatttttgggcggagcagggcgttttgcacaaagtggcggcggtcaacggctatattttgtgcagccacgcgcagcacgagtgcgacgaccattgccacgaccacgaagaagccgaagcgcaccacagcgcgtttattttggtctgcaccgaatgcggcacggcggacgagcaaaccctcagccacgagtgggcggcactgcgcgcaggcgttgccgaaagcggctttgcgctgaaagaagaacacgttgttttaactggaatctgtaaaaaatgtcagaaatga

SEQ ID NO: 38650 - DNA, 375 bp, Neisseria meningitidis
gtggatgagaaacaaaaaattaagattcttgattttcaaatcgatttatcctcaatttttaactcttataaaaatcaaatgggtattaatattcaagataaaaacttaaaaaacaatttctgttcttttatggaagaactgttaaatgacggttcaatccgtttacatgattataccgacggtatcggaattcctctaactggaacttcaaaagaacaagtgcagaaattgaaagacatatggcctactttggaagatgcccaagcaatatggcctgaagacccttggtattacttagaatggctttggtgggatattgcgtgtccaatagatttggccgatttgccgaatattgatatttatgagcaagcgtag

SEQ ID NO: 38651 - DNA, 696 bp, Neisseria meningitidis
atgatgaaggatttgaatttgagcaacagcctgttcaaaggctacaacgacaaacatggcttaatgatttgtggctatgaatggggttggagtaaagccgatgaggctgcttatgtagcaggtgaatacaaactccctgaaaacaaaatcgaccatacatttgcaaacaaatccctctatttcggagagcaggcaaaaaagtggcgttacgacaatacgataaaaaattggtttgaaatgtggggacaccccttagacgaaaatggattgggcggtgcatttgaaaaatccctggttcaaaccaactgggctgctacacagggcaacactatcgacaatcccgacaagttcacacaacccgagcacatcgataattttctctaccacatcgaaaaactgcgtccgaaagtcatcctcttcatgggcagcaggttggcggattttctgaacaaccaaaatgtactgccacgcttcgagcagttggtcggtaagcagaccaaaccgctggagacggtgcaaaaagaatttgacggtacacgtttcaatgtcaaattccaatcgtttgaagattgcgaagtcgtctgctttccccatcccagtgccagtcgcggtctatcttacgattacatcgccttgtttgcgcctgaaatgaaccggattttatcggactttaaaacgacacgcggattcaaataa

SEQ ID NO: 38652 - DNA, 1371 bp, Neisseria meningitidis
atgatcaaccccatcgcctcgctttcccctttagacggccgttatgcccaatccgttgaagcattgcgcccgattttttccgaatacggcctgatgaaagcgcgcgtcaaagtcgaattaaactggctcaaagccctcgccgccgagccgaagattgccgaagtgccgcccttcagtgccgaaacgcttgccgaaatcgacacggtgattgaaaacttttcattggaagacgcggccgccgtcaaagccatcgaagccaccaccaatcacgatgtcaaagccatcgaatattggctgaaaaaacgttttgccgaagtgcccgaagtcgccgccgtgagtgagttcatccacttcgcctgcaccagcgaagacatcaacaacctgtcccacgctttaatgctgcaagaagcgcgtgaggctgttttgctgcccaaactggcagaaatcatcggcaaactcaccgctatggcgcacgaccttgccgccgtcccgatgatgagccgcacccacggccagcccgccacgccgaccactttgggcaaagaaaccgccaatgtcgtgtaccgcctgcaacgccagtttaaaaacctgcaagcgcaagaattcctcggcaaaatcaacggtgcggtcggcaactacaatgcccatatggccgcttatcccgatgtggattgggaaacccactgccacaacttcgttgaaatcggcctcggtttgaccttcaacccctataccatccaaatcgagccgcacgactatatggctgaattcttccaaaccctcagccgcatcaacacgattctcatcgactttaaccgcgacgtttggggttatatttcattgggttacttcaaacaaaaagtcaaagcgggcgaagtcggctcttccacgatgccgcacaaagtcaaccccatcgattttgaaaactccgaaggcaacctcggtatggcaaacgccgtattgggttttttggcggaaaaactgcccgtctcacgctggcagcgcgatttgaccgacagcaccgtcttacgcaatatgggcgtgggcgtgggctatgccgtgttgggctttgccgcccacctgcgcggtctgaacaagctcgaacccaaccctgccgcgcttgccgccgatttggatgccacttgggagctgctcgccgagccgattcaaaccgtgatgcgtcgttacggcgtggccaatccttacgaaaagctcaaagacctgacgcgcggcaaaggcggcattacgcccgaagtgctgaaagtcttcatcggatcgttggaaattccggcagaagccaaagcaaaattgcttgagctgactcctgcactgtatgtgggcaaggctgaagcgttggcgaaacggatttga

SEQ ID NO: 38653 - DNA, 1470 bp, Neisseria meningitidis
atggaaaaacataatgggacttatcgggatttgcaccgtccagcttcggaatttgcgacgcgggacgaatatttggaacatgaattgcagattatgcaaccaaaacgctggcggcccaacctgccctttcgcgattaccgcttcgagtgggaggatttgattcctgcgatggcgggaacgattggaaaagtggtgatggtgggggcggtggcggcggcgtttgccgcacctttggggctgcctgacagctttgtactggaaaatgtgcgctatgagcttttaatcgccgccgcgtttatcttattggtatcgggcttttttctgcccggcgccaacctgcccggtacgcacgggccgctgattccgatgattcccatcgttgtgtcggcaggcgggcatcctttggcgttcggcatttcgattgcggttttaggtctgctgatggctttatttcgcggcggcagtattatggcgaagctgacaagcaacggcgtatgcggcggattattactctatttgggctttatcggcacgacggggcaggtaaaaaaattgttttcgtgggcaagcggttttaatatgccctacatcgcttttaccgtcattattgtaacgattgtgatgtacgctttgttggagcattggaaaaaacgctggttagccgtgcctttgggatgcttgattgccggtgtggtggcatttgcattgggtgcgccgtttgagtttcacaccgcccccggcctgcctccaatgagtcctgcttattggtggggtgaaaacagcggctggcatctggggttgccgacggcagaaagttttttggttgtctttccatttgcggtattggctgttgcaatgtggtcgcccgattttttaggacatcaagtgttccaaaaaatcagctatccggaaaaaaccgataaggtattgatgaatatagacgacaccatgacaagttgttctgtccgtcaagcagtgggttctattttagggggtgcaaattttacctcttcttggggaacttatatcgtaccggcatcgattgccaaacgccccattccgggcggtgcggttttaacggcggttttatgtattatcgccgggttatggggctatccgatggacttggcgatttggcagccggtattgagcgtagccttggtcgtaggcgtatacttaccgcttttggaagcgggcatggaaatgacgcgcaaaggcaaaaccacccaatccgccgccatcgtggtgttctcttccgccttggtcaatccggttttcggctgggcgttgacgatgctgttggataatttgggcttaatcggctgcaaagagcgcagtgcgcaattaggtttcgccggacgcgtgttgatacccgcagtaggtttcttgatcttgtgtgtggcgatgggtgcggtcgggatgctgcccggtatcccgccgtttttggaacacttcaaatctttgggctag

SEQ ID NO: 38654 - DNA, 330 bp, Neisseria meningitidis
atgggcagcctgattattgaagatttgcaggaaagcttcgaaaaagaagcagttaaaggcaaagagattaccgtgcattacacaggttggctggaagacggcaccaaattcgactccagcctcgaccgccgccagccgctgaccatcacgctcggcgtcggacaagtcatcaaaggctgggacgaaggcttcggcggaatgaaggagggcggcaaacgcaagctgaccatcccttcggaaatgggctacggcgcacacggcgccggcggcgtgattcccccgcacgccactttgatatttgaagtcgagctgctgaaagtgtacgaataa

SEQ ID NO: 38655 - DNA, 1083 bp, Neisseria meningitidis
atgcaaaccgcaaacaaaaaaaccatcctcgttaccggcggcgcgggctttatcggctctgccgttgtccgccatatcattcaaaacacccaagattccgtcgtcaacctcgacaaactgacctacgcgggcaatctcgaatcgctgaccgacattgccgataatccccgctatgctttcgagcaagtggacatttgcgaccgcgccgaactcgaccgcgtattcgcacaacaccggcccgatgccgtgatgcacttggcggcggaaagccatgtcgaccgctctatcggttcggcaggcgagtttatccaaaccaatatcgtcggcacattcaatctgcttgaagcagcccgcgcctactggcaacaaatgccgtctgaacagcacgaagccttccgtttccaccatatttccaccgatgaagtctatggcgatttaggcggcacggacgatttgtttaccgaaaccgcgccctacgcgccgtccagcccctactctgcctctaaagcgtccagcgaccacctcgtccgcgcgtggttgcgtacttacggcttgccgaccattgtaaccaactgctccaacaactacggtccttaccattttccggaaaaactcattcctttgatgattctgaacgcgcttgacggcaaaccgctgcctgtgtacggcgacggtatgcaaatccgcgactggctgtttgtcgaagaccacgcgcgcgcactgtatcaggttgttaccgaaggtgttgtcggcgaaacctacaatatcggcggccacaatgaaaaagccaatattgaagtcgtcaaaaccatctgcgccctgctggaagaactcgctcccgaaaaaccggccggtgtggcgcgttatgaagatttgattactttcgtacaagaccgccccggccatgacgtacgctacgccgtcgacgcagccaaaatcaggcgggatttgggctggctgcctttggaaaccttcgagtccggcctccgcaaaaccgtgcaatggtatctggacaacaaaacctggtggcaaaatgtattgaacggcagctatcgtttggaacgtttaggtactggaaaatag

SEQ ID NO: 38656 - DNA, 1137 bp, Neisseria meningitidis
atgaaaaacatatctctttctccgcccgccatgcttggcatcctcggcggcggacaattaggcagaatgtttaccgttgccgccaaaaccatgggctacaaagtaaccgttctcgaccccgatccggacgcgccggcagcagaatttgccgactgtcatttatgcgcgccgtttaacgaccaagctgctttggacgaattggcaaaatgcgcggcggtgaccactgaatttgaaaacgtcaatgccgatgcgatgcgttttctcgccaaacacaccaatgtttcccccggcagcgactgcgttgccatcgcgcaaaaccgcattcaggaaaaggcatggatacgcaaagcaggattgcaaaccgcgccgtatcaagcaatttgcaaagccgaagacatcactgaagaaagcatacaatttctgcccggcatcctgaaaaccgctacattgggctatgacggcaaaggccaaatccgcgtcaaaacggtggatgaactcaaagccgcgtttgccgaacaccgcggcgtggattgcgttttggaaaaaatggtggacttgcgcggcgaaatttccgttatcgtatgccgtctgaacaatgacaacgtgcaaactttcgatcctgccgaaaacattcacgaaaacggtatcctcgcctactccatcgtcccagcccgactgagtgccgacattcagcaacaggcgcgacaaatggcgcagcgtttggccgatgaattgaactacgtcggcgtattggcggtagaaatgtttgttgtcggcgacacgcatgaattggtcgtcaacgaaatcgcgccgcgtccgcacaattccggccaccataccgtcgacgcctgcgcggcagaccaattccagcaacaggtccgcctgatgtgcaacctgccacctgctgacaccaaattgctgagttcttgctgtatggcgaatattttgggcgacgtttggcaggaagacggcggcgaaccggattggtttcccctgcaaagccggccggacgcgcacctgcacctttacggcaaaaaaaccgcgcacaaagggcggaaaatgggacactttaccgttttaaccaccgattcggacaccgcatttcaagaagcaaaaaaactgcatcagtccctataa

SEQ ID NO: 38657 - DNA, 2151 bp, Neisseria meningitidis
atgctcaccgatttagaaaaaaacgccatccgcgaccattaccaaaacatcggcaaaaacctgcccggtttccgtccgcgcgcttcgcagcgggaaatgattgcggcggttgccaacgctttttcgcggacgttggcgcgcgaagaaggcggcgagccgcccaagcgcgagggcgagagcatcgccgtaatcgaagggccgaccggcgtgggcaaatcgcttgcctacctgctggcgggcggcatcatggcgcagacgcgcggcaagcggctgattgtgagcagcgcaacggttgccttacaggagcagttggttgaccgcgacctgccgtttctggtcgaaaaaagcggtttggaactgaccttcgcgcttgccaaagggcgcggccgctatctctgcccttacaaactctaccaactgacgcaaaacaacgcccagcaaaacctgcttggttttgaagcaccggaagtattgtgggacagcaaacccaagcccgaagaattgaagctgctgcacgacattgccgacgaattttccgcccgacggttcaacggcgaccgcgacacttggccggaaaaaatcgatgacgcgatttggctcaaagttaccaacgaccgccacggctgcctgaaaaccgcctgtcccaaccgtccggaatgtccgttttacctggcacgcgatgtcttggaaaccgtcgatgtcgtcgttgccaaccacgaccttctgcttgccgacatcagtatgggcggcggcgtgattctgcccgcgcccgaaaacagtttctattgcatagacgaagcgcaccacctgcccaaaaaagccctcagccgttttgccgccgaacattcgtggaatattgccgtttggacgctggaaaaactgccgcagctgaccggcaagattgccgcgcttaccgataaagccgaacttgccaaccttgccgacgaagccgccgcatccttgctcgacagcctgcacgaatggcagttccatttggcggaagagccgtctttgagcttggggccgtctgaaaacgacaggcgaaccaacagcgaaccgacttggctgtgggaagacggcaaaatccccgaaggcctcgaaaccaccgtttccaacaccgccgttgctgtgcgcagcctgctcaaacacgttatcgggctgaacgatgcgctttctgccgcacgccgcgaaaaagaacaggacggcgcgctcctcgaccgcctgaccggcgatttcggcatcttcatcgcccgtatcgaacaaatcagcgcggtttgggatttgctctccaccgtccccctcgaaggcgaagagccgctggcaaaatggataacccgccgcgccgacgacaaaaacgactacattttcaacgccagccccatcagcagcgcgtcccacctcgccaacagcctgtggcggcgcgcggcaggcgcggtattgacctccgccaccctgcaatccttgggcaactttaacctgatgctgcgccaaaccgggctgcaatggctgcccgagaccaccaccctcgccctcaaaagcccctttgactttgaaaaacagggcgaactctacatcccccccatatacgccagccccaaagaccccgaagcccacaccgccgccatcatcgagtggctgcccaagctcatttcgcccggcgaagccatcggcacgctcgtcttgttttcctcgcgcaaacaaatgcaggatgtcgccctgcgcctgcccggagactacctgccgctcttgctcgtacaaggcgaattacccaaagccgttctcctgcaaaaacaccaccgggccatagaagaaggcaaagccagcatcatcttcggactcgacagctttgccgaaggactcgacctgcccggcaccgcctgcgtgcaagtcatcatcgccaaacttcccttcgccatgcccgacaaccccatcgaaaaaacccaaaaccgctggatagaacagcgcggcggcaaccctttcatcgaaatcaccgtccccgaagccggcatcaaactcatccaggccgtcggccgcctcatccgcaccgaacaagactacggccgcgtaaccatcctcgacaaccgcgtcaaaacacagcggtacggccaacaattattagccggcctgccaccgtttaaaaggatagggtaa

SEQ ID NO: 38658 - DNA, 633 bp, Neisseria meningitidis
atgacggtatgggtcggactgaccggcggaatcggcagcggcaaatcggcagccgcgcaatgttttgccgatttgggcgtaccgcgtatcgatgcggatgcggcggcgcactcgctgacggcttcagacggcatcgccctgccggaaatcaggcggctgttcggcgacaccgttttcgacacacagggtttgttgcgacgcgacatattgcgtaaagaagtctttgcctccccatcgcgaaaagccttgctcgaatccgtgatgttgccgctgattttctcagaaatcaaaaaacagcaagaaacctttaccgatgcggcttacggcattgtcgaaattccgctgctgacggaaaagcgtcaatttatcatcctgatacggcgtgtcctgaccataagtgcccctgtggaaaaacgtatcggcagggtgatggcccgcagcgggctgacgcgcggcgaggtggctgccgtcatcagccatcaggcatccgaatccgaacgcctgctgcttgcagacgatgtgctgctcaatgacggcagcctcaaaagcctgcgtgagaaaacaatgcgcctgcacgcgttttattcagggattttcgcctcaaaaccaacacaaggaaaacacaatgactga

SEQ ID NO: 38659 - DNA, 312 bp, Neisseria meningitidis
atggcttccatccacgaccaaattaaagaagtagtaacgacacaccgcgtcgtattgtttatgaaaggtacgaagcagtttccgcaatgcggtttctcttcccgcgccgtgcaaatcctgaacgcggcgggctgcaccgattacgttaccgtcaacgtattggaaaatcccgaagtacgccaaggcattaaggaatacagcgactggccgaccatcccccaactttatgtgaacggcgagtttgtcggcggttcggacatcctgatggaaatgtatgaggcaggcgagctgcaagagctgctgaaagcctga

SEQ ID NO: 38660 - DNA, 630 bp, Neisseria meningitidis
atgaacctttttcaaaacgccaaattcttcacgacggtcaaccaccttaaagacctgcccgacacccctctcgaaattgcctttgtcggcaggagcaatgccggaaaatccagtgccatcaataccctgaccaaccatgtccgtcttgcctacgtttcaaaaacacccggacggacgcagcatatcaacttcttcgagctgcagaacggcaattttatggtcgatttgcccggctacggttatgcccaagtccccgaagcagtacgcgcacattgggtcaatctgctcggcgactatctgcaacagcgcaaacagcttatcgggctggttttgattatggatgcccgccatcctttaaaagaactcgacatccgtatgctggactttttccacacgaccggcagaccggttcacatcctgctgtcaaaagccgacaaattatccaaaaacgaacagataaaaaccctgtcccaagtcaaaaaactgctcaaaccttattccgacaggcaaaacatcagcgtacagctgttttccagcctgaaaaaacaaggtattgacgaggccaaccgaactgtcggaagctggtttgacgcagcagatgccgccgcttcctctccaaaggaaaactga

SEQ ID NO: 38661 - DNA, 1629 bp, Neisseria meningitidis
atgatttctaccaacggcatcaccatgcagttcggcgcgaagccgctgtttgaaaacgtatccgtaaaattcggagaaggcaaccgttacggcctgatcggcgcgaacggttcaggcaaatccaccttcatgaaaatcctcggcggcgatttggaacagacggccggcgaagtggcgattgaaaacggcgtgcgtttgggtaaattgcgccaagaccagtttgcctacgaagacatgcgcgtgctggacgtggtgatgatggggcataccgaaatgtgggcggcgatgaccgaacgtgatgcgatttacgccaatcccgaagccaccgaagacgactacatgaaagccgccgaactggaagccaagttcgccgaatacgacggctacaccgccgaagcgcgtgccgccgaactgttgagcggcgtgggcatttccgaagatttgcacaatgcgaaaatggcggaagtcgccccgggcttcaaactgcgcgtattgctggcgcaggcgctgttctccaagccggatgtattgctcttggacgaaccgaccaataacttggacattaataccatccgctggttggaaggcgtgttgaaccaatacgactccacgatgattatcatcagccacgaccgccactttttgaacgaagtctgcacacacatggcggatttggactacaacaccatcaccatctatccgggcaactacgacgactacatgctcgcttctgcccaatcgcgtgagcgcgccctgaaagacaatgccaaggcgaaagaaaaattgcaggaattgcaagaatttgtggcgcggttcagtgccaacaaatccaaagcccgtcaggcaaccagtcgtctgaagcaggcagacaaaatcaaatcggaaatggtcgaagtcaaaccctctacccgtcaaaacccgtatatccgttttgaagccgatgaaaaagccaagctgcaccgtcaggctgtggaagttgaaaaactggcgaaacgctttgaaacccagttgtttaaaaacctgaacttcatccttgaagcgggacaacgcctcgccatcatcggcccgaacggcgcgggcaaatccaccctgctgaaactcttggccggcgcgtacaaccccgaatattcagacggtctgctgccggacgaaggcagcatcaaatgggcggaaaaagccagcgtcggctactatccgcaagatcacgaaaacgacttcgatgtcgatatggatttgagcgaatggatgcgccaatgggggcaggacggcgacgacgaacaagtcatccgcggcactttggggcgtttgctcttcggcagtaacgatgtcgtgaaaaaagtgaaggttctctccggcggcgaaaaaggccgtatgctttacggcaaactgttgctgttgaaacccaatgtcttagtcatggacgaaccgaccaaccacatggatatggaaagcatcgaatccttgaacatggcgctggaaaaatacaacggcacgctgattttcgtctcccacgaccgtcagttcgtttcttccctggcaacccaaatcatcgaactggacggcaaaggcggatatgaacactacttgggcgattacgaaagttacttggagaaaaaaggcgtagcataa

SEQ ID NO: 38662 - DNA, 1056 bp, Neisseria meningitidis
atgactattttatcggacgttaaagcattaggacaacaaatctggctggacaacctttcccgctcgctcgtgcaaagcggcgaattggcgcaaatgttgaaacaaggcgtgtgcggcgtaacttccaatcccgccatctttcaaaaagccttcgccggcgatgcgctttacgccgacgaggttgccgccctcaagcagcaagacctgacccccaaacaacgctacgaaacgatggcggttgccgatgtgcgtgccgcctgcggcgtctgtcttgccgaacacgaatccaccggcggcaaaaccggcttcgtcagcctcgaagtttcgcccgaattgtccaaagacgcgcaaggcacggttgaagaagcgcgccgcctctacgccgccatcgggtgcaaaaacgcgatgattaaagtgcctgccaccgacgcaggcatcgatgcgctcgaaaccctcgtttcggacggcatcagcgtgaacctgaccctgctgttctcacgcgcccaaaccctcaaagcctacgccgcctacgcgcgcggcattgccaaacgcttggcagccggacaaagcgttgcccatatccacgtcgtcgccagcttcttcatctcgcgtgtggacagtgcgctggacacaacactgcccgaccggctcaaaggcaaaatcgccatcgcccttgccaaagccgcctatcaagattgggaacaatatttcaccgcccccgaatttgccgcactggaagcccaaggcgcaaaccgcgtgcagcttttatgggcatctaccggcgtgaaaaacccagcctatcccgacacgctctacgttgacagcctgatcggcgcgcacaccgtcaacaccgttcccgatgccacgctcaaagcctttatcgaccacggcacagccaaagccacgctgaccgaaggcgtagaagaagcacaagcgcagctcgccgaaaccgccgcgctcggcatcgatgtcgaaaccttggcaacgcgtttgcaggaagacggtttgaaacagtttgaagaagcgtttgaaaaactgctcgcaccgttggtttaa

SEQ ID NO: 38663 - DNA, 1584 bp, Neisseria meningitidis
atgccgaacaaaaagaaaaaagccgcctttgcgcgtgctgcaacggagaacggtgtgccggacgtgtccaacatcaaaaattcatatgatgatttgatgtatgaatccaaagcattttcccaaaccgccatcaacgccttggaggctcgcgcccgcatgatgggtttgcagcccgcgcccgccgccaatgccaaggtcttggagctgggctgttcgatgggcggcaacatcatcacgcaggctctttattacccggatgcggaatttgtcggtatcgacttgtccggcaggcaggttgcgcagggcaacgccatcattgaaaaaatgggcttgaaaaatgtgcgtctggaagaaaaagatattttgaccgtcgatgagtcattcgggaagtttgactatatcatcgtccacggcatttggtcgtgggtgcctgacgcagttaaagacaaaattttttcgatttgccggaacaacttgaccgaacacggcattgcctatatttcatacaatgtttaccccggctggaaacggcaggagcagttgcgcgaaattatgtactttgccggcagggatgtgcttgaagaacccttggaagcacggacgcggaaaggcttggacgcgctcaaggcgctggcggaaattttagaaaacgacaagggcttggacggcggcggcaaacttccggcgattcaaaaaatattgaatcataatttttattacatcgcacacgaatatatggaggcgtttaacgacccgatttacgtcaacggcttcatcgaatgggcaaaccgccaccggctggcgtatatcggggatgccgatttgcacgcgtcttttgtttcttggatggcggagcatacgcgggagcggattctggcattggcagggggcgattatattgccaaagaattttacagcgatattttatccgaccgccaattccgccgttcgcttttatgccgtgaggaagtcggggatactgtcaggcgtgacgagtcggttgccgtcgaagtgatagaaagtttgaatttccgcccggcaagaggggaaacaatcaactttgatgaaaacgataccctgctttcgggcatacgcgatgtgatgaaaaccggagagccgtttaaaacggaagatgttgcggaaaatctcgcccgccgatttcccggtttgacattcgaccgtatgaaaatcaattcccagcttttattgcaaaccattctcgggcgtttttctgtttcatcagacaatgcgggcaaacaattttttgaagaccataaaacctatgtgccggcgcgttttacagattatgccgccgcctttgtggaacacggcgcggaagcgtttgtccggcctgccaaccgttacaacgaaagcaccccctcattcggatatgggcatttgtacattatgcggcaattgtcgcggccgacgagcaaacaggcattgattgaaacggttgccgaaaacttgaacatcgtcagcaccacgcccgacggtttgacattccatccgcctgccgaagtgtatgtggaagaaatattggcagacttggcagacaggcattttctcgtttcggcggattga

SEQ ID NO: 38664 - DNA, 2259 bp, Neisseria meningitidis
atgtacacaagaattatggaaatcagcccttggacgctgcgttcggcaaagctggaaaaagaacacaaacggctgcaagagagcctgaccagtttgggcaacggctatatgggtatgcgcggcagctttgaggaaacctactccgccgacagccacttgggcacctacatcgccggcgtgtggttccccgacaaaacccgcgtcggctggtggaaaaacggctatcccaaatatttcggcaaagccatcaacgcgctcaatttcagcaaagtcaaaatctttgtcgatggtcaagaggtggacttggcgaaaaacgatgttgccggcttctccgtcgaactcgatatgcagcacggcgtgttgcgccgctcgttcaccgtattcggcgtgcgtttcgatgtgtgcaaattcctgtccgtcgcacaaaaagagctggctctcatccgctgggaagccgtatctatcgacggcaaaacccaccaagtccgcatcgattccatcatcgatgccgacgtgaaaaacgaagattccaactacgaagaaaaattctggcaagtattggacaaaggcgtttcagacgaccgctcctacattgccacccaaaccgtcaccaatcccttcggcgtggaacaatttatcgtcaacgccgagcaaactttcgccggcagcttcaaagccctcggcggcagccaaaccgactggcaggtctccaattctttcgaggccgaagtcggcggcacgcccaaaacctttgaaaaacgggttattgttaccaccagccgcgattatcagggcttggaagcagtgaaagccgcaggccgtgccttgtcggaaaaagtcgcaggcgttgcgtttgaaaccttgctggacgcgcacaaagcaggctggctgcaccgttgggaaatcgccgacgtggtcatcgaaggcagcgacgaagcgcagcaaggcatccgtttcaatctgttccaactgttctccacctactacggcgaagatgcgcgcctgaacatcggccccaaaggctttaccggcgaaaaatacggcggcgcgacctattgggataccgaagcctatgccgtaccgctctacctcgcactggcggaacccgaagttacccgcaacctgctgcaataccgccgcaaccaactgccgcaggcgcagcacaacgcgcgcgaacagggcttggcgggcgcactctatccgatggtaacgtttacgggtatcgagtgccacaacgaatgggaaatcaccttcgaggaaatccaccgcaacggcgcgattccttacgccatctacaactacaccaactacaccggcgacgagggctatcttgccaaagaaggcttggaagtcttggtcgaagtgtcccgcttctgggcggaccgcgtccacttctccaaacgcaacggcaaatacatgattcacggcgtaaccggcccgaacgaatacgaaaacaacatcaacaacaactggtacaccaacaccctcgccgcatgggtattggactacacccgcgaagccttggcgaaatacccgcgtccggatttgaacgtgcgtgccgccgagttggaaaaatgggcggacatcagcgcgaatatgtaccgtccgcatgacgaagaactcggcgtattcgtgcaacacgacggcttcctcgacaaagacatccgccccgtgtccgcgctttcgcccgacgatttgccgctcaaccagaaatggtcgtgggacaaaatcctgcgttcgccctttatcaaacaggcggacgtattgcaaggcatctatttcttcggcgaccgtttcaatatcgacgaaaaacgccgcaatttcgacttctacgaaccgatgaccgtgcacgaaagctcgttgtcgccgtgtatccactctattctcgccgccgaactgggcaaagaagaaaaagccgtggaaatgtaccggcgcaccgcacgcctggacttggacaactacaacaacgacaccgaagacggcctgcacattacttctatgaccggctcgtggctcgccatcgtccaaggtttcgcccaaatgaaaacttggggcggtaaactcagcttcgcaccgttcctgccgagcgcatggacaggctacgccttccatatcaactaccgaggccgtctgattaaagtcgccgtcggcaaagaaaacgtcgtcttcaccctgctcaaaggcgagccgctcgatttgcaggtgtacggcaaagacatcacactcaacggcagccataccgccgcgttggaaaaataa

SEQ ID NO: 38665 - DNA, 1380 bp, Neisseria meningitidis
atgtttgctttcaaatccttactcgatatgccgcgcggtgaggcacttgccgtcgtcgtcgctctgattgccgcgatgggctataccatcatttcattggagtggctgccgcatatgtccattattgccgccatcgtcgtgctgattttgtacggcttggtgcgcggtttgaaatacaacgatatgcagcagggcatgataggcgcgttgaatcagggtatgggcgcgatttacctgtttttcttcatcgggctgatggtcagcgcgctgatgatgagcggcgcgattccgacgctgatgtattacggtttcgggctgatttccccgacttatttttatttttccgccttcgcgctgtgttccgtcatcggcgtgtccatcggcagcagcctgaccacctgcgccaccgtcggcgttgcctttatggggatggcggcggcgtttcatgccgatatggcgatgacggcgggcgcgattgtttccggtgcgtttttcggcgacaaaatgtccccgctttccgacaccacgggcatttccgcgtccatcgtcggcatcgacctgtttgagcacatcaaaaatatgatgtacaccaccattcccgcgtggctcatcagtgcggcactgatgctgtggcttcttcccagtgtcgccgcgcaggatttgaacagcgtcgaatccttccgcagccagcttgaagccacgggattggtgcacggctattcgctgattccgtttgcactgttggtcgttttggcattgatgcgcgtcaatgccgtggtcgccatgctctttaccgtcatggttgccgttgccgtaacgtatctgcacagtacgcccgatctgcgtcagctcggcgcgtggttttacggcggctacaaactcgaaggcgaagcgtttaaagacattgccaaactcatttcgcgcggcggtttggaaagtatgttcttcacgcagactatcgttatcctcgggatgagtttgggcgggctgttgtttgcactgggcgcgattccttccctgctggatgccgtccgcagctttttgacgaatgccgggcgtgccacattcagcgttgctatgacttcggtcggggttaatttcctgattggcgagcaatatttgagtattttgttgtcgggtgaaacgttcaaacccgtttacgataagctcggtctgcattcgcgcaacctgtctcggacgctcgaagatgcggggacggtcatcaacccgcttgttccgtggagcgtgtgcggcgtatttatcagccatgcgctgggtgtgccggtctgggaatatctgccctatgcctttttctgctatttgagtttggctttgaccctgttattcggctggacggggctgactttgagcaaaaaataa

SEQ ID NO: 38666 - DNA, 867 bp, Neisseria meningitidis
atgaaagcaaaaatcctgacttccgttgcactgcttgcctgttccggcagcctgtttgcccaaacgctggcaaccgtcaacggtcagaaaatcgacagttccgtcatcgatgcgcaggttgccgcattccgtgcggaaaacagccgtgccgaagacacgccgcaactgcgccaatccctgctggaaaacgaagtggtcaacaccgtggtcgcacaggaagtgaaacgcctgaaactcgaccggtcggcagagtttaaaaatgcgcttgccaaattgcgtgccgaagcgaaaaagtcgggcgacgacaagaaaccgtccttcaaaaccgtttggcaggcggtaaaatatggcttgaacggcgaggcatacgcgctgcatatcgccaaaacccaaccggtttccgagcaggaagtaaaagccgcatatgacaatatcagcggtttttacaaaggtacgcaggaagtccagttgggcgaaatcctgaccgacaaggaagaaaatgcaaaaaaagcggttgccgacttgaaggcgaaaaaaggtttcgatgccgtcttgaaacaatattccctcaacgaccgtaccaaacagaccggcgcgccggtcggatatgtgccgctgaaagatttggaacagggtgttccgccgctttatcaggcaattaaggacttgaaaaaaggcgaatttacggcaacgccgctgaaaaacggcgatttctacggcgtttattatgtcaacgacagccgcgaggtgaaagtgccttcttttgatgaaatgaaaggacagattgccggcaaccttcaggcggaacggattgaccgtgccgtcggtgcactgttgggcaaggcaaacatcaaacctgcaaaataa

SEQ ID NO: 38667 - DNA, 183 bp, Neisseria meningitidis
atggaaagtttggtgcaaagacgaatttgttataaagcggttggcagtttctcaagcgggcgcgatgttttaaaatatagtggattaaatttaaatcaggacaaggcgacgaagccgcagacagtacaaatagtacggcaaggcgaggcaacgccgtactggtttaaatttaatccactataa

SEQ ID NO: 38668 - DNA, 585 bp, Neisseria meningitidis
ttgtactgtctgcggcttcgtcgccttgtcctgatttttgttaatccactatatctgcatcagtttcatgaaacgcaagtcggaagcgtcaaacaactgattgcccattttgaccggctgattgacgaattggacaaacaaatcgacgaccacacccacacgcattttgacggcaaagcccaagtggcggagcaaatcaaaggcatcggttcgataacgacggctacgctgatggcgatgctgcccgaattggggcggctgtcgcacaaacggatagcgagtttggccggcattgccccgcacccgagggagagcggggaaaccaaattcaaaagccgctgctttggcggaaagtctgcggtacgtaaggcgctgtatatggctaccgtggcagcgacacgttttgaaccgcttattcgggatttctaccaacgcctgctgtccgagggtaagccgtataaggttgccgttacggcatgtatgcgcaaactgctgacgatatcgaatgcccggatgcgtgattattttgccgaaaacgataccgccgaaaacgataccgccgaaaacggtatccggacggcttga

SEQ ID NO: 38669 - DNA, 225 bp, Neisseria meningitidis; identical to SEQ ID NO: 36622

SEQ ID NO: 38670 - DNA, 357 bp, Neisseria meningitidis
atggataaaatctttttgcacggcatcaaggcggatacgcttatcggcgtgtacggctgggaacgcgaacggttgcagaccctgattgtcgatttggacatcggcgttcccgagaaagcgggttcggacgacgatattgccaatacggtacattatgccgaggtatgcgaaacactgcgccgacatctgaaagaacaggatttcctgcttttggaagcgttggcggaatatattgccgatttggttttgggatatttcggcgcggtgtgggtacgcgtgaaaatcgtcaagccgggtattttggaaggcgtgcgcgaggttggcgtggaaatcgagcgcggtaagcgtgaagattga

SEQ ID NO: 38671 - DNA, 264 bp, Neisseria meningitidis; identical to SEQ ID NO: 37542

SEQ ID NO: 38672 - DNA, 1833 bp, Neisseria meningitidis
  misc_feature 1810, 1811, 1812, 1813, 1814: 'n' is a, c, g or t
atgcgatacgacaaattaaccgccaaattccaacaggcccttgcagaagctcagagtttggcgttggctgcggacggcagctatctggaagcgggctttgtgctgaaagccctgcttgacgaccaaaacagcggtgctgccgcgctcttggctcatgcgggcgtgaacgtgccgcaggtgaaacagcgtttgcagcagcatttgaacagcctgccgaaagtgtccggccagggcggcgacattctgcccagccgcgaattgcaggcggtgttgaacctgatggacaaagccgcaaccaaacgcggcgatgcctatatcgccagtgaacttttcctgcttgccttggtgcagcagaacgatgcggccggcaaaattttgaaagaagccggcgcgaccgaacaaaacatcaatgccgcgattgacgcggtacgaggaggacaaaacgtgaacgatgccaatgccgaagaccaacgcgatgctttgaaaaaatatacgctcgatctgacccaacgcgcccgagacggtaagctcgaccccgttatcggccgtgacgacgaaatccgccgtgcgattcaggtattgcaacgccgtaccaaaaacaaccctgtgctgattggcgaaccgggcgtgggtaaaaccgccatcgtcgaaggtttggcacaacgcatcgtcaatggcgaagtacctgaatccctgcgcaacaaacgcctactggttttggacttggcggcattgattgccggcgcgaaataccgcggcgaatttgaagaacgcttgaaaggcgtgttgaacgacttggcgaaagacgacggcaacactctgattttcatcgacgaaatccatactttggtcggcgcaggcaaaaccgacggtgcgatggatgcgggcaatatgctgaaaccggctttggcacgtggcgaattgcactgtatcggcgcgaccaccttggacgaataccgccaatacatcgaaaaagacgcggcactcgaacgccgcttccaaaaagtattggttggcgagccaagtgtagaagacaccatcgctatcttgcgcggtttacaggagcgttatgaaatccaccacggtatcgatattaccgaccctgctatcgttgccgcagcggagttgagcgaccgctacattaccgaccgcttcctgcctgataaagcgattgatttgattgacgaagccgccagccgtgtcaagatggaaaaagaaaccaagccggaagcaatggacaaaatcgaccgccgtctaattcagcttcggatggaaaaggcgcacgttgaaaaagaaaaagacgatgccagcaaaaaacgtttggaactgatagatgaggaaatcgacggtttggaaaaagaatatgccgatttggacgaaatctggaaagccgaaaaagcaatttcagacggtgctgctaatattaagaaacaaattgacgaagtcaaaattaaaatcgaacaggcaaaacggcaaggcgatttggcactggcttcaaaattgatgtatgaagatttggagcatttggaaaaacagcgtgcagccgccgaacgggcagatacggacagcacaaaaccggcaaacaaactcttgcgtaataatgtcggcgcggaggaaatcgcagaggtggtttcccgtatgaccggcattcccgtatccaaaatgatggaaggcgaacgcgacaaactgctgaaaatggaagaagtattgcaccgccgcgtggtcggacaggacgaagccgtgcgtgccgtgtccgacgctatccgccgcagccgctccggtcttgccgatccgaacaagccttacggcnnnnncacacacttaattaattaa

SEQ ID NO: 38673 - DNA, 1179 bp, Neisseria meningitidis
atggcatttttaaaactgaccgaacaaaacgtgcagggcaaaaccgtcctcatccgcgccgatatgaacgtgccgttcaaagacggcaaaatcagcgacgacacccgtatccgcgcctcgctcgcgtccatccaatactgcatggacaacggcgcatccgttatcgtgatgacccacttgggccgcccgaccgaaggcgagttccaccccgaagacgacgttgcgcccgttgccgcgcatttgggcggcctgttgggcaaaaacgtgaaagtattgaacgactggcgcgaaaacaaaccggctttgaacgcgggcgatgtcgtgatgctgcaaaacgtgcgtatcaacaaaggcgagaagaaaaacgatttggaactgggcaaagcctacgcttctttgtgcgacgtgttcgtcaatgacgcgttcggcaccgcgcaccgcgcccaagcctcgaccgaagccgtcgcccaagccgctcccgttgcctgcgccggcgtattgatggcgggcgaactcgacgctttgggcaaagccttgaaacagcccgcgcgcccgatggttgccatcgttgccggcagcaaagtgtccaccaagctgaccatcctcgaatcgctggcggacaaagtcgaccaactcatcgtcggcggcggcattgccaacaccttcctgttggcggaaggcaaagccatcggcaaatctttggcggaacacgatttggtggaagaatccaaaaaaattatggcaaaaatggcggccaaaggcggttctgtgccgctgccgaccgatgtcgtcgttgccaaagcctttaccgccgatgccgaagcggtcgtgaaagacattgccgacgttgccgaagacgatatgattttggacatcggcccgaaatccgccgccgagcttgccgatttgctcaaagctgccggtacggttgtatggaacggccctgtcggcgtgtttgagttcgatcaattcgcaggcggcacgaaagctcttgccgaagccattgcccaaagcaaagcattctcgattgcaggcggtggcgacacgctggcggcgattgctaaattcggcgttaccgaccaaatcggctatatttctaccggcggaggcgcgtttcttgagttcttggaaggtaaagagttgcctgccgtagccgctttggaaaaacgcggcgcgtaa

SEQ ID NO: 38674 - DNA, 612 bp, Neisseria meningitidis
atgaagaataatgattgcttccgcctgaaaaacccccagtccggtatggcgctgatagaagtcttggtcgctatgctcgttctgaccatcggtattttggcactattgtctgttcagttgcggacagtcgcttccgtcagggaggcagagacgcaaaccatcgtcagtcaaatcacgcaaaacctgatggaaggaatgttgatgaatccgaccattgattcggacagcaacaagaaaaactataatctttacatgggaaaccatcatacactatcagttgtggatggcgattttcaggttggtgtcataaaaactaagacgcagttggcagaggcacaattgaagagatttagttatgagctgaaaaatgccttgccggatgcggcagccatccattacgccgtctgcaaggattcgtcgggtaacgcgccgacattgtccggcaatgctttttcttcaaattgcgacaataaggcaaacggggatactttaattaaagtattgtgggtaaatgattcggcaggggattcggatattgcccgtacgaatcttgaggtgagcggcgacaatatcgtatatacttatcaggcaagggtcggaggtcgggaatga

SEQ ID NO: 38675 - DNA, 828 bp, Neisseria meningitidis
atgaaaaaaaccgcctatgccttcctcctgctgatcgggttcgcttccgcccctgcatttgccgaaacccgccccgccgacccttatgaaggctacaaccgcgccgttttcaaattcaacgaccaagccgaccgctacattttcgcccctgccgcgcgcggctaccgcaaagttgcgccgaaacccgtccgcgccggcgtgtccaatttttttaataacctgtgcgacgtggtcagcttcggcagcaatatcttgcgcttggacatcaaacgcgcaagcgaagaccttgtccgcgtcggcatcaacaccactttcggtttgggcgggcttatcgacatcgccggcgcgggcggcattcccgacaataaaaacaccttgggcgacacgtttgcttcgtggggatggaaaaacagcaattatttcgtgttgcccgtcttagggccgtccaccgtccgcgacgcgctcggcacgggtattacctccgtttattcgcccaagaatatcgtcttccgcacccctgtcggacgctggggcacgactgccgtatccgccgtcagtacgcgcgaaggcctgctcgatttgaccgacagcctggacgaagccgccatcgacaaatacagctacacgcgcgacctctatatgaaagtccgtgcgcggcagaccggtgcaacacctgccgaaggtacggaagataacatcgacatcgacgaattggtcgaaagtgccgaaaccggcgcggcggaaactgccgttcaagaagattccgtatccgaaacacaggcagaagcagcaggggaagccgaaacgcaacctggaacacaaccttaa

SEQ ID NO: 38676 - DNA, 378 bp, Neisseria meningitidis
atgtgtgagttaaaaaacttcagaagaaatattacttgttttgagggatatgacgaaaattcatttattggcaaatggtatgatgacggggtgtgggatgatgaagaatattggaaattggagaatgatttaattgaggttagaaaaaaatatccttatccgatggatataccaagggacatcgtgattggaatcggtaccattattgattttttaatggttcaaaattggaaactttttgaaattaaagcttccccttggctacctgatagcgtgggaattcatgaacgttatgaaagattcacaacaatgctccgttatatttttaccgagaaagacatagtcaacgtgcgatttgattattacaacaaaaaatag

SEQ ID NO: 38677 - DNA, 687 bp, Neisseria meningitidis; identical to SEQ ID NO: 36558

SEQ ID NO: 38678 - DNA, 447 bp, Neisseria meningitidis
atgcagcacgaagaaggcaaccgccaacgccctcaaggcgaactgctcctgcgtaccgtcgctatgccgcgcgataccaatcccaaccaagacattttcggcggctggattatgtcgcagatggatttgggcggcggcatattggcagcggaaatcgcacaaggacgcatcgttaccgtcgccgttcaggaaatgaacttcatccgcccggtcaaggtcggcaacgtcgtctgctgctacgggcattgcgtccgcgtgggcaatacttccctccagcttaaagtcgaagtctgggtgaaaactttgatgaacgattgcgttaccgaagaccgccacctcgtaaccgaagccgtgttcacttatgtcgccatcgatgcggaaggcaatccgcgcccgattccgaaagaaggcaaccccatattggcgggcttattgcctactccgtaa

SEQ ID NO: 38679 - DNA, 567 bp, Neisseria meningitidis
atgccgtctgaagcctgttggcgtttcagacggcatattctgattgaaaagatgatgacactgaaaaccgccccgctcaaacgccgctttgccgccatgctgtacgaaatgctgctggtcggtgcggcaacctgtttggcagcattgtttgccggtattgccgccatttttctgaatcccgtttctatcgcggtttctgcattggtaacgagtatcctgataatgggatcatggtggctttattttcgcgccaactggcacggtcaggggcagaccttggcgatgaggacatggaaaatcggcttgtgcgaccttaacggcatacagccgtctttgtacctgctgcgcctgcgctttatttgggcgtgcatatttatcgtcttcattcctatgcttgcttatgccggattgcgccacttcctcggcattccgcccaagggcgcggccggcgcggcattgatttggctgattttaccgtgggggttcgcactgctgaatcccgatcggcagtttctgtatgattttcttgcaggaacaagattagtggcggtcaaaggaaagccttaa

SEQ ID NO: 38680 - DNA, 4659 bp, Neisseria meningitidis
atgaaaaccaaacgttttaaaattaacgccatatccttatccatctttcttgcctatgcccttacgccatactcagaagcggcattggtcagagacgatgtcgattatcaaatattccgtgactttgcagaaaacaaaggcaaattttttgtcggcgcaaccgatttatcagtgaaaaacaaacaaggtcaaaacatcggcaacgcattatccaacgtaccgatgattgattttagcgttgcagatgtcaacagacgtacattaaccgtcatcgatccccagtatgccgtcagcgtcaaacatgtaaaaggagacgaaatctcttattacgggcatcacaatgggcacttagatgttagcaatgatgaaaacgaatatcgttcagttgcacaaaatgactacgaaccaaataaaaattggcatcacggtaatcaaggtcgtcttgaagactacaacatggcacgccttaataaattcgtaacagaagtcgcacctattgcaccaaccagtgcaggcggcggcgttgaaacctataaagataaaaaccgtttttctgagtttgtgcgagttggagcaggtacgcaatttgaatataacagccgctacaatatgacagagctttcacgagcttatcgttatgccattgcaggtacgccttatcaagacgtgaatgtcacatcgaatctaaatcaagaaggcttgattggcttcggtgataattcaaaacatcattccccagaaaaactcaaagaagttttatctcaaaacgcattgactaactatgctgtgttaggcgatagcggttcaccattatttgcttatgataaacaagaaaaacgctgggtctttttaggtgcttacgattattgggcaggctatcaaaaaaactcttggcaagaatggaatatctataaaaaagaatttgcagataaaatcaaacaacgcgataacgccggcaccatcaaaggtaatggagaacatcattggaacattacttttggcacaaacagcaagattggttctacagcggtaaggcttgccggcaatgaaaaggatgcaaacaacggacagaatgttacctttgaagacaacggcactttggtattggatcaaaacatcaaccaaggcgcgggcggtctgtttttcaaaggcgattacacagtcaaaggtataaataatgacatcacttggctaggtgcggggattgatgttaccgacggcaaaaaagtcgtttggcaagtcaaaaatccgaatggcgacagattggcaaaaatcggcaaaggcacattagaaataaacggcacaggcgttaaccaagggcaattaaaagtcggcgacggtacggttattctgaatcaacaagccgatgccgacaaaaaagtccaggctttctcccaagtcggcattgtcagcggacgcggtacattggtattaaatagttcaaatcagattaatcccgataacctatatttcggtttccgtggcggtcgtttggatgccaatggcaatgacttgacttttgaacacatccgcaacgtggatgaaggcgcgcgcattgtcaaccacaacacaagccacgcctccacaatcacgctaacgggtaaatctttaattaccaatccgaacagcctttcggtacatagcatacaaaatgactatgacgaagatgattatagttattactaccgaccaaggcgcccgattccgcaaggcaaagacctttattacaaaaactatcgttattacgccctaaaatccggcggcagcgtgaacgcaccgatgcccgagaacggtgtaacagaaaataacgactgggtctttatgggatatacgcaagaagaagccaagaaaaacgcgatgaaccacaaaaacaatcagcgtattagcggttttagcggtttctttggcgaagaaaacggaaaaggacataacggtgcattaaaccttaatttcaacggcaaaagcgcgcaaaaccgtttcttgttaacaggcggcactaatttaaacggaaaaataagcgtaactcaaggcaatgtcttgttatcaggtcgtccaacaccacacgcaagagattttgtgaacaaatcttcagcccgaaaagacgcacatttctccaaaaacaatgaagtcgtatttgaagacgactggataaaccgcacattcaaagccgcagaaattgcggttaatcaatccgcatcattctcttccggtagaaatgtatccaacattaccgccaacatcaccgcgacagacaacgccaaagtaaatttgggttacaaaaacggcgatgaggtttgcgtgcgctcggactataccggttatgttacctgcaacacaggcaacttatccgataaggctttaaacagctttggagcgacacagattaacggcaatgtgaatctgaaccagaatgcggcattggtcttgggcaaggctgcattatgggggcaaattcaagggcaaggaaacagccgtgtcagcctaaaccaacatagcaaatggcatttgactggcgacagccaagtacacaatctgtcattggcggatagccatattcatttgaacaatgcctccgatgcgcaaagtgcaaatcaataccacacgctcaaaatcaatcatttatccggtaacgggcattttcattatctgacgcacttggcggaaaatcttggggataaagtgcttgtgaaggaatccgcatccggtcattatcagctccatgttcaagataaaacaggcgaacccaatcaggaagggctgaatctctttgatgcatcatccgtacaagaccgctcccgcctttctgtttccttggcgaataaccatgtagatttaggcgcattgcgttatacaatcaaaacagaaaacggtattacccgattgtacaatccttatgccgagaaccgccgccgagtcaaaccggtcccgtctcctgccacaaacacggcttctcaagcacaaacggacagtgcacaaattgccaagcctcaaaatatcgtcgtcgcaccgcctagcccgcaggcaaatcaagccgaagaagcaaaacgccaacaagcaaaagcggagcaagtgaagcgtcagcaagcagaagcagagcgtaaatcggcagagttagcaaaacaaaaagcagaagccgaacgcgaagcaagagagctggcgacccgccaaaaagcagaacaagaacgcagcagcgccgaacttgcacgtcgacatgaaaaagaacgcgaagcggcagagttgtcggcaaaacaaaaagtcgaagccgaacgtgaggctcaagcattggcggtacgccgaaaagcagaagccgaagaggcaaaacgccaagctgcagagcttgcacgccaacaagaagaagcacgaaaagctgcagagttggctgctaagcaaaaagcggaaactgaacgcaaagcagcagaaattgccgagcaaaaagcggaagccgaacgtgaagccgccgaacttgccaagcaaaaggcggaagaagaaggtcgccaagcagcacaatctcaacccaaacgtcgtaaccgcagggctataccaccggaactgtcatctgatgcaacaacccgagctttgcctaggatagcgagaaattcaaatcctgatgccagcgattatgaaaaaatccccttggatgcgttggaagatgaagatgtatccgaatcggttgacacatcagacaaacagcctcaagacaatacggaacttcatgaaaaagttgagacagtgagtttgcaaccaagagccgcgcagccgcgagcccaagccgccgcgcaagccgatgcagtcagcaccaataccaactcggctttatctgacgcaatggcaagcacgcaatctatcttgttggatacaggtgcttcattaacacggcacattgcacaaaaatcacgtgctgatgccgaaaaaaacagcgtttggatgtcgaacatcggttatggccgtgattatgcttccgcacaatatcgccggtttagttcgaaacgcacgcaaacacaaatcggcattgaccgcagcttgtccgaaaatatgcagataggcggcgtattgacttactctgacagtcagcatacttttgatcaggcgagcggcaaaaatacttttgtgcaagccaacctttatggtaagtattatttaaatgatgcttggtatgtggccggcgatattggtgcaggcagcttgagaagccggttacaaacgcagcaaaaagcaaactttaaccgaacaagcatccaaaccggccttactttgggcaatacgctgaaaatcaatcaattcgagattgtccccagtgcgggaatccgttacagccgcctgtcatctgcagattacaagttgggtaacgacagtgttaaagtaagttctatgtcagtgaaaacactgacggccggactggattttgcttatcggtttaaagtcggcaaccttaccgtaaaacccttgttatctgcagcttactttgccaattatggcaaaggcggcgtgaatgtgggcggtaattccttcgcctataaagcagataatcaacagcaatattcagcaggtgccgcgttactgtaccgtaatgttacattaaacgtaaatggcagtattacaaaaggcaaacaattggaaaaacaaaaatccggacaaattaaaatacagattcgtttctaa

SEQ ID NO: 38681 - DNA, 1083 bp, Neisseria meningitidis
atgtttttatggctcgcacatttcagcaactggttaaccggtctgaatatttttcaatacaccacattccgcgccgtcatggcggcgttgaccgccttggcgttttccctgatgttcggcccgtggacgatacgcaggctgaccgcgctcaaatgcgggcaggcagtgcgtaccgacggcccgcaaacccacctcgtcaaaaacggcacgccgacgatgggcggttcgctgattctgaccgccattacagtgtccaccctgttgtggggcaactgggcaaacccgtatatctggattctcttgggcgtattgctcgctaccggcgcactcggtttttacgacgactggcgcaaagtcgtctataaagaccccaacggcgtgtccgccaaattcaaaatggtgtggcagtcaagcgttgccattatcgccggtttggcattgttttaccttgccgccaattccgccaacaatattttgattgtcccgttcttcaaacaaatcgccctgccgctgggcgtggtcggctttttggtgttgtcttacctgaccatcgtcggcacatccaatgccgtcaacctcaccgacggcttggacggccttgcgaccttccccgtcgtcctcgttgccgccggcctcgccatcttcgcctatgccagcggccactcacaatttgcccaatacctgcaattaccttacgttgccggcgcaaacgaagtggtgattttctgtaccgccatgtgcggcgcgtgcctcggtttcttgtggtttaacgcctatcccgcgcaagtctttatgggcgatgtcggtgcattggcattgggtgccgcgctcggtaccgtcgccgtcatcgtccgccaagagtttgtcctcgtcattatgggcggattatttgtcgtagaagccgtatccgttatgcttcaggtcggctggtataagaaaaccaaaaaacgcatcttcctgatggcgcccatccatcaccactacgaacaaaaaggctggaaagaaacccaagtcgtcgtccgcttttggattatcaccatcgtcttggtgttgatcggtttgagtaccctcaaaatccgctga

SEQ ID NO: 38682 - DNA, 777 bp, Neisseria meningitidis
atgcgcgcagtccccccgccccatatctccatcacaggcctaggttacctcggcctgccgctggcacaaaagttttaccaacacggcagccgcgtcgccgccataaaacgcagcctgacttcggacgacatcaacctgcccatacacctcgacaccttcgacctcggcagcaccgatgcctttcagacggcattgtggcggcaccacgccgacaaacccgtctggtatttcctgctgccgccctcctcgctgacgcattacgccgacaccgtcaaacaatgggcagaacttgcccgggcgtgcaacgtgcaacacctgattttcacaagcagcaccagcgtttacggcgatacagcgcgcgaatgcgacgaaaccgccacacccgatccgcaaaccgagtccgcccgccaaatcctcgccgccgaacaacacctgctcgacagcggcatctccaacatcgacatcctgcgacttggtgggctttattgcgccgaacgccatcccgtcagccgtctcgttcaaaagcaaaacatcccaggcggcaaccgccccatcaacatcgtccaccgtaatatcgccgtcgaaagcctgtttcagacggcatttaaccccggcggcaggcggctgaaaaacattatcgaaccgcgccacccgacacgccgcgaattttttacggaagaagccgccaaactcgacctgcccgcgccggatttcgcacccgacgacagcaggggcaaaatcatccgtaccgtttgcgataacggcttaagcctgtaa

SEQ ID NO: 38683 - DNA, 462 bp, Neisseria meningitidis
atgaaaccgcaaaaatccctacgcgcccgcgcgatggacatcctctcgcgccaagaagtcagccgcatcggtctgaaacgcaaacttgcaccgcacgccgaaagcgaagaggagttggaaaacgtgttaaacgaatttgccgaacgcaactggcagtcggatttgcgctatgccgaagcctatatccgcagcaaaagccgcaaacacggttcattgaggctgaaacaggctttggcgcaacagggcatagatgaagaaaccagccgcaacctgcttcccgaccgctcaagcgaaaaacaggccgccatagccgtgttgcgtaaaaaattcaaacaccccgccgccgacctcaaagaaaaacaaaaacaggcgcgtttcctcgcctatcgcggattcgatgccgataccgttcagacggcattgaaacacgcttgggacgaaaattgggaagacggctgctga

SEQ ID NO: 38684 - DNA, 651 bp, Neisseria meningitidis
atgccgtctgaaaacacaaaaggaacaaccatgaccacacatcatgtcgaattgaggaaggtaaccaaacgcttcggcgcgcaaaaagccgtcaaccaagtcgatttggttttgaaggcaggagaaagcgtcgggcttgccggacacaacggtgcgggcaagtccaccatcatgaagctgatactcgggctgattaccccgaccgaaggcgaagtgatgcttttgggcgaacgtaccggcagcaaagcgggggcgcggcttcgcagccaaatcggctacctgcccgaaactgttgcgctgcacccttcgctgaccggcatcgaaacgctggatttttacgccaaacttaaaaaacagccgctcacgcagaaccgggggctgctcgagcgcgtcggtatttcacaggcggcacaccgccgcgtcggcacttattctaaagggatgcgccaacgccttgccttggcacaagccctgctgggcgagcccaaagtcctgctgtttgacgaaccgacaaccggtcttgaccctgcatcacgacaaatgttttacgaagtcgtgcgcgaactcaacgggcgcggcgcgaccgtattgctcagcacccacgcccttgccgagttggacgggcacgccgaccgcattatcgtggattaa

SEQ ID NO: 38685 - DNA, 903 bp, Neisseria meningitidis
atggataccgcaaaaaaagacattttaggatcgggctggatgctggtggcggcggcctgctttaccattatgaacgtattgattaaagaggcatcggcaaaatttgccctcggcagcggcgaattggtcttttggcgcatgctgttttcaaccgttgcgctcggggctgccgccgtattgcgtcgggacaccttccgcacgccccattggaaaaaccacttaaaccgcagtatggtcgggacgggggcgatgctgctgctgttttacgcggtaacgcatctgcctttggccaccggcgttaccctgagttacacctcgtcgatttttttggcggtattttccttcctgattttgaaagaacggatttccgtttacacgcaggcggtgctgctccttggttttgccggcgtggtattgctgcttaatccctcgttccgcagcggtcaggaaacggcggcactcgccgggctggcgggcggcgcgatgtccggctgggcgtatttgaaagtgcgcgaactgtctttggcgggcgaaccctgctggcgcgtcgtgttttacctttccgtgacaggtgtggcgatgtcgtcggtttgggcgacgctgaccggctggcacaccctgtcctttccatcggcagtttatctgtcatgcatcggcgtgtccgcgctgattgcccaactgtcgatgacgcgcgcctacaaagtcggcgacaaattcacggttgcctcgctttcctatatgaccgtcgttttttccgccctgtctgccgcattttttctgggcgaagagcttttctggcaggaaatactcggtatgtgcatcatcatcctcagcggcattttgagcagcatccgccccactgccttcaaacagcggctgcaatccctgttccgccaaagataa

SEQ ID NO: 38686 - DNA, 423 bp, Neisseria meningitidis
atgagcgagcagacggcattggccgtgtgtgccgacggtgtggaaacggcattggcggaagcggcatcactgttggaagagggatgcgggtcggttttggttttggcggcggacgatccgctgccggaaggatatgccgtatcggcaacgcgcgcgccgtttgcttatgctttggcgatggttctgaccaaagggacgcgttacagcctgactttatctgcttcggacgatatgccgtctgaagccggtatgctgcccgaggcatattggagcggtttggaatgggtgcgctttctgctgaacggcagtcgggaatgctgccgggtatatcgcaatcgtgaatggctgtggcagcccgcaagctgcaggctgaagatttccgcaatgtccgcaccgtcaacgacgtggtacaggcggtattga

SEQ ID NO: 38687 - DNA, 1041 bp, Neisseria meningitidis
atgaacacacccatccccttctccgaacggctcatccgctggcaaaaacaacacggtcgccaccacctcccttggcaggtcaaaaacccttattgcgtctggctttccgaaatcatgctccagcaaacgcaggtcgccaccgtgttggactactatccgcgtttcttagaaaaattcccgaccgttcagacgcttgccgccgcgccgcaagacgaagtgttgtcgttgtgggcgggcttgggctattacagccgcgcgcgcaacctgcacaaagccgcgcaacaagtcgtcaggcaattcggcggcacgtttccatcggaacgcaaagacttggaaacgctctgcggcgtaggcagaagcaccgccgccgccatttgcgccttctccttcaaccgccgcgaaaccattttggacggcaacgtcaaacgcgtactctgccgcgtgttcgcccgcgacggcaatccgcaggacaaaaaatttgaaaactcgctctggacacttgccgaaagcctgctgccgtctgaaaacgccgatatgcctgcctatacacaaggtttgatggatttgggcgcaaccgtgtgcaaacggacgaaacccttgtgccaccaatgcccgatggcggacatctgcgaagcaaaaaagcaaaaccgcaccgccgagctgccgcgcaaaaaaaccgccgccgaagtaccgaccctgccgctttactggctgattatccgcaaccggaacggcgcgattttgctggaaaaacgccccgccaaaggcatttggggcgggctgtattgcgtgccgtgttttgaaagtttgaacgggctttccgactttgccgccaaattctccctgaccatggcagatatggacgaacaaaccgccctgacccaccggctgacgcaccggttgctgatgattacgccgtttgaaggacaaatgccgtctgaaagcccttcagacggcatttggataaagccgacgcatttgaaagattacggcctgcccaagcctttggaaatttatttaaacggtaataggttagaataa

SEQ ID NO: 38688 - DNA, 321 bp, Neisseria meningitidis
atgattacccttaccgagaatgccgcaaaacacatcaatgactatctcgccaaacgcggcaaaggcttgggcgtacgcttgggtgtgaaaaccagcggctgctcggggatggcgtacaaccttgaatttgtcgacgaagccgatggcgacgacctgattttcgaaggacacggcgcgcgcatttatatcgatccgaaaagcctggtttatctggatggcacgcaagtcgattacaccaaagaaggtttgcaggaaggtttcaaatttgaaaaccccaatgtcaaagactcctgcggctgcggcgaaagcttccacgtttaa

SEQ ID NO: 38689 - DNA, 750 bp, Neisseria meningitidis
atgagcaccttcttccggcaaaccgcgcaagccatgattgccaaacacatcgaccgtttcccgctattgaagttggaccaggtgattgattggcagccgatcgaacagtacctgaatcgtcaaagaacccgttaccttcgagaccaccgaggccgtcccgcctatcccctgttatccatgttcaaagccgtcctgctcggacaatggcacagcctttccgatcccgaactcgaacacagcctcatcacccgcatcgatttcaacctgttttgtcgttttgacgaactgagcatccccgattacagcaccttatgccgctaccgtaactggctggcgcaagacgacaccctgtccgaattgctggaactgattaactgccaactgaccgaaaaaggcctaaaagtagagaaagcatccgccgccgtcgttgacgccaccattattcagaccgccggcagcaaacagcgtcaggccatagaagttgacgaagaaggacaaatcagcggccaaaccacaccgagtaaggacagcgatgcccgttggatctctacaaactcggttacaaacaacatacccgtaccgatgcggaaggctatatcgagaaactgcacattacccccgccaatgccaatgagtgcaaacacctgtcgccgttgttggaaggactgcccgaaggtacgaccgtctatgccgataaaggctacgacgatgcggaaaaccggcaacatctggaagaacatcagttgttag

SEQ ID NO: 38690 - DNA, 516 bp, Neisseria meningitidis
atgcccaagctccatatgttttacctcggcggcaatgccggcaggtcgaatatcgaagtgcacgacatccaatttgccgtgtgcgacgactaccgtgaagccgtccccgcactcaaagccgcgtggttcggcgatgcggacaaaatccacatcgacggctggcaggttgtcgaatgggcggacggttacgacatcgccgtatccgaaacgcccaaaacggaaatgccgtctgaacacgccccgcgcctgtattttgccaatgtcggcggttatcgcgcggggcagcttgccgaggcgcacgcgttcgggctgttcgccgccgccacgcctgccgaagccaaacaaaaagccctgcaaaccctgttgaccgaccatgttcagcaacataaagacaacttaaaagacgtggacaacctgcttgcgctcgaccgcatcggcaatttccatatccgcctgaccccgaatccgcacggcaaacccgccgaaatcggctttcaaggctatttgcccatttga

SEQ ID NO: 38691 - DNA, 1806 bp, Neisseria meningitidis
atgcgctacaaaccccttctgcttgccctgatgctcgttttttccacgcccgccgttgccgcccacgacgcggcacacaaccgttccgccgaagtgaaaaaacagacgaagaacaaaaaagaacagcccgaagcggcggaaggcaaaaaagaaaaaggcaaaaatggcgcagtgaaagataaaaaaacaggcggcaaagaggcggcaaaagagggcaaagagtccaaaaaaaccgccaaaaaccgcaaagaagcagagaaggaggcgacatccaggcagtctgcgcgcaaaggacgcgaaggggataagaaatcgaaggcggaacacaaaaaggcacatggcaagcccgtgtccggatccaaagaaaaaaacgcaaaaacacagcctgaaaacaagcaaggcaaaaaagaggcaaaaggacagggcaatccgcgcaagggcggcaaggcggaaaaagacactgtttctgcaaataaaaaagtccgttccgacaagaacggcaaagcagtgaaacaggacaaaaaatacagggaagagaaaaatgccaaaaccgattccgacgaattgaaagccgccgttgccgctgccaccaatgatgtcgaaaacaaaaaagccctgctcaaacaaagcgaaggaatgctgcttcatgtcagcaattccctcaaacagcttcaggaagagcgtatccgccaagaacgtatccgccaagagcgtatccgtcaggcgcgcggcaaccttgcttccgtcaaccgcaaacagcgcgaggcttgggacaagttccaaaaactcaatgccgagctgaaccgtttgaaaacggaagtcgccgctacgaaagcgcagatttcccgtttcgtatcggggaactataaaaacagccagccgaatgcggttgccctgttcctgaaaaacgccgaaccgggtcagaaaaaccgctttttgcgttatacgcgttatgtaaacgcctccaatcgggaagttgtcaaggatttggaaaaacagcagaaggctttggcggtacaagagcagaaaatcaacaatgagcttgcccgtttgaagaaaattcaggcaaacgtgcaatccctgctgaaaaaacagggtgtaaccgatgcggcggaacagacggaaagccgcagacagaatgccaaaatcgccaaagatgcccgaaaactgctggaacagaaagggaacgagcagcagctgaacaagctcttgagcaatttggagaagaaaaaggccgaacaccgcattcaggatgcggaagcaaaaagaaaattggctgaagccagactggcggcagccgaaaaagccagaaaagaagcggcgcagcagaaggctgaagcacgacgtgcggaaatgtccaacctgaccgccgaagacaggaacatccaagcgccttcggttatgggtatcggcagtgccgacggtttcagccgcatgcaaggacgtttgaaaaaaccggttgacggtgtgccgaccggacttttcgggcagaaccggagcggcggcgatgtttggaaaggcgtgttctattccactgcaccggcaacggttgaaagcattgcgccgggaacggtaagctatgcggacgagttggacggctacggcaaagtggtcgtggtcgatcacggcgagaactacatcagcatctatgccggtttgagcgaaatttccgtcggcaagggttatatggtcgcggcaggaagcaaaatcggctcgagcgggtcgctgccggacggggaagaggggctttacctgcaaatacgttatcaaggtcaggtattgaacccttcgagctggatacgttga

SEQ ID NO: 38692 - DNA, 480 bp, Neisseria meningitidis
atggctaacttagtaaaaactttcttgctcggcgaattggtaaaaggtatgggcgtaacgctcaaaaacttttttgcccgcaaagacacaatttatttccccgaagagaaaacgccgcaatccgtgcgtttccgtggcctgcacgcgcagcggcggtatccgaacggcgaagagcgctgtatcgcgtgtaaattgtgtgaagccgtttgccccgcaatggcgattaacattgaatcggaagaacgcgaagacggcacccgccgcaccaagcgttacgatatcgacctgaccaagtgcatcttctgcggtttctgcgaagaggcctgcccgaccgatgcgattgtggaaacgcatatttttgaataccacggcgagaaaaaaggcgacttgcacatgaccaagccgatcctcttggcaatcggcgacaaatacgaagctgaaatcgccaaacgcaaagccgctgatgcgccgtatcgttaa

SEQ ID NO: 38693 - DNA, 435 bp, Neisseria meningitidis
atgcccgcctgtttctgcccccactgcaaaacccgcctctgggtcaaagaaacccaactcaatgtcgcccaaggcttcgtcgtctgccaaaaatgcgaaggaatgtttaaagccaaagaccatctggcaagcacgaaagaacccatattcaacgatttgcccgaggctgtttcggatgtcaaactcgttcaccgcatcggcacgcgcgccatcggcaagaaacagatttcccgcgatgaaatcgccggcatcctcaacggcggcacaacccagcccgatattccgcccgcaaccgccgccacccctgctgccgcaccgcaggttaccgtaccgcccgccgcgcccgcccgtcaggatgggttcaactggacgattgcaaccctgtttgcccttatcgtcctcattatgcagctttcctacctcgtcatcctatga

SEQ ID NO: 38694 - DNA, 1014 bp, Neisseria meningitidis
atgcaagtctattacgataaagatgccgatctgtccctgatcaaaggcaaaaccgttgccatcatcggttacggttcgcaaggtcatgcccatgctgccaacctgaaagattcgggtgtaaacgtggtgatcggtctgcgccaaggttcttcttggaaaaaagccgaagcagccggccatgtcgtcaaaaccgttgctgaagcgaccaaagaagccgatgtcgttatgctgctgctgcctgacgaaaccatgcctgccgtctatcacgccgaagttgcagccaatctgaaagaaggcgcaacgctggcatttgcacacggcttcaacgtgcactacaaccaaatcgttccgcgtgccgacttggacgtgattatggttgcccccaaaggtccgggccataccgtacgcagtgaatacaaacgcggcggcggcgtgccttctctgattgctgtttaccaagacaattccggcaaagccaaagacatcgccctgtcttatgcggctgccaacggcggcaccaaaggcggtgtgattgaaaccactttccgcgaagaaaccgaaaccgatctgttcggcgaacaagccgtattgtgcggcggcgtggtcgagttgatcaaggcgggttttgaaaccctgaccgaagccggttacgcgcctgaaatggcttacttcgaatgtctgcacgaaatgaaactgattgttgacctgattttcgaaggcggtattgccaatatgaactactccatttccaacaatgcggagtacggcgaatacgttaccggccctgaagtggtcaatgcttccagcaaagaagccatgcgcaatgccctgaaacgcattcaaaccggcgaatacgcaaaaatgtttatccaagagggtaatgtcaactacgcgtctatgactgcccgccgccgtctgaatgccgaccaccaagttgaaaaagtcggcgcacaactgcgtgccatgatgccttggattactgccaacaaattggttgaccaagacaaaaactga

SEQ ID NO: 38695 - DNA, 594 bp, Neisseria meningitidis
atgtctgaattattaaactatgtcgcttcgtgccgcctgccgaccgaatggggcgtgtttacgatgcacggttttgaagaagcaggcgggcaggaacacgtcgcgctgaccgtcggtaatttttcagacggcaatccggttctgacgcgcatccactccgaatgcctgacgggcgatgcgctgttctcgagaaaatgcgactgcggacctcaacttgaagcggccatgagggcggtacagacagaggggcgcggcatcatcgtctatctgcgtcaggaaggacgcggcatcgggctgattaacaaaatccgcgcctatcatctgcaagaccaaggtatggatacggttgaagccaatttggcactcgggctgcccgtcgatgcccgcgatttccgtttggcgcaatctatctacgaatatctgggcatccgctcggtcaaactgctgaccaacaaccccgaaaaaatccaaaccctgaaagatgctgggattaacgtggtcgaacgcatccccctgcacgtcggggaaaaccttgaaaacaaacgctacctccaaaccaaagcagacaagctgggacatctgatgtcggaataa

SEQ ID NO: 38696 - DNA, 987 bp, Neisseria meningitidis
atgcagaatagcacaaccgaatttttgaaacctcgtcaaattgatgtaaatactttttctgcaactcgtgcaaaagtatctatgcagccatttgaacgtggtttcggtcataccttaggtaatgctttgcgccgtatcttactgtcatccatgaatggttttgctcctactgaagtagctattgccggtgtattacacgaatattctactgttgatggtattcaggaagatgttgttgacattttgctgaatattaaaggtattgtgtttaaactccatggtcgtagccaagttcaacttgtgttgaagaaatcaggttcaggtgtcgtatctgccggtgatattgagttgccgcatgatgtagaaattctgaatcctggtcatgtcatttgtcatttggctgataacggtcaaattgagatggaaattaaagtagagcaaggtcgtggttatcaatctgtttcaggtcgtcaggtagttcgtgatgagaaccgtcagattggtgcaatccagttggatgcgagcttttcgcccatcagccgtgttagctttgaggttgaacctgcacgtgtagagcagcggacggatcttgataagttggttttggatatcgaaaccgacggttctattgatcctgaggaagctgtacgcagtgcggcacgtattttgattgatcagatgtctatttttgctgatttgcagggtacgcctgtggaggaggttgaagaaaaagcacctcctatcgaccctgttcttttgcgtccggtggatgatctggaattgacagtacgttcagctaattgtttgaaagctgaggatatttattatattggcgatttgattcaacgcactgaaaccgagcttcttaaaacgccgaatttgggacgtaaatctttgaatgagattaaggaagtattggcatctaaaggtttgacactgggttctaagttggaagcatggccacctgtaggcttggaaaagccttaa

SEQ ID NO: 38697 - DNA, 507 bp, Neisseria meningitidis
atggatttctttgatttttttgcgcaaggtaagtataaaaaaattgcaactgaacaaggtttagaccgtaaatattttatattccactatatcgtatgtaatttatctgccatttcttctttttgtttaatgaaggttgtccatagttatactatcctttgtttattaataatgataattggcattgcatttggatttatcttgagaaatagggttctatctatagtaaaaaataaacaaaagtttttatctgatatgtttcccttggaaatgcctttcttttctagagtatacaaaatacctatcttggccagattcttgaataggggaatgaaatggctttatctccaaaattttttctgtttagttatgatttgtttctcgatatctcttatccttaatgaagaaagggggtggatgccttattttatctgctattggtttggactttgttatccagcaaacacttattacgtttttttatccagagattataaacgtatctaa

SEQ ID NO: 38698 - DNA, 696 bp, Neisseria meningitidis
atgaaactgaaaaccttagctttgacttcattgaccctgttggcattggccgcttgtagcaaacaggctgaaaccagtgttccggcagacagcgcccaaagcagctcatctgctccggcagcccctgctgagttgaacgaaggtgtgaactacactgtattgtctacgcctattccgcaacagcaggccggtaaaatcgaagtattggaatttttcggctacttctgcccgcattgcgcccatcttgagccggtcttgagcgagcacatcaaaacgtttaaagacgatacctatatgcgccgggagcatgtcgtgtggggtgatgaaatgaaacctttggcacgtttggcggccgcagtggaaatggccggtgaatcagataaagccaacagccatattttcgatgcgatggttaatcaaaaaatcaatctggccgataccgataccctgaaaaaatggctgtccgagcaaacagcgtttgacggcaaaaaagtattggctgcatttgaggctcctgaaagccaagcgcgtgcggctcaaatggaagagttgaccaataaattccaaatcagcggcacaccgactgtgattgtcggcggcaaataccaagttgaatttaaagactggcagtctggtatgaccacgattgaccagttggtggataaagtacgcgaagagcagaaaaagccgcaataa

SEQ ID NO: 38699 - DNA, 591 bp, Neisseria meningitidis
atgaaaaaatcctccctcatcagcgcattgggcatcggtattttgagcatcggcatggcatttgccgcccctgccgacgcggtaaaccaaatccgtcaaaacgccactcaagtattgagcatcttaaaaagcggtgatgccaacaccgcccgccaaaaagccgaagcctatgcgattccctatttcgatttccaacgtatgaccgcattggcggtcggcaacccttggcgcaccgcgtccgacgcgcaaaaacaagcgttggccaaagaatttcaaaccctgctgatccgcacctattccggcacgatgctgaaattaaaaaacgccaacgtcaacgtcaaagacaatcccatcgtcaataaaggcggcaaagaaatcatcgtccgcgccgaagtcggcgtacctgggcaaaaacccgtcaacatggacttcaccacctaccaaagcggcggtaaataccgtacctacaacgtcgccatcgaaggcgcgagcctggttaccgtgtaccgcaaccaattcggcgaaattatcaaagcgaaaggcgtggacggactgattgccgagttgaaggctaaaaacggcagcaagtaa

SEQ ID NO: 38700 - DNA, 1335 bp, Neisseria meningitidis
atgactgacctgaacaccctttttgccaacctcaaacaacgcaatcccaatcaggagccgttccatcaggcggttgaagaagtcttcatgagtctcgatccgtttttggcaaaaaatccgaaatacacccagcaaagcctgctggaacgcatcgtcgaacccgaacgcgtcgtcatgttccgcgtaacctggcaggacgataaagggcaagtccaagtcaaccggggctaccgcgtgcaaatgagttccgccatcggtccttacaaaggcggcctgcgcttccatccgaccgtcgatttgggcgtattgaaattcctcgcttttgaacaagtgttcaaaaacgccttgaccaccctgcctatgggcggcggcaaaggcggttccgacttcgaccccaaaggcaaatccgatgccgaagtaatgcgcttctgccaagcctttatgaccgaactctaccgccacatcggcgcggacaccgatgttccggccggcgacatcggcgtaggcgggcgcgaaatcggctacctgttcggacaatacaaaaaaatccgcaacgagttttcttccgtcctgaccggcaaaggtttggaatggggcggcagcctcatccgtcccgaagcgaccggctacggctgcgtctatttcgcccaagcgatgctgcaaacccgcaacgatagttttgaaggcaaacgcgtcctgatttccggttccggcaacgtggcgcaatacgccgccgaaaaagccatccaactgggcgcgaaagtgctgaccgtttccgactccaacggcttcgtcctcttccccgacagcggtatgaccgaagcgcaactcgccgccttgatcgaattgaaagaagtccgccgcgaacgcgttgccacctacgccaaagagcaaggtctgcaatactttgaaaaccaaaaaccgtggggcgtcgccgccgaaatcgccctgccctgcgcgacccagaacgaattggacgaagaagccgccaaaaccctgttggcaaacggctgctacgtcgttgccgaaggtgcgaatatgccgtcgactttgggcgcggtcgagcaatttatcaaagccggcatcctctacgccccgggaaaagcctccaatgccggcggcgtagcaacttcaggtttggaaatgagccaaaacgccatccgcctgtcttggactcgtgaagaagtcgaccaacgcctgttcggcatcatgcaaagcatccacgaatcctgtctgaaatacggcaaagtcggcgacacagtaaactacgtcaatggtgcgaacattgccggtttcgtcaaagttgccgatgcgatgctggcgcaaggcttctaa

SEQ ID NO: 38701 - DNA, 378 bp, Neisseria meningitidis
gtgatttctaaatctctttttggtaatcgtttgaaagaaaaaagaaagtttttagggcttacccaagcacaagctgctgaaaaagcaggtattgagcgcgaaacatggggcaaatacgaacgtggcgtatttatgcctagtggagatgtattgctctcttttttgaatatgggaatagatgtgagcagcttatttgctgctgaacagggaattaggccgtctgaaaattctgaaattagtaaggaagagtcagagttattagggtattaccgccaagccagcgataacggcaaatttgtcattctcagtgtggcaaaaggcgcagagaaaaaagcagccgaaaatactcaagtttcagccacgcataaaacagcgtga

SEQ ID NO: 38702 - DNA, 324 bp, Neisseria meningitidis
atgaacgcatttgcacaagcactttcctcggcactcgaccgctgtatcgccaccaacaccgtcgccaaacaaaaccggcccgtcggcttcctctaccgcgaagcccccgtttttgaaaacgacagcggctggcgtttcttcagcggcgacgagaccgacgaatacaccgacgatcccgacaacttcagcatcgtcagcctcgccgacatcgccaaaaccaaccctgaaaccgccgcactgctttcccaacccgaaggcagcgcatgggagcttgccgaagacggcacattccaaaccgtcgccgactggcagccgcaagactga

SEQ ID NO: 38703 - DNA, 252 bp, Neisseria meningitidis
ttgttagacggcattatgcgcaaagcctgccgcaaccgtccgctgtcggaaacgcaaaccaaacgcaaccggtatttgtcgaagacccgttatgtggtcgaacaaagcttcggtacgctgcaccgtaaattccgctatgcgcgggcagcctatttcgggctgctcaaagtgagtgcgcaaagccacctgaaagcgatgtgtttgaacctgttgaaagccgccaacaggctaagtgcgcccgctgccgcctaa

SEQ ID NO: 38704 - DNA, 483 bp, Neisseria meningitidis
atgggaatagaaggcgttttgaaaaaaggtttcatcaccaccagcgcggatacggtgctgaactatatgcgtaccggttcgttgtggccggttactttcggcttggcctgctgcgccgtggaaatgatgcacgcgggtatggcgcgttacgaccttgaccgtttcggcattattttccgtccgtccccccgtcaggccgacctgatgattgtggcaggtacgctgaccaataaaatggcgcctgccctgcgccgcgtgtacgaccagctcgccgagccgcgctgggtattgtctatgggctcgtgtgccaacggcggcggctattatcactattcttattccgttgtgcgcggtgccgaccgcgtcgtgccggtagacgtttatgtgccgggttgtccgccgactgcggaagccctgatttacggcctgattcagctccaacaaaaaatcaagcgcacttccaccatcgcgcgtgacgagtaa

SEQ ID NO: 38705 - DNA, 1065 bp, Neisseria meningitidis
atgaaagcagcacgtttttacgataaaggcgacatccgcatcgaagacatccccgaaccgaccgtcgcccccggcactgtcggcatcaatgtcgcctggtgcggcatctgcggtactgacctgcacgaattcatggaaggcccgattttcattccgccttgcggtcatccgcacccgatttccggcgagtccgcacccgtaacgatgggacacgagttctccggcgtggtctatgccgtcggcgaaggcgtggacgacatcaaagtcggccaacacgtcgtggtcgaaccctacatcatccgcgatgacgtaccgaccggagaaggcagcaactaccacctctccaaagatatgaactttatcggcttgggcggctgcggcggcggtctgtccgaaaaaatcgccgtcaaacgtcgttgggtgcatccgatttccgacaaaatcccgttggatcaagccgctttgatcgaaccgctgtctgtcggacaccacgcctatgtacgcagcggcgcgaaagcaggcgacgtcgcattggtcggcggcgcaggtccgatcggtttgctgttggctgccgtgttgaaagccaaaggcatcaaagtcatcatcaccgagctgagcaaagcacgcaaagacaaagcgcgcgaatccggcgttgccgactacatcctcgacccgtccgaagtcgatgttgtcgaagaggtgaaaaaactgaccaacggcgaaggcgtggacgtggcattcgaatgtaccagcgtgaacaaagtgttggatactttggtcgaagcctgcaaacctgccgccaatttggttatcgtatccatctggagccaccctgcaaccgtcaacgtccacagcgtcgtgatgaaagagctggatgtgcgcggcacgattgcctactgtaacgaccacgccgaaaccatcaaactggtcgaagaaggcaaaatcaacctcgaacccttcatcacccagcgcatcaagctggacgaactggtttccgaaggcttcgagcgtctgatccacaacaacgaatccgccgttaaaattattgtgagtccaaacctgtaa

SEQ ID NO: 38706 - DNA, 1050 bp, Neisseria meningitidis; identical to SEQ ID NO: 36439

SEQ ID NO: 38707 - DNA, 1275 bp, Neisseria meningitidis
atgaaaacactacaagactggctctcgcatttggaaaccgcccacagcggcggtttgatcgacatgggtttggagcgcacgagcgaagtgaaaaaacgcatgaagctcgagccgcaatgccccgtcgtcgttgtcgcgggaaccaacggcaaaggttcggtctgtgcctacctgacacagatttacaaacaggcgggctacaaaaccggtacgctgaccagcccgcatttattgcgttacaacgaacgcatcgccatcaacgccgaacccgtttcggacgatacgattattgcctctttcgagcgcatcgaagcggcgcgcagcgaaatatcgctgacttattttgaattcaatacgttggcggccgtcgacatcttcatgcgcgaacaggttgacgtgatgatattggaagtcggcttgggcggacgcttggacgcggtcaacgcatttgacggcgattgcgcggtggttactagtgtagatttggaccatcaggcgtttttgggcgatacggtcgagcaggtcggctttgaaaaagcaggcgtgttccgcagcggcaaacccgcaatctgcggtcaaaaccccgcgcccgaatcgttgctttcacacgccgaagccataggcgcgaaactgctgatggtgcagcgcgatttcgagtttcacgcgatggaaaacatccaatggaactaccgcttccggccgcaacattcagacgaccccgcgcgcaaccgcaatgccctgcccttccccgcattgcgcggcacataccaactttccaacgccgcctgcacgttgaccgtattggaatgcttgaacgccaaattgccggtggacatcggcgccatcaaacgcggattgctgctggttgaaaatcccggacgcttccaagtcctgcccggccgtccgctgaccgttttggatgtcggacacaatccccacgctgcccgcgccctgcgccgcagcctgattaatttggcgtttgcgcaaaaacgcaccgccgtattcagtatgctgtccgacaaagacatagacggcgtgttggaaatcgttaaagaccagtttgacgagtggtatatcgcaccgttggacgtaccgcgcggcatgacgctcgagagcctgcaaaacaaactgcacgaacacagcatcgaaaacatacagacattcgccgccgtccgcgaagcataccgggcggcagcctcaaaagcgggcgagaacgacagaatcgtcgttttcggctcatttcataccgttgccgatgtcatgtcggtactttaa

SEQ ID NO: 38708 - DNA, 1134 bp, Neisseria meningitidis
atgagcacccccgccctcctcgtcctcgctgacggcagcgtattccacggcacatcaatcggttacgaaggttcgacttccggcgaagtcgtgttcaatacttcgatgactggctatcaggaaatcctgaccgacccgtcctactgcaaacaaatcgttaccctcacctacccacacatcggcaataccggtaccaacgccgaagatgaagaaagccgcagcgtttacgccgccggtttgattatccgcgacctgccgctcttgcacagcaacttccgcgcctccgaaagcctgcacgactatttggtacgcaaccaaaccgtcgccatcgccgacatcgatacccgccgcctgaccacgctgttgcgcgaaaaaggcgcgcaaggcggcgcgattctgaccggtgcggatgccacaatcgaaaaagcgcaagaactcatcgccgcgttcggcagtatggtcggcaaagacttggcaaaagaagtttcctgcacggaaacttacgaatggacggaaggcgaatgggaattgggcaagggtttcgttacccctgacgaacagccttaccacgtcgtcgcctacgatttcggcgtgaaaaccaacatcctgcgtatgctcgcctcgcgcggctgccgcctgaccgtcgtccccgcccaaacgagcgcacaagacgtgttggcactcaatcccgacggcgtgttcctgtccaacggccccggcgaccccgagccttgcacctacgccatcgaagccgtgcaaaaactgatggaaagcggcaaaccgattttcggcatctgcttgggacaccagctcatcagcctcgctatcggcgcgaaaaccctgaaaatgcgcttcagccaccacggtgcgaaccaccctgtgcaagatttggacagcggcaaagtcgtcatcaccagccaaaaccacggttttgccgttgatgccgacaccctgcccgctaacgcacgcattacccacaaatccttgtttgacaacactttgcaaggcatcgagctgaccgacaaacctgtgttctgcttccaaggccaccccgaagccagccccggtccgcaagatgtcggctatttgtttgacaaattcattggcaatatgaaagcggcaaaacgggcataa

SEQ ID NO: 38709 - DNA, 420 bp, Neisseria meningitidis
atggacaataagaccaaactgcgcttgggcggcctgattttactgaccaccgccgttttaagcctcattatcgtattgattgtcgattcctggccgcttgccatcctgcttgccgccatcattgtcgctgccgctgcgggcggttttgtttggacatcccgccgacagcaacgccagtttatcgaacgtctgaaaaaattcgacatcgatcccgaaaaaggcagaatcaacgaggcaaacctgcgccgtatgtaccacagcggcggacaacaccagaaagatgcgattaccctgatctgcctgtcgcaaaaatgttcggtggacgaggcgcacgctatgttcaaaaaacgcccgacacgtcaggaaatcaatcaaatggcggcaaaacagtcgcgcggtcagaaacgtccgcaccgttaa

SEQ ID NO: 38710 - DNA, 1356 bp, Neisseria meningitidis
  misc_feature 8, 9, 10, 11, 12: 'n' is a, c, g or t
atgagtattcaatccggcgagattttagaaaccgtcaaaatggtggccgaccagaattttgacgtgcgcaccattaccatcggcattgatttgcacgactgcatcagcaccgacatcgacgtgttaaaccaaaacatttacaacaaaatcaccacggtcggcaaagacttggtggcgacggcaaaatatctgtctgccaaatacggcgtgccgattgtgaatcagcgcatttccgttacgccgattgcccaaatcgcggcggcgagcaaagccgattcttacgtcagcgtggcgcaaactttggataaggctgccaaagccatcggcgtgtcctttatcggcggcttttccgcgttggtgcaaaaaggcatgtcgccttcagacgaggtgttaatccgttccattcccgaagcgatgaagaccaccgacatcgtgtgcagctccatcaatgtcggcagtacgcgcgccggtatcaatatggatgcggtcaagctggcaggcgaaaccatcaaacgcacggctgaaattacgcccgaaggtttcggctgcgcgaaaatcgtcgtgttctgcaatgcggtggaagacaatccgtttatggcgggtgcgtttcacggatcgggcgaagcggatgctgtgattaatgtcggcgtatccggcccaggtgtcgtaaaagccgcgttggaaaattcggatgcaacgacattgaccgaagttgccgaagttgtgaagaaaaccgccttcaaaattacccgcgtgggcgaactcatcggccgcgaagcctcaaaaatgctgaatatcccgtttggtattctcgacttgtcgctggcaccgacccctgccgtcggcgactcggtggcgcgcattcttgaagaaatgggtttgagcgtctgcggtacgcacggcacaacagcagctttggcattgctgaacgatgccgtgaaaaagggcggcatgatggcttcgagcgcggttggcggtttgagtggcgcgtttatccccgtttccgaagacgaaggtatgattgccgccgccgaagcaggcgtgctgacgttggataaactcgaagcgatgaccgccgtctgctcggtcgggctggacatgattgccgtccctggcgatacgcccgcacacaccatttccggcatcatcgccgacgaagccgccatcggcatgatcaacagcaaaaccactgccgtgcgcattattccggtaaccggaaaaaccgtcggcgacagcgtcgagttcggcggcctgttgggctacgcgcctgtaatgccggtaaaagaaggctcatgcgaagtgttcgtcaaccggggcggcaggattcccgcaccggttcaatcgatgaaaaactga

SEQ ID NO: 38711 - DNA, 423 bp, Neisseria meningitidis
atgaataaaaaccgtaaattactgcttgccgcactgctgctgattgcctttgccgccgtcaagctcgttttgttgcaatggtggcaggcgcagcagccgcaagctgtggcggcgcaatgcgatttgaccgagggttgcacgctgccggacggaagccgcgtccgcgccgccgccgtttcaaccaaaaaaccgtttgatatttatatcgaacacgcgcccgccggcacggaacaggtcagcatcagcttcagtatgaaaaatatggatatgggtttcaaccgctatatgttcgagcggcaaccgtcggggacttggcaggcagtacgcatccgcctgcccatctgtgtcgaaggcaggcgcgattttacggcggacattacaatcggcagtcggacatttcagacggcatttaccgccgaataa

SEQ ID NO: 38712 - DNA, 465 bp, Neisseria meningitidis
atgattgagatgagtaaagattaccgaaatgatttgtacgatgtatatgtttcctacccgccccaagtggatctcgggcttatccgggagtgcctcagggagaatctcggcgaggaaaaggcggaaggattgatcgaatcgctcgattccaaacctcaagtgctggttgaggaaaaatgcacttgggcgaaacgggaagagttgcatgattatttcagctatttgggtttggatattattacccggagatatatggagttggaaacggtcgtgccgccggaggaaggggagggcgaaggagaaggcgcggatggggaaatgcccgaatatcttgaacttcacggcgggcgggaagatgatatttccgcaccttcgcaacccgaaccgccgtcccgcaatatcaaactgctggttttcgggctgctgattgcctttttgggctatctgctcggtaagattttttga

SEQ ID NO: 38713 - DNA, 438 bp, Neisseria meningitidis
  misc_feature 8, 9, 10, 11, 12: 'n' is a, c, g or t
gtgtgtgnnnnngccaaacgaaacttcgtcatcgccgtttcgtctttgtctaaaaccaaaaccgaaaccaacaaccccaaaggtatcgcccatactatcgaataccttaaaaaacacaaggtcgccctcgtcgtgacggaaagtactggcggtctcgaaatccccgccgccaaagccatccgccgagcaggcatagccgtgattatcgccaacccgcgtcagacgcatcagtttgcccaatcgcagccgctgaccaaaaccgacgccaaagatgccaaaatgcccgccttcttcgcacagatgacggcacagaaagaagattcgcaaaccatgccctaccaaccgcccaccgaagcggaagaagtgttggaagccttggttaaccgccgcaaccaatcggcggatatgcggactgccgagaaaaaccgtctgcattag

SEQ ID NO: 38714 - DNA, 783 bp, Neisseria meningitidis
atgaccgacatcctcaataaaatccttaccgccaaggcacaggaagttgccgcccaaaaagccgccgtcaacgccgaacacatccgcgcacttgccgcagaagccgcgcccgtccgcagctttatcggttcgatacgcggcaaacaccgcctcaacctgcccgccgtcattgccgaaatcaaaaaggcaagcccgagcaaagggttaatccgtccggacttccgaccgcccgagattgcccgcgcctatgaaaacgccggggcggcgtgtttgtccgtactgaccgacgaaccctatttccaaggttcgcccgaatacctcaaacaggcgcgcgaagccgtatcgctgcccgtgctgcgcaaagacttcatcatcgacgaatatcaggtttatcaggcgcgcgcatggggggcggatgccgtcctgctgattgccgcagcactggaacaggaacaattggaacgctttgaagcggtggcgcacgaattgggcatgaccgtcctgctcgagctgcacgacgaaaccgaattggaaaaatgccgcaacctgaccacgccgttgtggggcgtaaacaaccgcaacctgaggacttttgaagtctccctcgaccaaaccctgtcgctgctgcccgcactggaaggcaaaaccgtcgttaccgaaagcggcattacgggcaaggcggatgtggaatttatgcaatcgcgcggcgtgcacaccttcctgattggcgaaacgttcatgcgtgccgacgatattgaggcggaagtgggcaaactcttctaa

SEQ ID NO: 38715 - DNA, 276 bp, Neisseria meningitidis; identical to SEQ ID NO: 38132

SEQ ID NO: 38716 - DNA, 762 bp, Neisseria meningitidis
atgatgggcgattccgtcatttattatgtagaacaggcagacaaaccggtaaaccgtgccggcgaacgcgcccgcaaaacattcaaatatttttggcgcgagcttttttgggaacgccgccgcatcattcccgccttagattttgccatggtcaaagccccttttttccaagacggcgaagacggcgaaatttgcgaacatatgtggatcgacgatatttattttgacggtctttacatttatggcgtgctgaacaatgaacccggcgaactgaccaatgtcgaacaaggcgaaagcgtttgcgttccggttgacgacatcagcgactggatgttcgtgtgcaacggcattccctacggcggctttaccatacaggcaatgcgtggacagatgacggaagaggagcgtaccgaacacgatgccgcatggggaatcgatttcggcgatcccgggcaggtattgctggtgtatgaagaaaaagaacatcccgaaaatctggaagagcatccgatgtgccggaactgtattgacgattttcggcaacagttgtcccaaaatccggattttctgcatgagcaggacgaagacggctatacgccgcttcatcatgaagccatcgcaggaaatgcacttatggttcaagccatgcttgaatacggcgcaaatcctgcctcaaagacatcggaaggctataccgccctcgattttgcccgcctggcgggctggcaaaatgttgccgacctgctcgaaccgcgacattag

SEQ ID NO: 38717 - DNA, 273 bp, Neisseria meningitidis
atgatgagtgtaaaagaattattcaaagtcatcttagatgaaaataaagattttcctattagaacgattcatcgtaccccgatggggatacttcccaaacctgttgctttaagtattgttcaatatgaaaatgacccgggattttatttgttttatttggatgagaccggtcaggaacaaacggatacttatcatgacacattagattcggcatttgaacaggctgaatttgaatttggaatcagcaaagaggaatggatgcaaagtccttag

SEQ ID NO: 38718 - DNA, 1176 bp, Neisseria meningitidis
atgcagaatatttttgaccctttggttattcgtggaaaatcccttacccccatcgtgcaaggcggtatgggggtcggtgtttccgcatcgggtttatccagcgcggtggcgcgtgaaaacggtatcggaacgattgccagtgtggatttgcgccaccttcacgaagacctactcgccgaatcacaaatcaatccgagtgaagagaaatatacatctttgaactgtaccgcattagacagggaaatccaaaaagccaaaagcgcttcagagggaaaaggactgattgcggtcaacgtgatgaaggcggtcaaagaccacgccgcgtatgtccgccaggcttgcgaatcaggggcggatgcggttgtaatgggtgccggcctgcctttagacctgccggaaatgaccgagggctatcataaagatgtcgcgctgctgccgattctgtccgaatcgcgcggtattaatatcgtcttgaaacgttggatgaaaaaaggcatattgcccgatgcgattgtagtcgaacatcctgcccacgcggccggacatttgggtgcatcaaccgttgaaggcgtaaacgatgccaagttcgacttcaaacgcgtgattgaggaaacgtttgaagttttcaaaagtttagggctggaaagcgaaaaaatcccgcttattcttgcgggaggcatggcaaattttgaaaaagtcaaaaccgccctaaagaactggggagcatccgccgttcaaatcggtacggcttttgccgttaccgaagaaggagatgcacaccttaacttcaaaaaaacgctcgccggtgcggaaactgaaaaagtagtcgaatttatgtctgttgccggtttgctggcgcgcggtgtccgcaccaaattcctagacagctacatcaagcgtgaaagcaaacttcagacaaacgccaaagccgacccgcgccgctgtacccaaggtttaaactgcctaaccagttgcggtctgcgcgacgggctttccaaagcaggacagttctgtattgatatccagcttgccgccgcattccgtggagaagtagataaaggcctgttcttcagaggtaaagacccgctgcccttcggcaatgccatccgcaccgtccgcgagacgatacaatatctgctgacggggagcgaacctgttgcaacgctcggacgctga

SEQ ID NO: 38719 - DNA, 645 bp, Neisseria meningitidis
atgaagctcaaacatctgttgccgctgctgctgtcggcagtgttgtccgcgcaggcatatgccctgacggaaagggaagactatcttgtgttggataaacccattcctcaagaacagtcgggcaaaattgaggttttggaatttttcggctatttctgcgtacattgccatcatttcgatcctttgttattgaaattgggcaaggcattgccgtctgatgcctatttgaggacggagcacgtggtctggcagcctgaaatgctcggtctggccaggatggcggctgccgtcaatttgtcgggtttgaaatatcaggcaaaccctgctgtgtttaaagcagtttacgaacaaaaaatccgcttggaaaacagggctgttgccggaaaatgggctttgtctcaaaaaggctttgacggcaaaaaactgatgcgcgcctatgattcccccgaagctgccgccgccgcattaaaaatgcagaaactgacggaacaatacggtattgacagcacgccgaccgttattgtcggcggaaaataccgcgttatcttcaataatggctttgacggcggcgttcatacgattaaagaattggttgccaaagtcagggaagaacgcaagcgtcagacccctgctgtacagaaatag

SEQ ID NO: 38720 - DNA, 1419 bp, Neisseria meningitidis
gtgaaaccgctgcgcagactgacaaacctccttgccgcctgcgccgtagcggccgccgccttcggacagcccgccctcgcggcggacttggcgcaagacccgttcattaccgataacgcccaacggcagcactacgaacccggcggcaaataccacctcttcggcgacccgcgcggcagcgtttccgaccgcaccggcaaaatcaacgtcatccaagactatacccaccagatgggcaacctgctcatccaacaggcaaacatcaacggcacaatcggctaccacacccgcttttccggacacggacacgaagaacacgcccccttcgacaaccacgccgccgacagcgcaagcaaagaacaaggcaacgttgacgaaggctttaccgtgtaccggctcaactgggaaggacacgagcaccatcccgccgatgcctacgacggcccgaagggcggcaattaccccaaacctacgggcgcacgcgacgaatacacctatcacgtcaacggcacagcacgcagcatcaaactcaatccgaccgacacccgcagcatccggcaacgcatatccgacaattacagcaacctcggcagcaatttctccgaccgcgccgatgaagccaacagaaaaatgttcgagcacaatgccaagctcgaccgctggggcaacagcatggagtttatcaacggcgtcgccgccggagcactcaacccctttatcagcgcgggcgaagccttgggcataggcgacatactgtacggaacgcgctatgccatagacaaagccgcaatgcgcaacatcgcccccttgcccaccgagggcaaattcgccgtcatcggcggcttgggcagcgtggcgggctttgaaaagaatacgcgcgaagccgttgaccggtggatacaggaaaaccccaatgccgccgaaaccgtcgaagccgtcttcaacgttgccgctgccgccaaagtcgcgaagctggcaaaggcggcgaaaccggggaaagctgcggttagcggggatttctcagactcctacaagcataacactgcttcaagattatctcagtctgtagatggagaaatgtttcaaacccgcaatgttgattttaaagcaaaatctattgggactaaaattcatgatggagctcaagggaaacatatttcgggacatagaaactacattgaaggtaagagtactttaaatcaaaacattaatcctcaagaattgttgaacggaatacattcaggtgcttatccagttatttctaaaggagcaagaggaaatcctgttgttgattttgggtatcctataggcagcgatgggaaatcaggattaagtaccaattttggtacgattcattcaggtaaaaatggagttcacattgttccggctaaccctaaaaccattaaaaaggtgcaatag

SEQ ID NO: 38721 - DNA, 507 bp, Neisseria meningitidis; identical to SEQ ID NO: 38697

SEQ ID NO: 38722 - DNA, 1110 bp, Neisseria meningitidis
atgaaatacaaaagaatcgtatttaaagtcggcacatcttcgattacccattcggacggcagtctctcgcgcggcaaaatccaaaccatcacccgccagcttgccgcattgcatcatgcgggacacgagctggtcttggtgtcttccggcgcggttgcggcagggtttggtgcgctgggtttcaaaaaacgtccggtcaaaatcgccgacaaacaggcttccgccgccgtcgggcaggggctgctgatggaagaatatacggcaaacctgtcttcagacggcatcgtgtccgcacaaatcctgctcagccgcgccgactttgccgacaaacgccgctaccaaaatgccggcggcgcactttccgtgctgctgcaacgccgcgccgtccccatcatcaatgaaaacgatacggtttcggttgaggaattgaaaatcggcgacaacgacacattgagtgcgcaagtggcggcgatgatacaggcagacctcttggtgctgctgaccgacatagacggtctttacacgggcaacccgaacagcaatcccgatgccgtacggctggacaaaatcgaacacatcaaccatgaaatcatcgaaatggcgggcggatcgggttcggcaaacggcacgggcggtatgctgaccaaaatcaaagcggcaaccatcgccgccgaatccggcgtatcggtgtatatctgttcctcgctcaaacccgatgcacttgccgaagctgccgaacatcaggcggacggctcgtttttcgtcccccgtgccaaaggtttgcggacgcagaagcaatggctggcgttctattccgaaagccggggcagcgtttatgtggacgaaggtgcggaacacgctttgtccgaacaggggaaaagcctgctgatgtcgggcattgccggaatcgaagggcatttttcccgtatggacaccgtaaccgtgtacagcaaggcaaccaaacagcccctgggcaaagggcgcgtcctgttcggttctgccgccgccgaagacctgctcaaatcgcgtaaggcgaaaggcgtgttcatccatcgggacgactggatttccatcacgcccgaaatacgcctgcttctgaccgaattttag

SEQ ID NO: 38723 - DNA, 2607 bp, Neisseria meningitidis
atggctgccaaccaacgttaccgcaaaccgctgcccggtacggatttggaatactacgacgcgcgtgcggcgtgtgaggacatcaagcccggctcttacgacaagctgccttacacgagccgcattttggcggagaatttggtcaaccgcgcggacaaagtcgatttgccgacgctgcaaagctggctgggtcagctgattgagggaaaacaggaaatcgactttccttggtatccggcgcgggtggtgtgccacgatattctggggcagaccgcgttggtggatttggcaggtctgcgcgatgcgattgccgaaaaaggcggcgatcctgccaaagtgaatccggtggtgcaaacccagctcatcgtcgaccactctctggccgttgaatgcggcggctacgaccccgatgccttccgcaaaaaccgccaaatcgaagacagacgtaacgaagaccgtttccacttcatcaactggacaaaaaccgcatttgaaaatgtggacgtgattccggcgggcaacggcatcatgcaccaaatcaatctagaaaaaatgtcgcccgtcgtccaagtcaaaaacggcgtggcgttccccgatacctgcgtcggtactgactcacatacgccgcacgtcgattcattgggcgtgatttccgtgggcgtgggcggattggaagcggaaaccgtaatgctgggacgcgcgtccatgatgcgcctgcccgatattgtcggcgttgagctgaccggcaaacgccggccgggcattactgccaccgatatcgtgttggcactgactgagttcttgcgcaaagaacgcgtggtcggggcatttgtcgaattcttcggcgaaggtgcgagaagcctgtccatcggcgaccgcgcaactatttccaatatgacccctgaattcggcgcgactgccgcgatgttcgctattgatgagcaaaccattgattatttgaaactgaccggacgcgacgacgcgcaggtgaaattggtggaaacctacgccaaaaccgcaggcttatgggcagatgccttgaaaaccgccgtttatccgcgcgttttgaaatttgatttgagcagcgtaacgcgcaatatggcaggcccaagtaacccgcatgcccgttttgcgaccgccgatttggcggcgaaagggctggcgaagccttacgaagagccttcagacggccaaatgcctgacggtgcagtgattattgccgcgattacttcgtgtaccaatacttccaatccgcgcaacgttgtcgccgctgcgctgttggcacgcaatgccaaccgcctcggcttgcaacgcaaaccttgggtgaaatcttcgtttgccccgggttcaaaagtagccgaaatctatttgaaagaagcaggcctgctgcctgaaatggaaaaactcggcttcggtatcgttgccttcgcatgtaccacctgtaacggcatgagcggcgcgctcgacccgaaaatccagaaagaaatcatcgaccgcgatttgtacgccaccgccgtactgtcaggcaaccgcaacttcgacggccgtattcatccgtatgcgaaacaggctttcctcgcttcgcccccgttggtcgttgcttacgcgctggcaggcagcatccgtttcgatattgaaaacgatgtactcggcgttgcagacggccgcgaaatccgcctgaaagacatctggccgaccgacgaagaaatcgatgccgtcgttgctgaatatgtgaaaccgcagcagttccgcgatgtgtatgtaccgatgttcgacaccggcaaagcgcaaaaagccccaagcccgctatacgactggcgtccgatgtccacctacatccgccgcccgccttactgggaaggcgcgctggcaggggaacgcacattaagaggtatgcgtccgctggcgattttgcccgacaacatcaccaccgaccacctctcgccgtccaatgcgattttggccgtcagtgccgcaggcgagtatttggcgaaaatgggtttgcctgaagaagacttcaactcttacgcaacccaccgcggcgaccacttgaccgcccaacgcgctaccttcgccaatccgaaactgtttaacgaaatggtgaaaaacgaagacggcagcgtgcgccaaggctcgctcgcccgcgtcgaacccgaaggcgaaaccatgcgcatgtgggaagccatcgaaacctatatgaaccgcaaacagccgctcatcatcattgccggtgcggactatggtcaaggctcaagccgcgactgggcggcgaagggcgtgcggctcgcgggagtggaagccatcgccgccgaaggtttcgagcgcatccaccgcaccaatctcatcggcatgggcgtcttgccgctgcaattcaaacccggcaccaaccgccacaccctgcaactggacggcacggaaacctacgacgttatcggcgaacgtacaccgcgctgcgacctgaccctcgtgattcaccgtaaaaacggagaaaccgtcgaagttcccgttacctgccgcctcgatactgcagaagaagtattggtatatgaagccggcggcgtgttgcaacggtttgcacaggattttttggaagggaacgcggcttag

SEQ ID NO: 38724 - DNA, 1263 bp, Neisseria meningitidis
atgacattatttcgccccgaagtattccaagctaaaaaaaatcgctggacagggcaaattgttttagtgcgtcctttttccttgcagtttttaacatttttcgcggtctcattagcggctattttagttgcttttttaatttttgggagctataccaataaaaccaccgtaacaggacaacttttgccgacaacaggggtagtacgcgtatattcgcaggatatgggggttattgctcatcaacacgttatgaatggcgattttgtgaaaaaaggcgatgtgttatttacattatctacttcacgaaatgacaataatggcagcatacaagcacgattactcgccgaagctgaattaaaaaaatcactatcagaacaagaaattattatgaaaaaacgtgttcatgcagcagaaaaaaccgcacaagaaaacacggtacaccgttttcagaaccaaatgcaacacgttagaaatcaaattatcatgcaagaaaaacgtattgcgatttctgaaaaaatgttagaaaaacagcgttatttagccaaaatggacgcaatttctgaattagaaaaaaatagttatgaaattgctttattggagctgaaagcaggtttagccgcttaccaacgagaagcagataatcttgctcgggaaataactgtacagcaaagcaatctaaaaaatctgcctgaacagcaagctactgaaatcagtcaattagaacgcgcagtatctgtctatcaacaagaaatattggattatcaacaacgtaacgaacaaactattcgcgcaaccatatcaggctatgtcagttctattaacacggaaattggtcagcaggtagatactaacaaactattgatgagtatcgtgccgaaagaaagtgaattactggctaatttatatgtccctagtcgcgcaatcggttttgtaaaaccaaatgacaaggtaattttgcgttatcaagcatatccttatcaaaaattcggacacgcagaaggacacgtcatttctattgctcaaacggcactaggggcgcaagaatggacaaatttaggcaatatttttactcaaacggcacaagtgaatgagcctgtttatttaatcaaagtaaaactggataatcagcatattcgtatatatggcacggagaagaaattgcaaattggtatgatactagaagccgatattttgcatgagaataaacggttatatgaatggatacttgaccctttgtatcaagtaatgggaaaaatatcatag

SEQ ID NO: 38725 - DNA, 756 bp, Neisseria meningitidis
ttgaaaatgctggaaaccgccgacccgggcaaccagtatgccgtcccctatttctccggcgtgaacacgattgcgattacggcgaaaggcaaagagcttttaggcggcaagctgcccgaaaacggctgggatttgctgttcaaacccgaatacacccacaagctgaaatcctgcggcatcgccctgtgggacaccccgagcgaaatgttcccgattttgctgaactacttgggcaaagaccccaaaggttcgaatcctgaagatttgaaggcagcggcggaagtgttgaagtctatccgtccggatgtcaaacgtttcagcccgtccatcatcgacgagctggcgcgcggcgacatctgcctggcggcaggcaacggcggcgatttgaacttggcgaaagcacgttccgaagaagtgaaaaacaacgtcggcatcgaagtgctgaatccgaaaggcatgggcttctggattgagtcttggctgattcccgccgatgcgaaaaacgtcgccaatgcccacaaatacatcaactacacgctcgaccccgaaatcgcggcgaaaaacggcatcgccgtaaccttcgcccccgccagcaaaccggcgcgcgaaaaaatgcctgccgagctggtgaacacccgttccatcttcccgaacgagcaggatatgaaagacggttttgtgatgccgcaaatgagtacggatgcgaaaaaactgtctgtcagcctgtggcagaaaatcaaagtcggcaccaactga

SEQ ID NO: 38726 - DNA, 312 bp, Neisseria meningitidis
gtgtatcaatatattatttatgttttaacaggagacctttatctacaaaaagacatagatgaaaatttagaatttatccatcaagcagaaaataatcccaatgaagtttattcaggaggtggacaaggtttttgctgggatatttctgctgaaaaagtagttttctatcacaacgaatttgatgaagaagacggctggcctgatttaagctgttcgctgcatacttttaaaactgctttaattgcttggaatgcttttttgcaattgcctaaaagtattcattcggtggtggagactgtgattgaggaataa

SEQ ID NO: 38727 - DNA, 654 bp, Neisseria meningitidis
atgaagataacgcactgcaaattaaagaaaaaagtacagaaagaactgctccgtttttttgtactggaagttaccgcccgttctgccgccgatattttgggtatccatcccaattcggcagcactgttctaccgtaaaatccgcacggttatcaaccatcatttggccttggctgccgatgaggtttttgagggccctgtcgagcaggacgaaagcgatttcggcggacggcgtaaaggcagacgtggtcggggtgcggcaggaaaagtggttgtcttcggcattctgaaacacaacggacgggtctataccgttatcgtagataatgccaaatctgaaacgttactccctgtcatcaaaaagaaaatcatgccggacagtattgtttataccgatagtctgagcagctgcgacaagttggacgtgagcggttttatccattaccgcatcaaccattccaaggaatttgcagaccgtcagaaccacattaacggcattgagaacttttggaatcaggcaaaacgcgtcttgcgaaaatacaacggaatcgattgcaaatctttcccgctgttcttgaaagaatgcgaatttcgatttaacttcggcacaccgtctcaacagcttaaaatcctgcgggattggtgtggaatttag

SEQ ID NO: 38728 - DNA, 687 bp, Neisseria meningitidis
atgacggtgttgcaagaacgttattgtgaggtgtccgaccgtatcggaaaattggttctgcaggcgggaaggaagccgcattccgtcagcctgattgccgtcggtaagactttcccttcagacggcatccgcgaagtttacgccgccggacagcgtgatttcggcgagaactatattcaggagtggtacggcaaaacggaagagttggcggatttgaccgacatcgtgtggcacgtcatcggcgatgtgcagtccaacaaaaccaagtttgtcgccgaacgcgcgcattgggtgcataccgtatgccgtctaaagaccgccgtccggctgagtgggcaacgtccttcctcaatgccgcctttgcaggtgtgtattgaggtgaacattgcgggcgaggcggtgaagcacggtgtcgcgcccgaagaagcggtcgtgcttgcggtcgaagtggcgaagttgccgaatatcgtcgtacgcggactgatgtgtgttgccaaagccggcggcagcgaggcagaattgaaaacccagtttcagaccatgcaaaagttgcttgccgacctcaatacggctggcgttaaggcggacgtgctgtctatggggatgtcggacgatatgcctgccgccattgagtgcggtgcgacacacgtccgtatcggcagcgcgattttcgggaaaaggggctga

SEQ ID NO: 38729 - DNA, 1854 bp, Neisseria meningitidis
atgaaccgttatcctttatggaaatatctgctgattgtgttcacgattgcggttgccgcagtgtattcgctgcccaacctattcggcgaaacacccgccgtgcaggtatcgaccaaccgacaagccatcatcatcaacgaacagactcaattcaaagtggatgccgcgctgaaaaacgcaggtattcagaccgacgggatgtttgttgtggacaattcactgaaagtgcgtttcaaagacacagaaacgcagcttaaagcgcgcgacgtcatcgaaaacactttgggcgaagggtatattaccgcgctcaacctgttggcggacagccccgaatggatggcgaaaatcaaagccaatccgatgtttttgggtttggacttgcgcggcggcgtgcatttcaccatgcaggtcgatatgaaagcggcgatgcagaaaacgtttgaacgttattcgggcgacatccgccgcgaactgcgccgcgaaaaaatccgcagcggcacggtgcgtcaggctggaaacagcctgaccgtccctttgcaggatgcaggtgatgtgcaaaaggctctgccgcagttgcgcaagctgtttcctgaagcaacgctgaattcagacggcagcaatatcgtcttgacgctttcggaagaggcggtcaataaagtgcgttccgatgcggtcaaacagaacatcactaccctgcacaaccgtgtgaacgagttgggcgtggccgaacccgtcatccagcagtccggtgccgaccgtatcgtcgtgcagcttccgggcgttcaggatactgccaaggcaaaagacatcatcggccgtaccgcgactttggaattgcgtatggtggaggacgatcctgccaagttgcgcgaggcattggaaggcaacgtgccgagcggttatgagctgctttcaagcggcggagatcgtcccgaaactctgctaatcagcaaacaggtcgagctgacgggcgacaacatcaacgatgcgcaaccgagtttcgaccaaatgggcgcacctgccgtcagtctgagcttggacagcgcgggtggcagcatttttggcgaactgactgccgcaaatgtcggcaaacgcatggcgatggttttgatcgaccaaggaaaatccgaggttgtaaccgcgccggttatccgtactgccattacaggcggacgcgtggaaatttccggaagcatgacgacagccgaagccaatgatacgtctttgctgttgcgtgccggttctcttgccgcgccgatgcagattgtcgaagaacgtaccatcggtccgtctttgggtaaggagaacatcgaaaaaggcttccattcgactttatggggttttgccatcgttgctgcattcatggtggtttactatcgtctgatgggtttcttttctaccattgcattgagtgccaacatactgttcctaatcggtattttgtctgccatgcaggcaacgttgacgttaccgggtatggccgcgctggcgttgactttgggtatggcaatcgactccaacgtcttgattaacgaacgtatccgcgaagaattgcgtgccggcgtgccgccgcagcaggcaatcaatctcggtttccaacacgcatgggcgaccattgtcgattccaacctgacttcgctgattgccggtatcgcgcttttggtattcggttccggcccggtacgcggttttgcggtcgtacactgtttgggtattctgacttcgatgtattcgtccgtcgtcgtattccgtgcgttggtcaatctgtggtacggacgcagacgcaaattgcagaatatttccattggttcggtgtggaagccgaaagccgaaatggcaggaggcaaggagtaa

SEQ ID NO: 38730 - DNA, 1458 bp, Neisseria meningitidis
atgcacaaaatcctgcccatcgcccacgtcctctcccgactgggtatgctgttttcctttatcctgctgatacccgccgccctctcctacgccttttcggacggcgcgtacaccgccttcgccaccaccgcgaccgttaccctttccggctcgtgcatcgtccggctcgccaccctccggttcaggcgcgaactgcgcccgcgcgacggctttaccctcgtcctgatgttgtggctggcgtttgccgctatggctgcgatgccgatgtacctgtatttcccgaatatgggctttaccgacgcattttttgaatcgatgtcgggactgaccaccaccggcgcgaccgtcatcccccacgtcgacgggctcgccccctccgtcaacttttggcggcatatgctcaactggctgggcgggatgggcatcatcgtccttgccgtcgccatcctgcctatgctcggcgtaggcggcacgcagttattcaaagccgaaatccccggcattgacaaagaaagcaaaatgtcgccgcgcatttcccaagtggcgaaaaaactttggttcggctacaccctgatcaccatcctcgcggcagcctgcctgcattttgccgggatgggctggttcgatgccgtctgtcacgcgatggcgaccctctcgctgggcgggttttccacccacgatgccagcatagcttattacaactcccccctcatcgaagcggtcatcatcgttttcaccattgtcggcggcatcaattttgccaaccatttcgccgccctcaacagccgcagcctcaaaacctattggaaagacgaagaatgccggacgatgctgctgctgctctccggcagcatccttgccgccgccctgtacctgtggcacaccggctattacgccggttttaccgaatccctgcgctacaccgccttcaacttcgtctccatcggactggcaaacgggctggccaacaccgacttcgcacaatggccgctcctgatttccctgtggatgtttttcctcgccaacatcctcgccaactccggctcgaccggcggcggcatcaaaaccatacgcgccctcgtcctgttcaaattcagcctgcgcgaaatgatggtgctgctgcaccccaaagccgtccgcaccgtcaaaatcagcggcaaggccatacccgaccgcctcgcgctgaccgttatgtccttcatcttcatctactttatgaccgtcgtcctcttcagcttcctgctgatggcgagcggtatggaatttaccaccgccttcaccgccgtcatcgcctgcatcaccaacgccggccccggcctgggcgaagtcgggcccgccggcaattacgccggtttggacgtgatgcagaaatggatctgcgttaccgccatgctcttgggcaggctggaaatcttcaccgtcttcatcctcttcacccccgcctactggaagaaataa

SEQ ID NO: 38731 - DNA, 474 bp, Neisseria meningitidis
atgttatccgcagagtccttaaaacaaatcgacacagaactggcgaaatatcccgccgaccaacgccgttccgccatcatgggtgcgttgcgtatcgcccaaaccgaaaaaggctggctcgcccccgaaaccatcgcttttgttgccgactatatcggcatcacgcctgcacaagcctacgaagtcgccactttctacaatatgtacgaccttgagcctgtcggcaaatacaaactgaccgtttgtaccaacctgccctgcgccctgcgcggcggtatggctaccggcgaatacctcaaacaaaaactcggtatcggctacggcgaaactacccctgacggcaagtttacccttgtcgaaggcgaatgcatgggcgcatgcggtgatgcccccgttatgctggtcaacaaccacagcatgtgcagctttatgaccgaagaagcgattgagaagaaactggcggagttggagtag

SEQ ID NO: 38732 - DNA, 705 bp, Neisseria meningitidis
atgttgcgttctattttggcggcttccctgctggcggtatcttttccgacggcggctgaagcattgaattacaatattgtcgaattttctgaatcggcgggtgtcgaggcggttcaggatacaatgtccgcacgtttccaagtgacggcggaaggacgggacaaaaatgccgtcaatgccgagtttgttaaaaaattcaacaatttcaccagaaaatcaaaaaatggtagctttaaaaccgaattggtatcgcgcagtgcgatgccgcgctatcaatataccaacggcagacgcattcaaacaggttgggaggagcgtgcggaatttaaggtcgagggtagggattttgatgcgttgaaccgttttattgccgatgttcaggcagatgccgcgttggaatatacggatttccatgtgtcgcgcgaacgccgcaacgaggtcatcgatcaggtcagcaaggatgccgttttgcgtttcaaggcgcgtgccgaaaagttggcgggcgttttgggtgcgtccggttataaaatcgtcaaattaaatttgggacacatcggcagccatatcgcgggagggggagctgctcaggcaaaaatgcttcgtgccatgccgatggcggcaagcgtcaatatggagggtgcggattccgccgcgcctggtgtggaggaaatcagcatcagcgtcaatgggacggttcagttctga

SEQ ID NO: 38733 - DNA, 708 bp, Neisseria meningitidis
ttggtcaaaacggcagacggctacaaagccattgcccgtatccgaaccggcgaccgcgtcttcgccaaagatgaaaccagtggaaaaactggatacaaacctgttaccgcccgatacggcaatccgtatcgggaaaccgtttacattgaaatttcagacggcatcggcaacaaccaaaccctgatttccaataaaatccacccgttttacagtcaaggaaaatggatacaggcaggtcgtctgaaaaaaggcgacaccctgctttccgaaagcggtgcaaaacagacggttcaaaacattaccctcaaacagcagccgctcaaagcctacaacctgaccgttgccgactggcatacttacttcgtcaagggtgataaggcggaaacggaaggggtttgggttcataatgattgtccgtatgataaaggcaaccaacgatataaagacgcttcttatcatggcaaaaatgataattctgtgaaaagtagagcaccaacaaacggacaagcagctcttgataattccgttcaagttaaatcaacttctcctcgaagagttggggttgataaagccaataatgaaatcgttgtattagacaaaactcaaacttttaataacggttttgcggaatatcacgggcatgtcagaagttggcaagatttgcataccgatcagaaaaatgctttaaaaaaagcaggattggattag

SEQ ID NO: 38734 - DNA, 123 bp, Neisseria meningitidis
atgttaccctcgaaatatgaagataacacactgcaaattaaagaaaaaagtacagaaagaactgctccgttttttgtactggaagttaccgcccgttctgcatctgcaaaccgttttgtctga

SEQ ID NO: 38735 - DNA, 1389 bp, Neisseria meningitidis
atgtctattaaatttgccgatttgaacctcgataaaaacatcttgtccgccgtcagcagcgagggttacgaaagcccgaccccgattcaggcgcaggcgattccgtccgccttggaaggtcgcgacattatggcttcggcgcaaaccggctccggcaaaaccgccgcctttctgttaccgactttgcaaaaactgaccaaacgcagcgaaaaaccgggcaaaggcccgcgtgctttggtgttgaccccgacccgcgaattggcggcacaagtggaaaaaaacgcgctggcgtatgccaaaaatatgcgctggttccgtaccgtcagcatcgtcggcggcgcatcgttcggctaccaaacccgcgccctgagcaaaccggtcgatctgattgtcgccacgccgggccgcctgatggacctgatgcaaagcggcaaagttgattttgaacgtttggaagtgctgattttggacgaagccgaccgtatgttggatatgggctttatcgacgacatcgaaaccatcgtcgaagccaccccgaccgaccgtcagactttattgttctccgccacttgggacggcgcggtcggcaaactggcacgcaaactgaccaaagaccctgaaatcatcgaagtcgaacgcgtggacgaccaaggcaaaatcgaagaacaactgctgtactgcgacgatatgcgtcacaaaaaccgcctgctcgaccacatcctgcgcgatgccaatatcgatcaatgcgtgattttcacgtccaccaaagcgatgaccgaagtcatcgcggatgaattgtacgaaaaaggtttcgccgccaactgcctgcacggcgacatgccgcagggctggcgcaaccgcacgctgatggatttacgcaaaggccgctgcaaaattttggttgccaccgacgttgccgcacgcggtatcgacgtaccgaccattacccacgttatcaactacgacctgccgaaacaggcggaagactacgtccaccgcatcgggcgcaccggccgcgcaggccgcacgggtattgcgattacgtttgccgaagtgaacgaatacgtcaaagtccacaaaatcgaaaaatacattaaccgcaaactgcccgaactgaccatcgaaggcatggaaccgacccgcaaacgcaaatccgcaggcggtaagccaaaaggcaaaggcggctggggcgataggaaatccggcggccggcgcggcgatcataaaccgggcaaagaaggcttcggcggcaaaacgcgcggcgaaggtttcaagaaagaaggctttaagaaagacggtttcaaaaaaaccggcgaaggcttcaaaggcaaacgtaaagccggcgattcttttgcaggcagaggcgaacgccgttacaaagaccgctaa

SEQ ID NO: 38736 - DNA, 741 bp, Neisseria meningitidis
atgctgattgtccgaccgtcgggcagggcgaaggacgatgtggaaacctgccgtcgtgccggatggcaggcggaagtgttgagcccgattgaaatcgaagcagatgctgccggactggaacttttgtccgaacaatatgcccgtgcggatgccgtgttttgggtcagtccgaccgccgttgaaaccgccgtcccgtaccttaacctttcagacggcataaagatgcacatttccgtagggcagggcagccgccgtgcattggaacgctgtttgggcagaacggtcatcgcgcccgaagacggcaacgacagcgaggcggttttgcgcctgacggtttggaacagtctgcccgaaggtgcgcgcgtattgtttgtgcgcggacacggcgggcgggattttctgatgaatgccttgcaggagaaaggttttcggacggaggtggcagaagtctatttcagacggcataaacctttgaactttcaaaatttccaaaccgaaaatattgccgccgcctatattacgtccacagaactcgtgcgcttgctgttcggacagcttccgccgcaattttcccgattcttcaaatccttgctatactttacccatcatccgcgcattgcggaggcattgaagcgcgaaggcgtgtgttcggtcgaaaccgtccctacgctggaagccgcgctttcccattcttccatttccgtttcagacggcatggtctttcccggaacctcaaattaa

SEQ ID NO: 38737 - DNA, 168 bp, Neisseria meningitidis; identical to SEQ ID NO: 37435

SEQ ID NO: 38738 - DNA, 783 bp, Neisseria meningitidis
atggaatcactgactgccataaataaatcgcgcattcggcaggctttccaaaaagcattaaacgattatgaccggcacgccttaatccaacaaaaaatgacgattaatttaatggcgcatttgcaagattatttgccggatatgccattggaaaacgtgttggaattgggctgcggctcaggaatgttgagtgccttgctgcaaaaacagatttcagcgaattattggttatttaatgatttgtgcgatgtgcagccccaactggctgaaaaactgccgcaatcctttgatttttattgcggcgatgcggaaaactttccttttcaacgacaatttgacttaatcgcaagcgcatctgccgtgcaatggtttcatcaacccgacgcttttatcgcccattgcaaaacaggcttgaaagcaaacggattattggcggttgcaacctttggcaaagacaatttaaaagaagtccgccaaattacaaatataggcttaaattacccgactttatcccaatggcagacttggttagccaaagattttgagcttttatggtgtgaggattttaaggtaatactagactttgatacgccgttagatgtactcaaacaccttaaatatacaggcgtaacagccacgaaccaaaaaaattggacaagaaaaaatctcaatggatttattggcgattatttgtcggcgttcagtatgccgtcgggcaaagtgcacctgacttatcatccgttattttttatcgcgcgctactctgcggcgggcaggcaataa

SEQ ID NO: 38739 - DNA, 396 bp, Neisseria meningitidis
atgaaaaaacaaatcaccgcagccgtaatgatgctgtctatgattgcccccgcaatggcaaacggcttggacaatcagacatttgaaaaccaagtgttccacacgcaggcagatgcgccgatgcagttggcggagctttctcaaaaggagatgaaggagactgagggggcttggggaccggtaggtgcatttatcggaggagtcggaggcggaatcggatatatgatgaaccagcaacttagcggaagcagattttctcccacagcattcactcttgccgtaggggcgggagcttttggaggggcgacagcaggtccggcaggggttgtatggggatttaaccgatctttggcaacaggtatggttacgggtgttgcccaacgatatggtaaataa

SEQ ID NO: 38740 - DNA, 579 bp, Neisseria meningitidis
atgtcaaacaaaatcaaaatggttgtcggcttgggcaacccgggcaaagaatacgaacagacccgccataatgcaggcttttggttcctcgacgaactggcttggaagtggaaggcttcgtttaaagaagaaaaaaaattcttcggcgaagtcgcccgtgctaccctgcccgacggcgatgtctggctgctcaagccgaccacgttcatgaaccgttccggacaggcagttgccgcccttgcgcagttttataaaatcaaacccgaagaaatcctcgtcgtccacgacgaactcgacattccctgcggacggatcaaattcaaactcggcggcggcaacggtggacacaacggcttgaaagacattcaggcacggctcggcacggccgactattaccgtctgcgcctcggtatcggccatccgggcgaccgcaacctcgtcgtcggctatgtcctgaacaaacccagtacggaacaccgccgacagattgacgatgccgtcgccaaatccctgcaagccatacccgacatccttgccggcaaatgggaagaagcaacacgtttcctgcacagcaaatga

SEQ ID NO: 38741 - DNA, 492 bp, Neisseria meningitidis
atgagtaccgaaaccaaaaactacattacgcccgccggatggcaggcattgaaagacgagctttatcaactggtcaacaaagaacgccccgaaatcgtccaaatcgtcaactgggcggcaggcaacggcgaccgcagcgaaaacggcgactatctttacggcaaacgccgtatgcgcgaaatcgaccgccgcatccgtttcctgaccaagcgtttggagtccgccgtcgtcgtcgatcccgaattgcgcgaagcgaccgaccaagtatttttcggcgcgaccgtcggcctgttgcgcggcgacgggcgcgagcaaaccgtcaaaatcgtcggcatcgatgaaatcgataccgcgcaaaacaaaatttcttggatttcgccgttggcgcgttgcctgattaaagcgcgcgaaggcgacgaagtggttttgaacacgccggaagggcgtgaggaaattgaaatcctttctgtcgaatacatcaaaatcgactga

SEQ ID NO: 38742 - DNA, 2385 bp, Neisseria meningitidis
atggccgacaactacgtaatctggtttgaaaacctgcgtatgacagatgttgaacgcgtgggcggtaaaaacgcctcgctgggcgaaatgatcagtcagctgaccgaaaaaggcgttcgcgtccccggcggctttgccaccacagccgatgcctaccgcgcattcctcgcacacaacggtctgagcgaacgcatttccgccgcactggcaaaattagatgtcgaagacgttgccgaactggcacgcgtcggcaaagaaatccgccaatggattttggacacgcccttccccgaacagctcgatgccgaaatcgaagcggcatggaacaaaatggttgccgatgccggcggtgcggacatttccgttgccgtacgctcttccgcaaccgccgaagacctgcccgacgcatcatttgccggccaacaggaaaccttcttgaacatcaacggattggaaaacgttaaagaagcgatgcaccatgtattcgcctccctgtacaacgaccgcgccatttcctaccgcgtccacaaaggcttcgaacacgatatcgtcgccctttccgccggcgttcaacgcatggtacgttccgacagcggcgcatccggcgtgatgttcactctcgacaccgaatccggctacgatcaagtcgtctttgttacctcctcttacggtctaggtgaaaacgtcgtccaaggcgcggtcaaccccgacgaattctatgtattcaaacccacactgaaagcaggcaaacccgccatcctgcgtaaaaccatgggttcaaaacacatcaaaatgatttttaccgacaaagcagaagccggcaaatcggtaaccaacgtcgatgtccccgaagaagaccgcaaccgcttctccattaccgacgaagaaatcaccgagttggcgcattacgcactgaccatcgaaaaacactacggccgcccgatggatatcgaatggggacgcgacggcttggacggcaaactctacatcctgcaagcccgtcccgaaaccgtaaaatcccaagaagagggcaaccgcaacctgcgccgcttcgccatcaacggcgacaaaaccgtattatgcgaaggccgcgccatcggtcagaaagtcggtcagggcaaggtgcgcctgattaaagatgcttccgagatggattccgtcgaagccggcgacgtactcgttaccgacatgaccgacccagattgggaaccggtgatgaaacgtgcttccgccatcgtgaccaaccgcggcggccgtacctgccacgccgccatcatcgcgcgcgaactgggcattcctgccgttgtcggctgcggcaatgcaaccgaattgctgaaaaacggtcaagaagttaccgtatcctgtgccgaaggcgataccggcttcatctatgccggcctgttggacgtacagattaccgatgtcgccttggacaatatgcccaaagcacccgtcaaagtcatgatgaacgtcggcaaccccgaactcgcattcagcttcgccaacctgcccagcgaaggcatcggcttggcgcgtatggaatttatcatcaaccgccaaatcggtatccacccgaaagccttgttggaatttgacaaacaagacgacgaattaaaagcggaaattacccgccgtatcgccggttacgcgtcccctgtcgacttctacgtcgataaaatcgccgaaggcgtggcgacattggccgcatcggtttatccgcgtaaaaccatcgtccgtatgtccgacttcaaatccaacgaatacgccaacctagtcggcggcaacgtatacgaaccgcatgaagaaaacccgatgttgggcttccggggcgcggcgcgttatgtcgccgacaacttcaaagactgtttcgccttggaatgcaaagccttgaaacgcgttcgtgacgaaatgggtctgaccaacgttgaaatcatgattccgttcgtccgcactttgggcgaagccgaagccgttgtcaaagccctgaaagaaaacggcttggaacgcggcaaaaacggcctgcgcctgattatgatgtgcgagctgccgagcaacgcggtattggcggaacaattcctgcaatacttcgacggcttctccatcggctcgaacgacatgacccaactgaccctcggtctcgaccgcgacagcggcttggtatccgaatcgtttgacgaacgcaaccctgccgtcaaagtgatgctgcatcttgccatctccgcctgccgcaagcagaacaaatatgtcggcatctgcggtcaaggcccgtccgaccatccggacttcgccaaatggctggttgaggaaggcattgaaagcgtttccctgaacccggataccgtcatcgaaacttggctatatttggcgaatgaattgaacaaataa

SEQ ID NO: 38743 - DNA, 246 bp, Neisseria meningitidis
atgtttgactttgaacaacaaatcaaatggggtgagcgagcggaagaaatcgttaaagaggcagccacccagaacaatatcgaaattcccgaacctttggcttcggcattagctaaggcggtaaaagtgcattatctaagccaagctggtgtgttttctttggtagaagcctatgcagacacggtaaatccaactgaaaaagaagtagattaccaagcaatcggcaaagagctatttgaaaaataa

SEQ ID NO: 38744 - DNA, 1524 bp, Neisseria meningitidis
atgaccgtcatcaaacaggaagactttatccaaagcatttgcgatgccttccaattcatcagctactaccatcccaaagactacatcgacgcgctctataaagcgtggcagaaagaagaaaaccccgccgccaaagacgcgatgacgcagattttggtcaacagccgcatgtgtgccgaaaacaaccgccccatctgccaagataccggtatcgcgaccgtcttcctcaaagtcggtatggatgtgcagtgggatgcggacatgagcgtcgaagaaatggttaacgaaggcgtgcgccgcgcctacacttgggaaggcaatacgctgcgcgcttccgttctcgccgaccccgccggcaaacgccaaaataccaaagacaacacgcccgccgtcatccatatgagcatcgtgccgggcgacaaagtcgaagtaacctgcgcggcaaaaggcggcggttctgaaaacaaatccaaactcgccatgctcaacccttccgacaacatcgtcgattgggtattgaaaaccattccgaccatgggcgcgggctggtgtcctcccggcatcttgggcatcggcatcggcggtacgcccgaaaaagccgtgttgatggcgaaagaatccctgatgagccacatcgacatccaagaattgcaggaaaaagccgcgtccggcgcggaattgtccaccaccgaagccctgcgcctcgaactctttgaaaaagtcaacgcgctgggcatcggcgcacaaggtttgggcggtctgaccaccgtgttggacgtgaaaatcctcgattacccgacccacgccgcctccaaaccgattgccatgattccgaactgcgccgccacccgccacgtcgaatttgaattggacggctcaggccctgtcgaactcacgccgccgcgcgtcgaagactggcccgatttgacttacagccccgacaacggcaaacgcgtcgatgtcgacaagctgaccaaagaagaagtggcaagctggaaaaccggcgacgtattgctgttgaacggcaaaatcctcaccggccgcgatgccgcacacaaacgcctcgtcgatatgctcaacaaaggcgaagaattgcccgtcgatttcaccaaccgcctgatttactacgtcggccccgtcgatccggtcggcgatgaagtcgtcggtccggcaggtccgaccacagccacccgcatggacaaattcacccgccaaatgctcgaacaaaccggcctcttgggcatgatcggcaaatccgaacgcggcgcggcggcgtgcgaagccatcgccgacaacaaagccgtgtacctgatggcggtcggcggcgcggcatacctcgtggcaaaagccatcaaatcttccaaagtcttggcgttccccgaattgggtatggaagccatttacgaatttgaagtcaaagatatgcccgtaaccgtcgccgtagacagcaaaggcgaatccatccacgccaccgccccgccccaatggcaggcgaaaatcggcatcatccccgtcaaatcttga

SEQ ID NO: 38745 - DNA, 768 bp, Neisseria meningitidis; identical to SEQ ID NO: 38380

SEQ ID NO: 38746 - DNA, 639 bp, Neisseria meningitidis
atgcaaaccgccattatcgattacggtatgggcaacctgcattccgtattgaaatccgtccggacggcggggcagcttgccggaaaaaataccgaaatctttttaagcggcgaccccgaacgcgtgtcccgcgccgacaaagtcatttttcccgggcagggcgcgatgcccgactgtatggcggcactgacgcgcggcggcctggacgaggcagtcaaagatgccttaaaaaacaaaccctttttcggaatctgcgtcggcgcgcaacttttattcgaccacagcgaagaaggaaacaccgacggcttgggctggttcggcggcaaagtcagacgctttgagcgcgacctccgcgacccgcagggatgccgtctgaaagtcccgcatatgggctggaacaccgtgcgccaaacccaaaaccacccgctgtttaaagatattccccaagacacgcgtttttacttcgtccacagctactatttcgcccccgaaaatcccgaaaccatattgggcgaaagcgactacccgtccccgtttgcctgcatcgtcggcaaagacaacgtattcgccacgcaatttcacaccgaaaaaagccacgatgccgggctgacgatgttgaaaaactttttaaactggtaa

SEQ ID NO: 38747 - DNA, 1137 bp, Neisseria meningitidis
atgaaaatcgtttttatcacaacagtcgcatccagcatttacggtttccgcgcccccgtcattaaaaaattaatcggcaaaaaccatcaggtgtatgcctttgtatcggagttttccgataatgaattggatattatcagggaaatgggggttacacccgttacctaccgttcaaaccgcagcgggctgaacccgttttccgatataaaatccaccttcctcatctttaaagaactcaaaaaaatatcgccggatttggttttcccttatttcgcaaaacccgtgattttcggcacttttgccgcaaaactggcaggcgtgcccagaatcgtcgggatgctggaaggtttgggattcgcatttaccccgcagccggaaggcataccgttaaaaacaaaaatcataaaggggatcttgattgccttataccgcattgccctgccgatgttggaaagcctgattgtattaaaccccgacgacaaagacgaactgacggacaaatacggcatcaaaataaaaaacatccatattttgggcggaatcggtctggattcgcggcaatatccttattccgaggcggatattcccgatgaaaaagaacccgtaaaattcctctttatcggcagatttctgaaagaaaaggggattgatgattttattcgggcggcggaacaggttaaggacaaataccccgatacggtttttaccgctttgggcgcaatcgacaaatcacgcgggggggggggggggggcgatttggaacggcttgccgcccgcgatattatccgtttccccggttttgtgaacaatgtttccgaagtgataaaagaacatcatatattcgtattgccgtcttattatagggaaggcgttccccgaagcactcaggaggcaatggccgtcggcagggcagtgattacgacggatgtccccggatgcagggaaacggtcgccgacaaggtcaacggcttcctgatcgaaccttggaatccccgcatcttggccgaaaaaatgatttattttatcgaaaacagggaagccgtccgcctgatggggaatgcaagttatgcgattgccaaagataaattcgatgccgaaaaagtcgatttgaaattgctcgatattttgaaggcgtaa

SEQ ID NO: 38748 - DNA, 1344 bp, Neisseria meningitidis
atgtttcacagtgtcaatgtatttacgggcgaaacgctttaccgccgtccagctcaagattatgcggagtttgaacggcggctggcggatttgaaaatgcgcggcggggcgttcgcgcaactgggcgtaaccgaacgtgccgcgcgtctgcaaaaatttgccgaccgtttggaggcggagaaagagcgttttgcggaaatggtgtgcgaagaagtcggacgctgcctgcacgaatgccgtgcggaaatcggcaagtctatcgaactgatacgctattacgcccgcctcgctcccgaactgctcgcccacaaaaccatcgcgacgcaggcgagtttgagtcaggtaaggtttgagcctttgggcgtggtgtttgccgtcatgccttggaactatcccgtctggcaggtattgcgtttcgccgttcccgctatgtgcgcgggcaacgcgtgcgccgtcaaacccgcgcccagcgtggcacgcgtcagtcaggcgttgtttgatttggtttcagacggcattcctttggcaggcgcgtggttggatgaggcgggcacgctcaaggcggttgaagataccgatgcgatggcgtttaccggctcgacgcatacggggcgcatccttgcggcacatgcgggcgcaaacctcaagaaaaccgtcttggaactcggcggcagcaacgcctttatcgtgatgcccgatgccgatttggaacgcgccgccgcagaagcctgttattcccgtttccgcgatgcggggcaatcgtgcaacgccgccaaacgcatcatcgtaaccgaagccgcagccgatcgttttatcacgctgtttcttgccgaatgcgccaaattgaaaatgggcgaccccaaacatcccgatactacgcttgcaccgctgcaccgcgaagatttgcgggacagggttcacgggcaggttgaagatgccgtttcaaacggcgcggtatgcctgaccggcggaaaaatcccacaagggcgaggctggttttatcccgcgacggttttagacagggtaaatcctgcctgccgcgtctggagagaagaagtattcgggccggccgccctgattttgcgcgccgaaaacgaagaacatgccatcgcccttgccaatgattccccgttcgggctaggtgcctgcatttataccgccgataccgaacgcgcttggcggtttgccgaaaaaatacaggcgggatcggtgtttatcaaccgccataccagcagcgatttgcgcctgcctttcggcggagtcaaagattccggttacgggcgcgaattgtccgaattcgggctgtacgagttcgtcaacgtcaaaacctactggcagaaataa

SEQ ID NO: 38749 - DNA, 297 bp, Neisseria meningitidis
atggacgctaaacatcggctgaaaaaatacgtttaccacctgttggtagccatcgaccaactgttcaacgccctaaccggcggcgcggcggacgaaaccctctcaagccgcacctatcgcggcgcgcggctcgcccaaaagcccaaaacccgctggaaggttttatacaccctgatcaacggcgtatttttcgaccgccaacactgccggcaggcgtatatcagcgaactgaaaggcaggcagcacgacgcgcggttcaaccaaagccgcgccgccggggaaaaggggacgcgatga

SEQ ID NO: 38750 - DNA, 1194 bp, Neisseria meningitidis
atgtctaatcaaaaaaaccgcaaaaatgccttaatcggcgctgcattcctgatggcgacttccgccatcggcccgggctttctgacccaaaccgccaccttcacccaagcactggcggcaagtttcggctttgtgattctgctctcgattctgctcgacatcggggcgcagctcaatatttggcggattgtcgccgtttccgaaaaacaggcgcaggatattgccaatcaggtcttgcccggcgcaggctatttcttggctgtgctgattgtgatgggcggtttggcgttcaatattggcaacgtcggcggcgcaggcttgggtctgaacctgctgaccggactgtcgccggaaaccggtgccgtgatcagcggcgtgattgccatcggtgtgtttctgtttaaagaagcaggcaaagtgatggacaaattcgcccaagtgatgggtttcgtaatgattgcgctgacggtttatgtggcatggcaggcgaatccgccgctggcagatgccgccgtgcatacctttatgccggaaaaactcgatgcaatggcgattgttacactggtgggcggcacggtcggcggctacatcaccttcgccggtgcgcaccgtctgctggacgcaggtatcaaaggcaaatcggcgttgccggaagtgagccaaagctcggtgcgggcgatcctgattgcctcgattatgcggattgtattgtttttggcggttttgggcgtggtcagccaaggcgtacagctcaatcccgacaaccctgcttccacaccgtttgaatatgcggcgggatacatcggcctgctgattttcggcgtggtgatttgggcggcttcgattacttcggtgattggtgcggcttatacttcggtgtcgttcttctccggtctcagcccgtctatcgaacgcaataaaaacaaatggattattgcctttatcgccgtgtccaccgccgtattttccaccatcggcaaaccggcgcaggtgctggtgttcgtaggcgcattaaacggcctgattttaccgatttccctcggtctgattctgattgccgcctacaaaaccaaaattgtcggcgactacaaacacccgctgtggctcaccgtttccggcgtgattgtggtcggtttgatggcagtactcagcgccattaccatcagcaaatatatcggcggcttgttcggctga

SEQ ID NO: 38751 - DNA, 429 bp, Neisseria meningitidis
  misc_feature 174, 175, 176, 177, 178: 'n' is a, c, g or t
atgatgttttcttggttcaagctgtttcacttgttttttgtcatttcgtggtttgcagggctgttttacctgccgaggattttcgtcaatatggcgatgattgatgcgccgcgcggcaatcccgagtatgtgcgcctgtcgggtatggcggtgcggctgtaccgttttatgtcgccgttgggcttcggcgcggtcgtgttcggctcggcgataccgtttgccgccggttggtggggcagcggttgggtacatgtcaaactgtgtttggggttgatgctcttggcttaccagttgtattgcggcgtgctgctgcgccgttttcaggattacagcaatgctttttcacaccgctggtaccgcgtgttcaacgaaatccccgtgctgctgatggttgccgcgctgtatctggtcgtgttcaaaccgttttga

SEQ ID NO: 38752 - DNA, 522 bp, Neisseria meningitidis
atgtcctgtttttcaatcaaacgtatgtccgcgtttcgggcgcggataacagtgttttttaccgcctttgtctttttgacggcggcactgcccgcttatgcggagcgtctgcctgattttctggcgaaaatacagccttcggaaatttttccgggtgcggaccgttacggcaagccggaaggcaagcctatggttgcccgcgtttacaaaggcgatgagcagttgggcttggtctatatcacgaccgatgcggtcaatacgcgcggttattcgaacaaaccgatcgatacgctgatggctttggcaaatgacggcacgatagccggagcgaaactggtcgatcatcacgaaccgattatgctgatcggtatcccgcatttgcccgcgcccgggcgggcgatacgcttaaactggcttccggcgtatatcaaaccaaactttatatcgacaaaccgattacgattgaagggcctgccgaccgttccgcaaccatcgaatgggacaggagcggccgcaccatag

SEQ ID NO: 38753 - DNA, 204 bp, Neisseria meningitidis
atgggcagtttttctctgacgcactggattatcgtactgattatcgtcgttttgatattcggcaccaaaaaactgcgcaacgtcggcaaagacctcggcggtgcggttcatgacttcaaacaggggctgaacgaaggtacagacggcaaagaagcccaaaaagacgatgtaatcgaacacaaaaaagacgaagacaaagcgtaa

SEQ ID NO: 38754 - DNA, 189 bp, Neisseria meningitidis
  misc_feature 174, 175, 176, 177, 178: 'n' is a, c, g or t
atgaactttctattgtccaaactcctgctgggactgatacggttctaccaatattgcatcagcccgctgattccgccgcgctgccgttatacgccgacctgttcgcaatacgcggtcgaagcggtcaaaaaatacggcgcattcaaaggcggccggctcgccatcaagcgcatnnnnncacacacttaa

SEQ ID NO: 38755 - DNA, 495 bp, Neisseria meningitidis
atgaagaaaaccctgttggcaattattgccgttttcgccttaagtgcctgccggcaggcggaagaggggccgccgcctttaccccagcagattagcgaccgttcggtcggacactattgcagtatgaatctgaccgaacacaacggccctaaagcccagatttttttgaacggcaaacccgatcagcccgtttggttctccaccatcaagcagatgttcggctataccaagctgcccgaagagcctaaaggcatccgcgtgatttacgttaccgatatgggcaatgttaccgattggacgaatcccaatgccgacacggagtggatggatgcgaaaaaagccttttacgtcatcgacagcggctttatcggcggtatgggtgcggaagacgcgctaccgttcggcaacaaggagcaggctgaaaaatttgcaaaggataaaggcggtaaggttgtcagtttcgacgatatgcctgatacctatattttcaaataa

SEQ ID NO: 38756 - DNA, 687 bp, Neisseria meningitidis
atggcagacctgaccttccaacaagccgtttccaacatcatcggtatgaaaggcgaaatcgtccgcgcattgggcgaaaccttcgtgatggtcggcttgtccaccacattcgccgtcgttttcggcacgttgctgggcgtgttgctcttcgtaacttccagccgccaactgcattacaacaagccggtgaacttcctgctcgacaacctcgtcaacctcatgcgcgccttccccttcgtcatcctgatgattgccatgatacccgcgacccgcaccatcgtcggcagcaccatcggtccggttgccgcctcgctggtgttgagcgtgtcgggattgttttattttgcccgactggtggaacaaaacctgcgcgaagtccccaaaggcgtgattgaagccgccgccgcgatgggtgcgcctccgattgccatcgtctgcaaagtcctcttgaacgaagcgcgcgcgggcatggtttccagcattaccgtgcttgccatcgggcttttgtcatacagcgcggcggcagggatgataggcggcggcggcttgggcgacctcgccatccgctacggctactaccgctaccaaaccgaagtcatcgtcttcatcgtcgccctcctcgtgctgctcgttatcctgattcaaagcaccggcaacgcgttggcgcggaaactcgacaaacgttga

SEQ ID NO: 38757 - DNA, 1116 bp, Neisseria meningitidis
atgggcttgaaaaaggcttgtttgaccgtgttgtgcctgattgttttttgtttcgggatattttatacatttgatcgggtaaatcagggggaaaggaatgcggtttccctgctgaaggagaaacttttcaatgaagagggggaaccggtcaatctgattttctgctataccatattgcagatgaaggtggcagaaaggattatggcgcagcatccgggggagcggttttatgtggtgctgatgtctgaaaacaggaatgaaaaatacgattattatttcaatcagataaaggataaggcggagcgggcgtattttttctacttgccctacggtttggacaaatcgtttaatttcattccgacgatggcggagctgaaggtgaagtcgatgctgctgccgaaggtcaagcggatttatttggcaagtttggaaaaagtcagcattgccgcctttttgagcacttacccggatgcggaaatcaaaacctttgacgacgggacaggcaatttaattcaaagcagcagctatttgggcgatgagttttctgtaaacgggacgatcaagcggaattttgcccggatgatgatcggagattggagcatcgccaaaacccgtaatgcttccgacgagcattacacgatattcaagggtttgaaaaacattatggacgacggccgccgcaagatgacttacctgccgctgttcgatgcgtccgaactaaaggcgggggatgaaacgggcggcacggtgcggatacttttgggttcgcccgacaaagaaatgaaggaaatttcggaaaaggcggtaaaagatttcaacatacaatatgtcgcgccgcacccccgccaaacctacgggctttccggcgtaaccacattaaattcgccctatgtcatcgaagactatattttgcgcgagattaagaaaaacccgcatacgaggtatgaaatttatacctttttcagcggcgcggcgttgacgatgaaggattttcccaatgtgcacgtttacgcattgaaaccggcttcccttccggaagattattggctcaagccggtgtatgccctgtttacccaatccggcatcccgattttgacatttgacgataaagattaa

SEQ ID NO: 38758 - DNA, 525 bp, Neisseria meningitidis
ttgaggtcgtctgaaatggatattttattgaaatactggaagccggtaggcgtattgctgctaatcgtcctgatttttaccgcatggcatttcgaccgtgccgaaaaataccgcatgggacgggaggctgctgctgccgaaatttcgaatcgtctgaaagacggctatatcgagcaggcaaagcaggcgcgttctgccgagcagaaggccgctgccgcgtttgccgaacgacaaaccaaattagaagaggaaaaacaaaatgctgaaaaaactgttgccgctatgcgtcttgagcttaaccgcctgcgccactacgccgccgcccaaaatcgcaacagaaacctgcccgcaaccactaccgccgccaccgcatctgatggcgcgtcagattcccaaggctggctattattcggacagtgcgctgaaaaatatgcaggactggcagaaacagccgacggacatgcagccgatttaagggaatggcaggcatatggtcatgcagtaagcagtcagcgtgccgaataa

SEQ ID NO: 38759 - DNA, 423 bp, Neisseria meningitidis
atgcaggttacatcaaaatggatagacggaatgtgctttgtcggcacgacggaaggcgggcacagcgtcgttatggaggggtcggcggcagaaggtaaggctaagcgcgggcccagccctttggaaatgctgctgttgggcgtggcgggctgttcgagcatcgatgtggtgatgattgccgaaaaacagcgtcagaaagtgactgactgccgtgcgacggttacggcgaaacgggcggacgatgcgccgcgcgtgtttaccgaaatccacatccatttcaaagtattcgggcatgatttgaaagaatcggccattgagcgcgccgttcagatgtctgccgaaaaatactgttcggcttcgattatgttgggcaaagcggcaaagattacccacagttttgaaattgccggggcagataaatag

SEQ ID NO: 38760 - DNA, 1215 bp, Neisseria meningitidis
atggaatgggaattcaacagttattacacactgattgccgccacgctcgtgttgctggttggtaaatttctggttcaaaaaatcaaattcttacgagacttcaatattcccgagccggtcgctggcggtttggttgccgcgattatcctgtttgcgctgcacgaggcgtacggcgtgagcttcaaatttgagaaaccgctgcaaaatgcgtttatgctgattttcttcacgtccatcggcttgagcgcggatttttcccgtttgaaggcgggcggtttgccgctagtggtttttaccgcgattgtgggcggatttatcttggtgcaaaactttgtcggggtcggactggctacggctttgggtttggacccgctcatcggtctgattaccggttcggtgtcgctgacgggcggacacggtacgtcaggtgcgtggggacctaattttgaaacgcaatacggcttggtcggcgcaaccggtttgggtattgcatcggctactttcgggctggtgttcggcggcctgatcggtgggccggttgcgcgccgcctgatcaacaaaatgggccgcaaaccggttgaaaacaaaaaacaggatcaggacgacaacgcggacgacgtgttcgagcaggcaaaacgcacccgcctgattacggcggaatctgccgttgaaacgcttgccatgtttgccgcgtgtttggcgtttgccgagattatggacggcttcgacaaagaatatctgttcgacctgcccaaattcgtgtggtgtctgtttggcggcgtggtcatccgcaacatcctcactgccgcattcaaggtcaatatgttcgaccgcgccatcgatgtgttcggcaatgcttcgctttcgcttttcttggcaatggcgttgctgaatttgaaactgtgggagctgaccggtttggcggggcctgtaaccgtgattcttgccgtacaaaccgtggtgatggttttgtacgcgacttttgttacctatgtctttatggggcgcgactatgatgcggcagtattggctgccggccattgcggtttcggcttgggtgcaacgccgacggcggtggcaaatatgcagtccgtcacgcatactttcggcgcgtcgcataaggcgtttttgattgtgcctatggtcggcgcgttcttcgtcgatttgattaatgccgcgattctcaccggttttgtgaatttctttaaaggctga

SEQ ID NO: 38761 - DNA, 663 bp, Neisseria meningitidis
atggattcccaaaaatttaccgaagcatccaaacggcggttgagcgaattgttggatgccaaaagcgaacaaggcaacacgatgcgttgcgacgaggttcaaggttttatgacggcgctgttgagcgggccggacaaattgacaccgctcgactggctgcccgaagtgttgggcgacgaatcgcaatttaccgccgccgaacgttccgaaatcgaacggctggttttggcaatggcgatggaaacaaccgccgcgatgtcggataaaaaactgcccgatttgtggctgtatgaaaacgaagacggcggcagcgatttttacacatggtgcaatgcttatctttacggtttggatattgtgccgaccgattggtttgaagccgtcgatgatgaagcgtttgaagagttgttttatcccatcatggcattgggcggtatttacgacgaagaggacaacggcactatccgtctgcaattcacagaaggcgagctggcggaactggaatccgagttgccttatgcattggcggatatctaccgctactggcaggcggtcatcaacaagccgcaaaccgtccgcagggaaggcgaaaaaacaggcaggaacgatccctgtccgtgcggcagcggcagaaaatacaaggcgtgttgcggtaagaattga

SEQ ID NO: 38762 - DNA, 2175 bp, Neisseria meningitidis
atgaacgccccgtttttccgcctcagcctgctctcgcttaccctggcggcaggttttgcccatgcggcagaaaataatgccaatgtcgcattggataccgttaccgtaaaaggcgaccgccaaggcagcaaaatccgtaccaacatcgttacgcttcaacaaaaagacgaaagcaccgcaaccgatatgcgcgaactcttaaaagaagagccctccatcgatttcggcggcggcaacggcacgtcccaattcctgacgctgcgcggcatgggtcagaactctgtcgacatcaaggtggacaacgcctattccgacagccaaatcctttaccaccaaggcagatttattgtcgatcccgctttggttaaagtcgtttccgtacaaaaaggcgcgggttccgcctctgccggtatcggcgcgaccaacggcgcgatcatcaccaaaaccgtcgatgcccaagacctgctcaaaggcttggataaaaactggggcgtgcgcctcaacagcggctttgccagcaacgaaggcgtaagctacggcgcaagcgtattcggaaaagagggcaacttcgacggtttgttctcttacaaccgcaacgatgaaaaagattacgaagcaggtaaaggcttccgtaataatttcaacggcggcaaaaccgtaccgtacagcgcactggacaaacgcagctacctcgccaaaatcggaacaaccttcggcgacggcgaccaccgcatcgtattgagccatatgaaagaccagcaccggggcatccgtaccgtccgtgaagaatttaccgtcggcggcgataaagagcgaataagtatgaaacgccaagccccatcctaccgcgaaaccacccaatccaacaccaacttggcgtacaccggcaaagatttgggctttgtcgaaaaactggatgccaatgtttatgtgttggaaaagaaacgctattccgccgatgacagcggcaccggctacgcaggcaatgtaaaaggccctaaccatacccgaatcactactcggggtatgaatttcaacttcgacagccgccttgccgaacaaaccctgttgaaatacggtatcaactaccgccatcaggaaatcaaaccacaagcatttttgaacagcaaatttaagatctccgataagaaaccagacccaaacaatcccggaaaagaaatagctaagaccgatgaagaaaaagcgaaagacaagatagatatggctcttgtccattcctacaaactgtctaacccagccaaaaccgataccggcgcgtatatcgaagccattcacgaaattaacggctttaccctgaccggcgggctgcgttacgaccgcttcaaggtgaaaacccatgacggcaaaactgtttcaagcagcaaccttaacccgagtttcggtgtgatttggcagccgcacgaacactggagcttcagcgcgagccacaactacgccagccgcagcccgcgcctgtatgacgcgctgcaaacccacggtaaacgcggcatcatctcgattgccgacggcacgaaagccgaacgcgcgcgcaataccgaaatcggcttcaactacaacgacggcacgtttgccgccaacggcagctacttctggcaaaccatcaaagacgcgcttgccaatccgcaaaaccgccacgtctctgccgccgtccgtgaagccgtcaatgccggttacatcaaaaaccacggttacgaattgggcgcgtcctaccgcaccggcggcctgactgccaaagtcggcgtaagccacagcaaaccgcgcttttacgatacgcacaaagacaagctgttgagcgcgaatcctgaatttggcgcacaagtcggccgcacttggacagcctcccttgcctaccgcttcaaaaacccgaatctggaaatcggctggcgcggacgctatgttcaaaaagccgtgggttcgatattggtgtcaggtcaaaaagaccgccaaggcaaactggaaaacgttgtacgccaaggtttcggtgtgaacgatgtcttcgccaactggaaaccgctgggcaaagacacgctcaatgttaatctttcggttaacaacgtgttcaacacgttctactatccgcacagccaacgctggaccaataccctgccgggcgtgggacgtgatgtacgcttgggcgtgaactacaagttctaa

SEQ ID NO: 38763 - DNA, 933 bp, Neisseria meningitidis
atgaaaattgcaaacagcatcaccgaactaatcggcaacacgcctttggtcaaactgaaccgtctgaccgaaggtttgaaggcggaggttgccgtgaaactggaatttttcaatccaggcagcagcgtcaaagaccgcattgccgaagcaatgatcgagggtgccgaaaaagcgggcaaaatcaacaaaaacaccgtcattgtcgaagcaaccagcggcaatacgggtgtcggtttggcaatggtatgtgccgcacgcggctacaagctggcgattaccatgccggaaagcatgagtaaggagcgcaaaatgctgttgcgcgcgtttggtgcggagctgattctgacccctgccgccgaaggtatggcgggcgcgattgccaaagcgaaatccttggtggacgcgcatcccgacacttattttatgccgcgccagttcgacaatgaggcaaaccccgaagtccaccgcaaaacaaccgccgaggaaatttggcgggatacggacggcaaagtcgatgtcttcgttgccggcgtcggcacgggcggtacgattaccggcgtgggcgaagtgttgaaaaaatacaaacccgaagttaaagtggttgccgtcgagcctgaagcttcacccgtattgagcggcggcgaaaaaggcccgcacccgattcaaggcatcggcgcaggctttattccgaccgttttgaataccaaaatttacgacagcattaccaaagtgccgaacgaagcggcttttgaaaccgcccgcgcaatagcggaaaaagaaggcattttggtgggtatttcttccggtgcggcggtttggagtgcgttgcagcttgccaaacagcctgaaaacgaaggcaagctgatagtcgtgctgctgccttcttatggcgaacgctatctctctacgccactttttgcagatttggcataa

SEQ ID NO: 38764 - DNA, 819 bp, Neisseria meningitidis
atgaacaccattttcaaaatcagcgcactgaccctttccgccgctttggcactttccgcctgcggcaaaaaagaagccgcccccgcatctgcatccgaacctgccgccgcttcttccgcgcagggcgacacctcttcgatcggcagcacgatgcagcaggcaagctatgcgatgggcgtggacatcggacgctccctgaagcaaatgaaggaacagggcgcggaaatcgatttgaaagtctttaccgaagccatgcaggcagtgtatgacggcaaagaaatcaaaatgactgaagagcaggctcaggaagtcatgatgaaattccttcaggaacaacaggcaaaagctgtagaaaaacacaaggcggacgcgaaggccaataaagaaaaaggcgaagccttcctgaaagaaaatgccggcaaagaaagtgtgaaaaccactgcttccggcctgcaatacaaaatcaccaaacagggtgaaggcaaacagccgaccaaagacgacatcgttaccgtggaatacgaaggccgcctgattgacggtacggtattcgacagcagcaaagccaacggcggcccggtcaccttccctttgagccaagtgattccgggttggaccgaaggcgtacagcttctgaaagaaggcggcgaagccacgttctacatcccgtccaaccttgcctaccgcgaacagggtgcgggcgacaaaatcggtccgaacgccactttggtatttgatgtgaaactggtcaaaatcggcgcacccgaaaacgcgcccgccaagcagccggctcaagtcgacatcaaaaaagtaaattaa

SEQ ID NO: 38765 - DNA, 558 bp, Neisseria meningitidis
atgaacatcattgataccgccattcctgacgtaaaactgcttgagccccaagtcttcggcgacgcgcgcggcttttttatggaaaccttccgcgacgagtggtttaaaacccaagtctgcgaacgcaccttcgtgcaggaaaaccactccaaatccggcaaaggcgtattgcgcggcctgcactaccaaaccgaaaacacacaaggcaaactcgtacgcgtagttgtcggcgaagtattcgacgtggccgtcgatatgcgtaaagactcccccactttcggcaaatgggtaggcgagattctgtccgcagaaaacaaacgccaactgtgggtacccgaaggtttcgcacacggcttctatgtactgagcgatgaagccgagttcgtctataaatgcacagactattacaaccctgaagccgaacactcactaatttggaatgatccgaccgtcggcatcgactggccgcttcaaaccgcgccgctgctgtcgcccaaagaccttgccggcaaaacgtgggcgcaagccgaaaagctccgccttccgctttccagataa

SEQ ID NO: 38766 - DNA, 714 bp, Neisseria meningitidis
ttgggcgcgtgcagcacttcctaccgcccctcgcgggcagaaaaagccaatcaggtttccaatatcaaaacccagttggcaatggaatatatgcgcggtcaggactaccgtcaggcgacggcaagtattgaagacgccctgaaatcggaccctaaaaacgagcttgcctggctggtccgtgccgaaatctatcaatacctgaaagttaacgacaaggcgcaggaaagtttccggcaagccctctccatcaaacccgacagtgccgaaatcaacaacaactacggctggttcctgtgcggcaggctcaaccgccctgccgaatctatggcatatttcgacaaagccctggccgaccccacctacccgaccccttatattgccaacctgaataaaggcatatgcagcgcaaaacaggggcaattcggattggcggaagcctatttgaaacgttccctcgccgcccagccgcagttcccacccgcatttaaagaactggcgcgcaccaaaatgctggccgggcagttgggcgatgccgattactactttaaaaaataccaaagcagggtagaagtccttcaggccgatgatttgctgctaggctggaaaattgccaaagccctcggcaacgcacaggcggcatacgaatatgaagcacaattgcaggcgaatttcccctactcggaagaattgcaaaccgtcctcatcggtcaataa

SEQ ID NO: 38767 - DNA, 537 bp, Neisseria meningitidis
atgcaggcaatttctcccgaattacaggcgcgcgccgccaaaatcaaactgttgatcctggatgtggacggcgttttgaccgacgggcgcatctttatccgcgataacggcgaagaaatcaaatcgtttcacacactggacggacacggtctgaaaatgcttcaggcaagcggcgtgcagactgcgattatcacaggtcgggacgcgccctccgtcggcatccgcgtcaaacagttgggcataaattactacttcaaaggcatttcggacaaacgcgccgcgtatgaagagctgcgcgctcaggtcggcgtggaagaagccgagtgtgcctttgtcggcgacgacgtggtcgatttgcccgttatggtacgctgcggattgccggttgccgtccccgacgcgcattggtttacgctgcaacacgccgcctatattgccaaacgccccggcggtgcgggcgcggtgcgcgaagtgtgcgacctgattatgcaggcgcaagggactttgggcgcggctttgaacgagtacatcaaatga

SEQ ID NO: 38768 - DNA, 786 bp, Neisseria meningitidis
atgagcagaatccggcaggcttttgccgctttggatggcggaaaggcattgattccctatattacggtgggcgaccccgatattcggacaactttggcattgatgcacggcatggttgcaaacggtgcggatattttggagttgggcgtgccgttttccgatccgatggcggatgggccggttattcagcgtgcggcggagcgggcgttggcaaacgggatttcgctgcgcgatgtcttggatgtcgtcagaaaattccgtgaaaccgacacgcaaacgccggttgttttgatgggatatttgaaccctgtacataagatgggttatcgggagtttgctcaggaagccgcaatggcgggtgtggacggcgtgttgacggtggattcccctgtcgaaaccatcgatccgctctatcgcgagctgaaggataacggggtcgactgtattttcctgattgcgccgacgacgacggaagaccgtattaaaaccattgccgagctggcaggcggatttgtctattatgtttcgctcaagggcgtaacgggcgcggcaagtttggatacggatgaggtttcgcgtaaaatagagtatttgcatcagtatatcgatattcccatcggtgtcggtttcggcatcagcaatgcggaaagtgcacgcaaaatcggccgggttgccgacgcagttattgtcggcagccggattgtgaaagaaatcgaaaacaatacaggcaacgaggctgccgccgtcggtgctttggtaaaagagttgaaggatgccgtgcgctga

SEQ ID NO: 38769 - DNA, 858 bp, Neisseria meningitidis
atgaattacgccctagacgcattatggtggaagctcaccagccaacccgtccgcgacctcgcctcgctgctgactgcgccgcctttgtggcaaagcggttgcgaattgggcgtgcgcgaactattgggggaacgcggtttccgctatcttttggcattggatgccgatcccgcgccgctgacggaacacctcacccgacgcgccccgttcggacaccgcttgggcatttacgccgaagaactgctggcattttggtttgccaacgcgccacacgccgaactgctcgcgcacaacctcacggtttccggttcggacggcaatacgcaaggcgcggcggattttgtggtaaggcttaacggcaagccctaccatatcgagctgacctgcaaatattacggcggcggcacgggcaggctcgaagacatgcgcggactcgaccccaaagacacgctgttgggaaaagccgccaaactgaccgcccaactcggtctgccgcacacttcagacggcatccgaaccttgcggcaacacggtctgccgcttgacgtaaaacccgtttccatcgtgcgcggcatcggattttttccacaaagtttccatgcttttgagccgccgcttaacccatacggctggcgcggcatctatattcaagactgggcggaatacgggtttgaacgccaagaagtccgctaccatctgctcgaccgcatggcctacctcgcacctgcgcgtgccgccgaaaccgaaacattgaacgaaaccgaaatccgccgtatcgaccaaggcttgattgccgttttggaatgtcggccggacggcttttggcacgaaatcgaacgcattatgaaggccgtctga

SEQ ID NO: 38770 - DNA, 1935 bp, Neisseria meningitidis
atgagcttgatcgaatgtaaaaacatcaaccgctatttcggcagcggcgagaaccgcgtccatattttgaaaaacatcagcctgtcgatagagaagggcgattttgtcgccatcatcgggcagtccggttcgggcaagtccacgctgatgaacatactcggctgtttggataccgccggttccggttcgtaccgaatcgacggcatcgaaactgccaaaatgcagcctgacgagctggcggcattgcgccgcgaacgcttcggctttatcttccaacgctacaacctcttaagctcgctgaccgcaagggataacgtcgcgctgccagccgtctatatgggcgcgggcggcaaagagcgttccgcgcgggcggacaaactcttgcaggatttgggtttggcaagcaaagagggcaacaagcccggcgaactctcgggcggacagcagcagcgcgtctccatcgcccgcgccctgatgaacggcggagaaatcatcttcgccgacgagccgaccggcgcgctcgataccgccagcggcaaaaacgtgatggaaatcatccgcaggctgcacgaagccgggcataccgtcattatggtcacgcacgaccccggcatcgccgccaatgccaaccgcgtcatcgaaatccgggacggcgaaatcatttccgacacctcgaaaaatccagaaatccccgcaagcaatgtcgggaggattcaggaaaaagcctcgtggtcgttttattacgaccagtttgtcgaagccttcagaatgtcggtgcaagcagtattggcgcacaaaatgcgttcgcttctgacgatgctcggcatcatcatcggtatcgcttcggttgtctccgtcgtcgcattgggcaatggttcgcagaaaaaaatccttgaagacatcagttcgatagggacgaacaccatcagcatcttcccggggcgcggcttcggcgacaggcgcagcggcaggattaaaaccctgaccatagacgacgcaaaaatcatcgccaaacaaagctacgttgcttccgccacgcccatgacttcgagcggcggcacgctgacttaccgcaataccgacctgaccgcttctttgtacggcgtgggcgaacaatatttcgacgtgcgcggactgaagctggaaacggggcggctgtttgacgaaaacgatgtgaaagaagacgcgcaggtcgtcgtcatcgaccaaaatgtcaaagacaaactctttgcggactcggatccgttgggtaaaaccattttgttcaggaaacgccccttgaccgtcatcggcgtgatgaaaaaagacgaaaacgctttcggcaattccgacgtgctgatgctttggtcgccctatacgacggtgatgcaccaaatcacaggcgagagccacaccaactccatcaccgtcaaaatcaaagacaatgccaatacccaggttgccgaaaaagggctgaccgatctgctcaaagcgcggcacggcacggaagatttcttcatgaacaacagcgacagcatcaggcagatagtcgaaagcaccaccggtacgatgaagctgctgatttcctccatcgccctgatttcattggtagtcggcggcatcggcgtgatgaacatcatgctggtgtccgttaccgagcgcaccaaagaaatcggcatacggatggcaatcggcgcgcggcgcggcaatatcttgcagcagtttttgattgaggcggtgttaatctgcgtcatcggcggtttggtcggcgtgggtttgtccgccgccgtcagcctcgtgttcaatcattttgtaaccgacttcccgatggacatttcggcggcatccgttatcggggcggtcgcctgttcgaccggaatcggcatcgcgttcggctttatgcctgccaataaagcagccaaactcaatccgatagacgcattggcgcaggattga

SEQ ID NO: 38771 - DNA, 723 bp, Neisseria meningitidis
atgattactgtttgtctgtacggcggccttcgcgaatacggccgccgttttgttttgcacgtcgagacgccagccgaagccctgcacgctctgtttacccaaatcaaaggcttgcgtcagcggattcgggacggggtgtatcaggttcggtttgacggtaaagaccagtcggaagaaacgataggtagcgttttcagacgacctgctgacggtgtattgcacattgttccgcgcgtacagggtgcaggtaaaaatggcgggttgatccaaaccattgtcggagtggttttgattgtagtcggtgcgtatacgagttgggccagtggtgcgcagcttatcgccgtcggtatcggtatggtggctggcggtgtcgcccaaatgttgaccaaacagcccaaattggatgccgacggcaagggggtggaggagagtaagaattctgctttttccaaccttgccaatacaacggcacagggtcgccctgtgccgttggcttacgggctttgctactgcggcagccgtgttgtatcgcagggtgtgcagtcccgccgtatcgaaccgtcatcgacggcggcttcgtcaggtgcggtgttgaatttgggtttgtccaagacattcgttcaaggcgtagcagcaaccgcgccgaacgggcagaaataccgtaccgacttttcagacgacagcgtgcgggcgcgcaattataaggcggcgttttcgggctga

SEQ ID NO: 38772 - DNA, 177 bp, Neisseria meningitidis
atgaaaagtcgacgtttttttaaagccttattgttgattgccgcgctggtcggcgcgttttatgccggaatgcagacgcaggcgtatctttatgaagatttatgtttagacttgggtggcggcaaaaatccggggagttacccgatttgcgtgattgagaaagtccctgcacgttaa

SEQ ID NO: 38773 - DNA, 423 bp, Neisseria meningitidis
atgaccgatattttcactacatccaaacgttctttcgtgatgtcaaaaatccatagcaaagaaaccaaaccggaaatattggtaaggaaatttcttttctcccaaggttttcgttatcggaaaaacgataaacgctatgcaggcaaaccggatatcgttttgccgaaatataaaacagtcgtgtttatacacggctgtttttggtacgggcattcttgtaataaaggacatatcccgaaaagcaatacggatttttggttggaaaaaatcacaaaaaattgcgaacgtgatattaaaaatgaaaccgagctggaaaagatcggtttcaaagtgattgtcgtttgggagtgcgaattaaaaaataaagctattggtagggagcgattaaatcggttggtcagggaaataaaagatgccgtctga

SEQ ID NO: 38774 - DNA, 552 bp, Neisseria meningitidis
atgaaagcgtatctggctctgatttctgccgccgttatcggtttggctgcctgctctcaagaacctgccgcgcctgctgccgaggcaactcctgctgctgaagcacccgcttccgaagcgcctgccgccgaagctgctcctgcagatgctgccgaagcccctgctgccggcaactgtgcggcaactgtcgaatccaacgacaatatgcagttcaacaccaaagacatccaagtcagcaaagcatgtaaagagttcaccatcactctgaaacataccggtacgcaacccaaaaccagcatgggtcacaatctcgtgattgccaaagctgaagacatggacggcgtatttaaagacggcgtaggtgctgccgataccgattatgttaaacctgatgatgcacgcgttgttgcccataccaaactgatcggcggcggcgaagaagcttccctgactctggatcctgccaaactggctgacggcgaatacaaatttgcctgcaccttcccgggtcacggtgctttgatgaacggcaaagtgactttggtcgattaa

SEQ ID NO: 38775 - DNA, 1020 bp, Neisseria meningitidis
atggatgccggtatttatctcgaagaaaccgccccgcgcgccctgattgaacacaataatattttggataattcggtcggcgtctatctgcatggttctgccgatgcgatggtgcgggagaataaaatcgtcggcgacgcgactttgcgcgtgaacgagcgcggcaacggcgttaccgtttggaacgcacccggtgcgcaggtcgtcggcaacgacatttccaaagggcgggacggcattttttccaacaccagcacgcacaacacctataaaaacaaccgcttcagcgatttgcgtttcgccgtccactatatgtacaccaacgacagcgaaatcagcggcaatatttccgtgggcaacaatatgggctatgtgctgatgttttccgagcggctcaaagtgtttgacaatatcgccgtcggcagccgcgaccaaggcatcatgctcaactatgtcaactattccgatattcacgacaacattatcaacaaagcgggcaagtgcgtttttgcctacaatgccaactacgataaactgtccgccaatcattttgaaaactgccaaatcggcatacactttaccgccgccatcgaaggcacgtccctgcacgacaattcctttatcaacaacgaaagccaggtcaaatacgtcagcacgcgctttctcgactggagcgagggcggacacggcaactattggagcgacaacagtgcgttcgatttgaacggcgacggcttcggcgacagcgcgtaccgtcccaacggcatcatcgaccaaatcatctggcgcgcacccgtatcgcgcctcttgatgaacagtcccgcaatcagcatcgtcaaatgggcgcaggcgcaatttcccgccgttttgcctggcggcgtggtggacagcaaaccgctgatgaagccttatgcccccaaaattcaaacccgttatcaggcgatgaaggacgggctgctcaaagaagtcgaaacgcggcagttggaatggggcagggcggaaaacggttctttgaactag

SEQ ID NO: 38776 - DNA, 714 bp, Neisseria meningitidis
atgaaattgtctattcaaaaattcatgatgctgtttgcagcagcaatatcgttgctgcaaatccccattagtcatgcgaacggtttggatgcccgtttacgcgatgatatgcaggcaaaacactacgaaccgggtggtaaataccatctgttcggtgatggtcgcggcagtgttaaaaatcgggtttacgccgtccaaacatttgatgcaactgcggtcggccccatactgcctattacacacgaacggacaggatttgaaggtgttatcggctatgaaacccatttttcagggcacggacatgaagtacacagtccgttcgatcatcatgattcaaaaagcacttctgatttcagcggcggtgtagacggtggttttactgtttaccaacttcatcggacagggtcggaaatccatccggaggatggatatgacggaccgcaaggcagcgattatccgccccccggaggagcaagggatatatacagctattatgtcaaaggaacttcaacaaaaacaaagactaatattgtccctcaagccccattttcagaccgttggctaaaagaaaatgccggtgccgcctctggttttttcagccgtgcggatgaagcaggaaaactgatatgggaaagcgaccccaataaaaattggtgggctaaccgtatggatgatgttcgcggcatcgtccaagtgcggttaatccttttttaa

SEQ ID NO: 38777 - DNA, 426 bp, Neisseria meningitidis
atgaaaacagcccgccgccgttcccgcgagcttgccgtacaagccgtttaccaatcccttatcaaccgcaccgccgcgcccgaaattgctaaaaacatccgcgaaatgcccgactttgccaaagcggacgaagaattgttcaacaaacttttcttcggtacgcaaaccaacgcagcggactacatccaaaaaatccgccccctgctcgaccgcgacgaaaaagacctcaatcccatcgaacgcgccgtcctgctgaccgcctgccacgagctgtccgccatgcccgaaacgccctaccccgtcattatcaacgaagccatcgaagttaccaaaaccttcggcggcacggacgggcacaaattcgtcaacggcatcctcgacaaactcgccgcccaaatccgccccgacgagcccaaacgccgttga

SEQ ID NO: 38778 - DNA, 789 bp, Neisseria meningitidis
  misc_feature 4, 5, 6, 7, 8: 'n' is a, c, g or t
gtgnnnnntatcgttattgttattgcagtcctttatttcctgattaagctggcgggcagcggctcgttcggcgatgtcgatgccactacggaagcagcaacgcagacccgtatccagcctgtcggacaattgacgatgggcgacggcatccccgtcggcgaacgccaaggcgaacagattttcggcaaaatctgtatccaatgccacgcggcggacagcaatgtgccgaacgctccgaaactggaacacaacggcgattgggcaccgcgtatcgcgcaaggcttcgataccttgttccaacacgcgctgaacggctttaacgccatgcctgccaaaggcggtgcggcagacctgaccgatcaggaactcaaacgggcgattacttacatggcgaacaaaagcggcggttctttcccgaatcctgatgaggctgcgcctgccgacaatgccgcttcaggaacagcttctgctcctgccgatagtgcagctccggcagaagcgaaggcagaagacaagggtgcggcagcccctgcggtcggcgttgacggtaaaaaagtcttcgaagcaacctgtcaggtgtgccacggcggttcgattcccggtattcccggcataggcaaaaaagacgattgggcaccgcgtatcaaaaaaggcaaagaaaccttgcacaaacacgcccttgaaggctttaacgcgatgccggccaaaggcggcaatgccggtttgagcgatgacgaagtcaaagcggctgttgactatatggcaaaccaatccggtgcaaaattctaa

SEQ ID NO: 38779 - DNA, 486 bp, Neisseria meningitidis
gtgcaggaacaggctgccgcagagccggcttatgaggatttgcaggcgcggattgccgagctggaagcgcaattgaaagacgagcagctgcgcgctttggcaaacgagcaaaacctgcgccgccgccaccagcaggaaattgcggatacgcacaagttcgccggacagaagtttgccgtggaaatgctgccggtcaaggattatctggaaatggcgcttttggatcagagcggcaatttcgatgcgctgaaaatgggcgtgcagatgactttgaacgagttgcagaaagcatttgatgctacgcaaatcaaggaaatcaatcctaaagcgggcgataagctcgatccgaatatccatcaggcgatgcaggcggtggcaagcgaacaggaacccaataccgtggtgggcgtgatgaagaagggttatacgctgtccgaccgcgtgttgcgcccggctatggttacggtggcacagaaggaagcctga

SEQ ID NO: 38780 - DNA, 642 bp, Neisseria meningitidis
atgccatctgaaaaaccaatgaacagaagaaccttcctcctcggcgcaggcgcgttgctccttaccgcctgcggcagaaaatccgcccgaacccacgccaaaattcccgaaggaagcaccgtacttgccttgggcgattcgcttaccttcggctacggcgcaaaccctggcgaatcctaccccgcgcaactgcaaaaactgacgggttggaatattgtcaacggcggcgtatcgggcgatacatccgcccaagccctgtcgcgcctgcccgcgctgttggcacgcaaacccaagcttgtgattgtcggcataggcggcaacgactttctgcgcaaagttcccaaggagcagacccgcgccaatatcgcgaaaatcatcgaaaccgtgcagaaggaaaacatccccgccgtcctcgtcggcgtgccgcacatcacactgggcgcgttgttcgggcatttgagcgatcatccgctgtatgaggatttgtccgaggaatacggcattccgctgttcggcggcgcgtgggcggaaattttgggcgataataatctgaaatccgaccaaatccacgccaacggcaaaggctatcggaaatttgccgaagatttgaatcaatttttgagaaaacaggggtttagataa

SEQ ID NO: 38781 - DNA, 594 bp, Neisseria meningitidis
atgacgacattacaagaacgcgttgccgcccattttgccgaaagcatccgtgccaagcaggaagccggaaaagtattggtcgagccgaccgtacaggctgccgagctgatgctgcaatgcctgatgaacgacggcaagattctggcgtgcggcaacggcggttcggctgccgacgcgcagcacttcgccgccgaaatgaccggacgctttgaaaaagagcgcatggaactcgccgccgtcgccctgaccacagacacctccgcgctgaccgccatcggtaacgactacggcttcaaccacgtcttcagcaaacaggtacgcgccctcggacgcgccggcgacatcctcgtcggcatttccacttccggcaattccgccaacgtcatcgaagccattaaagcggcacacgaacgcgatatgcacgtcatcgccctgaccggccgcgacggcggcaaaatcgccgccatactcaaagacaccgacgttctgctcaacgtcccccatccgcgcaccgcccgcattcaggaaaaccacatcctgctgatacacgccatatgcgactgtatcgactccgtactgctggaaggaatgtaa

SEQ ID NO: 38782 - DNA, 561 bp, Neisseria meningitidis
atgagctatcaagacatcttgcggggtctgttgccccccgtgtcgtatgcccgcaatgccccgcgtgtgcgggcgcaggcagaaatagacggcgcagcgctggatgcggtagcggaatcggctcaaagcgttgccgatgccgtcgacccgcgcagcgccggccaaatgctggccgattgggagcgcgtattaggtttggacggtacgggcaaaaaccgccagcgccgtgtgttggccgtcatggccaagctaaacgaaacaggcggcttgagtattccttattttgtgcgtttggccgaggcggcgggctatcaaatccaaatcgacgaaccgcagccgttccgcgccggtgtcaaccgtgcgggcgaccgtcttgcgccgcaggaaatcatgtgggtgtggcacgttaacgtgcgcggcggcaacaaccgcattacccgattccgcgccggtatctcggcggcgggcgacaggctgaccgattacagcgatgccgtgatcgaaagcctgttcaaccgcctcaagcccgcccacaccgctatccgatttacctaccgataa

SEQ ID NO: 38783 - DNA, 780 bp, Neisseria meningitidis
atgttttttgtcctttcccctgcgaagaaccttaatgaaaaagaccctgcccctgtcagcgagtttacccaacccgacctgctggcagagtccgacattctaatgcagcagttgcgcgagcttgcgccgcaacagattgccgaactgatgcacgtttccgacaaaattgccctcttaaacgcgcagcgcaatgcagaatggaacacgccgtttacgccggaaaacgccaaacaggcggtctttatgttcaacggcgatgtttacgaaggtatggatgcaaacacattgaataccgatcaaatacaatatctgcaagggcgcgtacgcctgctgtccggcctgtacggccttctgcgtccactggacctgatacagccttaccgtttggaaatggggacggcatttgccaatttgcgcgggaagaatttgtatgagttttggggagacatcattaccaaccttttaaatgacacgcttgcccaagcaggcagcaatacgcttgtcaaccttgcctcacaggaatatttcaagtccgtcaacacgaaaacacttcgggcgcggctgattaccccgatatttaaagacgaaaaaaacggtaaatataaaatcatcagtttctatgccaagcgcgcgcgcggattaatggtgcgctatgcggcagaacacaatattaccgatcctgaaatgctgaaaaattttaattacgaaggctacgcattcaatgacgcggcttccaatgaaagtgaatgggtgtttatgcgttcggaacaaataaagtga

SEQ ID NO: 38784 - DNA, 393 bp, Neisseria meningitidis
atgaacggtaaatactactacggcacaggccgccgcaaaagttcagtggctcgtgtattcctgattaaaggtacaggtcaaatcatcgtaaacggccgtcccgttgacgaattcttcgcacgcgaaaccagccgaatggttgttcgccaacccttggttctgactgaaaacgccgaatctttcgacatcaaagtcaatgttgttggcggcggcgaaaccggccagtccggcgcaatccgccacggcattacccgtgccctgatcgacttcgatgccgcgttgaaacccgccttgtctcaagccggttttgttacccgcgatgcccgcgaagtcgaacgtaaaaaaccgggtctgcgcaaagcacgccgtgcaaaacaattctccaaacgttaa

SEQ ID NO: 38785 - DNA, 801 bp, Neisseria meningitidis
atgaatgcgttcaacctcatcatcatcggcgacgaaatcttacacggcagccgccaagacaagcatttcgcctttttcaaatccctgctcgaatccaaagggctgaagctcaatcaggtgcaatatctgcccgacgaacccgatttgctggtcaggcaactgcgccgcagcttttcagacggcataccgacgtttgttaccggcggcatcggcgccacgcccgacgatcatacccgccaagcggccgccgccgctttggagttgcccgtcgtccgccatcctgaagccgccgggtttatcgaaggcataacccagaaacgcggcgagccgcttgattcgccggaacacgcccaacgcctgaaaatggcagatttccccgaaggcgcggaattggtgcccaatccgtttaataatatcgccggattttccattcgcgagcattatttcttccctggttttcctgtgatggcgcacccgatggcggaatgggttttggatacttattacgccggccgcttcaaccaaacccaacgcggcagccgcagcgtgtatgtgttcgagcagcccgaatcgcgcattacgccgattatggagcatatcgagcaaacttatcccggcgtgcgttcgtacagcctgcccagcgtcggttggacgcattcagacggcacgcaggtcaaaccgcacattgagttcggcatcaaagccgaaggagaagccgtcaaccttttggacgcggcgtgggcggaagtgttgcacagcttggacggattgggagcagagctgaaaaatcgggtaaactga

SEQ ID NO: 38786 - DNA, 477 bp, Neisseria meningitidis
atgaccgttttcgacttggcggcaatggggctatggtatgaaatcggttttttcagaggaataaatgccgttcaaaaacaacgcgttcacgaatctttggaacgcgtcgggatgcggcagtttgccggccgccaaatcgcccacctctcaaacggacaattccagcgtgtcctttttgcccgaatgctggttcaaaacgccaaattcctacttctagacgaacctttcaacgctgttgatgcacggacgacctacgaacttctcgacgtattgcagaaatgccattgcggcggacacgccatcatcgccgtactgcacgattacgaacaagtccgtgcctactttcccaataccctgctgctcgcccgcgaaaaaattgcggcaggcgcaaccgagaccattctgacagaaccctacctcgcccaagccaacgccaaaatgcagcaacaggaaagccccgagtggtgcgcgtcataa

SEQ ID NO: 38787 - DNA, 294 bp, Neisseria meningitidis
atgaactttcaggaagaaaacgagaacatcaagaatgacatagagattaatctcttgcattccgctgaagccgacagcgtggaggcaatgatggacttggcggtttacgggctggcggcgatggttgccaaacacaacaaaacgcgcggcgagcagcttgtgttacaggcgattgccggtcatatgcggaagcttttggccgcgcttcccgaaaccgagtcattggtgcagaccgggaaggtttaccgccgacttgaagatttgatttttaaaacgtatttgccggagcagtaa

SEQ ID NO: 38788 - DNA, 1164 bp, Neisseria meningitidis
atgtctgagcaacttcctgtggcagttgccactgaaaccaaagccgagcgtaaaaagccgaaaaagaaaagttggattaaaaagctaagccctttattttgggtaacggtgattatccctacggtaatttcgttggtgtatttcggcttcttcgcttccgatcgttttacgtcgcaatcgagctttgtggtgcgctcgcctaaaagccaatcttctctcaatggcctgggtgccattttgcagggcacaggttttgcccgtgcgcaagatgatatttacacggttggggagtatatgcgttcgcgctcgtctttggatgaactgcgtaaaatcttgccggtgcgtgagttttatgaaaccaaaggtgatgcgttcagccgctttaatgggtttgggttccgtggcgaggaagaggctttttatcaatactataaaaatcaggtgatgatcaattttgatacggtttcgggtatttccacgttgaatgtaacttcctttgatgcgctggaatctaagaaaatcaatgaggctttgttaaaacaaggtgaagcattgattaaccagttgaacgatcgtgcacgtgctgatacggtgcgctatgcggaagaagtagtgaaaacggcggcagagcgggtaaaggaagcctctcagaatctgacggattaccggattgccaatggcgtttttgatttgaaagcgcaatcggaagtgcaaatggggttggtttccaagctgcaagatgaattgattgtgattcaaacccagctggatcaggtgaaagcagtcactccggagaatccgcagattccgggtttgcaggcgcgtgagcagagcttgcgtaaagaaattgaccaacagttacgtgccatttcgggcggtgggcattcttcgttgtctaatcaggctgccgaatatcagcgtgtgtatttggaaaaccagttggcagagcagcagttggcagccgccatgacttctttggaaagtgccaaggttgaagcagaccgtcagcagctttatttggaagtgatctcgcaaccgagcctgccggatttggcacatgagcctaaacggttatacaacattgttgccactctgattatcggcttgatggtttatggtattttgagcctgttgactgccagcattcgtgagcataaaaactga

SEQ ID NO: 38789 - DNA, 1422 bp, Neisseria meningitidis; identical to SEQ ID NO: 38403

SEQ ID NO: 38790 - DNA, 621 bp, Neisseria meningitidis; identical to SEQ ID NO: 38031

SEQ ID NO: 38791 - DNA, 471 bp, Neisseria meningitidis
atgtacgatgtcaatacccacgatgtccgccgctttttcgcccgcgtgtggcagcagcggctcaatccgctgcaactgagcgcactggaacagaaagccctccgcattatcgaagcccatcccgaataccaccgttatctcgaacgcatcgaagaccatctggacaccgactggctgcccgaaaacggcgaaagcaaccccttcctgcatatgtcgctgcatttgtccgtccaagaacaggcgggcatagaccagccgcacggcatacgcgcaatccacgacaccctgtgcgccaaacgcggctggctggaagccgaacacgaaatgatggaggcactggcggaaacactgtggacggcgcaacgctacggcaccggtttggatgtcaatttctacatgacccgactgcgcaaactcatcggcttgggtgcagaagatcaagccaggttgaacccgcataaaatcgcctga

SEQ ID NO: 38792 - DNA, 1332 bp, Neisseria meningitidis
ttggcgcaagacccgttcattaccgataacgcccaacggcagcactacgaacccggcggcaaataccacctcttcggcgacccgcgcggcagcgtttccgaccgcaccggcaaaatcaacgtcatccaagactatacccaccagatgggcaacctgctcatccaacaggcaaacatcaacggcacaatcggctaccacacccgcttttccggacacggacacgaagaacacgcccccttcgacaaccacgccgccgacagcgcaagcaaagaacaaggcaacgttgacgaaggctttaccgtgtaccggctcaactgggaaggacacgagcaccatcccgccgatgcctacgacggcccgaagggcggcaattaccccaaacctacgggcgcacgcgacgaatacacctatcacgtcaacggcacagcacgcagcatcaaactcaatccgaccgacacccgcagcatccggcaacgcatatccgacaattacagcaacctcggcagcaatttctccgaccgcgccgatgaagccaacagaaaaatgttcgagcacaatgccaagctcgaccgctggggcaacagcatggagtttatcaacggcgtcgccgccggagcactcaacccctttatcagcgcgggcgaagccttgggcataggcgacatactgtacggaacgcgctatgccatagacaaagccgcaatgcgcaacatcgcccccttgcccaccgagggcaaattcgccgtcatcggcggcttgggcagcgtggcgggctttgaaaagaatacgcgcgaagccgttgaccggtggatacaggaaaaccccaatgccgccgaaaccgtcgaagccgtcttcaacgttgccgctgccgccaaagtcgcgaagctggcaaaggcggcgaaaccggggaaagctgcggttagcggggatttctcagactcctacaagcataacactgcttcaagattatctcagtctgtagatggagaaatgtttcaaacccgcaatgttgattttaaagcaaaatctattgggactaaaattcatgatggagctcaagggaaacatatttcgggacatagaaactacattgaaggtaagagtactttaaatcaaaacattaatcctcaagaattgttgaacggaatacattcaggtgcttatccagttatttctaaaggagcaagaggaaatcctgttgttgattttgggtatcctataggcagcgatgggaaatcaggattaagtaccaattttggtacgattcattcaggtaaaaatggagttcacattgttccggctaaccctaaaaccattaaaaaggtgcaatag

SEQ ID NO: 38793 - DNA, 186 bp, Neisseria meningitidis
ttgcttgactattttcaagattctgtacctcgtgaaccggactatacaaaaaaaccgccttcgtgtaaagcggttcttaaatcgcccgttaaggcggacacaacgatagccaaactggaacaggaggcggcaaaggcgggtttgtccaaaacagccttgattgaaaggctgattggggatttgtag

SEQ ID NO: 38794 - DNA, 303 bp, Neisseria meningitidis
atgggctttcgtgtcggtatgaattgttttgatacaagattgcaggcagacgactatttattgtcgtcccttcctcctactgttacccaggacggaaaaatcatcaggccggaaagggtgggcgataaatggattttgaacggaaagccggttacgttgtcttatccggaatgttccaattttgagcagatcaaacagggttcttatgtcggttcgacggttttaattctgttcgtagtcatttacggcttcaggcttttgattaattttttaaaagacatgggcaaggttggtactgattga

SEQ ID NO: 38795 - DNA, 486 bp, Neisseria meningitidis
ttggctgccgatgaggtttttgagggccctgtcgagcaggacgaaagcgatttcggcggacggcgtaaaggcagacgtggtcggggtgcggcaggaaaagtggttgtcttcggcattctgaaacacaacggacgggtctataccgttatcgtagataatgccaaatctgaaacgttactccctgtcatcaaaaagaaaatcatgccggacagtattgtttataccgatagtctgagcagctgcgacaagttggacgtgagcggttttatccattaccgcatcaaccattccaaggaatttgcagaccgtcagaaccacattaacggcattgagaacttttggaatcaggcaaaacgcgtcttgcgaaaatacaacggaatcgatcgtaaatctttcccgctgttcttgaaagaatgcgaatttcgatttaacttcggcacaccgtctcaacagcttaaaatcctgcgggattggtgtgggatttag

SEQ ID NO: 38796 - DNA, 306 bp, Neisseria meningitidis; identical to SEQ ID NO: 38577

SEQ ID NO: 38797 - DNA, 432 bp, Neisseria meningitidis
atgaaaaataatatttttctaaacttaaataaaaaatctataaataacaaccattttgttatttcgattttttttgaaacaatttaccaatttgaaactaaagatacgcttttagagtgttttaaaaatattacaactaccggacattttggagtaataggtgctcaatatgaaaaaatagatgctaccagatggattggagattatgaagaggtaaatggatttgagtatattgataaagctccttctatttatttttcagttggagatgatttcaatcctgaagaattaattatacctattaatttagcatatcattactttaatattgcaatatctgatttcttaatagctcaccctgaatatcaaaaaaagtgtaaagaaatacaaaaaacatattctcaaacaaactgtagcctgcatgaaacctaa

SEQ ID NO: 38798 - DNA, 1098 bp, Neisseria meningitidis
atgaaccagacatttaccttgcccgatacgcgcccgtatccccaaaatccgattaagaaccacctgctgctcaatgcctaccagttggcgcataattcttcccaggcttcgcgcaaactctcgtccggccaacttcaaaccgaaatcagggggatgcttgagcaaaaccactatatcaacctttccctcgcgttgacgatgtcgcccgatgccggaacttatgccgcgctgctttccagtgtgaacgcggtgctcgattgcgagaaagaaggcgaagtgcagtggttcgccctgccggttgtgctggtgtccggctgcaagaaagaacgggcaatcgagatgaagctgccgacggaggcattgtttgcctgtttgaaaaactatccgcacctgcgcgcgttgacgcaagagacgcaatggctgccttatcttgtgcattcttccgatttgagcgcggtcgcgccggatgagtggtggcgtgccaaacaaaataccgaagcggcggcgcaacacttgcgccgtttcgccccgcgccctttgctgttgcccgaagggcagtccgtccacgtcgtttacgcgctgggtttcggcagcggcaaggttcagacggcattgggtcagaaccttcttcaggcaggcctgcccttaatgcaggtatggcaggaaaatcttgcatcggaaggcgttacgctgtttgccaatccactttccccggattctccggtacgcgcgctttcagacggcagccacacgcgccagcgtatggcgatggatgtgtttgcggcaaacgcgatacgcgccgtccgtatgcagagtccgcgcgtcggcgtggtcgctgcggcaaaggcgggcggacaggttttattcgggtttaatgcgaccgacggcgcgtttgaagtcgtgccgcaggtgtttttgtggcagctttcctttaccgacaatattggcgttattcagcaaaattttttggatttaatggcagaatgccgtgtagaacacgtttacctgttgcacaatcccttgggcgaacaggaaagcatcccgagctatgcggaagcattgaaacgggaagggcacaatccgtttttcagcgcatag

SEQ ID NO: 38799 - DNA, 123 bp, Neisseria meningitidis
atgaacaaggcaatgccgtctgaagggctttcagacggcattttgcgctattttgtgaaggtagggatgacggttcgggtattcctgacagggtggattttcaaggtgttgtatagggtgtag

SEQ ID NO: 38800 - DNA, 384 bp, Neisseria meningitidis
atggaaaaaataaaaaattatatagaattcaagaaattatttaaaaatataacggaaaaatttgtcagagatttagatataacattaattgaagcagctgaatattctataattgaattcgaaatttatttatctgaatatccggaagatagtacatttatttttacagcatgggcaatctatctgttagaaaataactgtctcaatgaaagaggaaaagataattttttcatcgcggaaatgaaaaaatgttatcaacaaactaatttggatagaataaaatctatctattcttcgagtgactatcatatttttgctaaggatgtaaacaagattcaacaaacatttaaattaaatcttgccaatatcatgcagcaagagtag

SEQ ID NO: 38801 - DNA, 366 bp, Neisseria meningitidis
atgcagtttccttaccgcaatgttccggcttcgcgtatgcgccgtatgcgcagggacgatttttcacgccgcctgatgcgcgaacacacgctgaccgccgatgatttgatttatccggtgttcgtattggaggggtcggcgcgcgaggaggatgtgccttctatgccgggtgtgaagcgtcaaagtttggacaggctgctgtttacggcggaagaggcggtaaagctcggtattccgatgttggcactgttccccgtggttacggcaaacaaaaccgagcgtgcgcaggaggcgtacaatcccgaagactcgtgccgtcaactgtccgcgccttgcgcgagaggtttcccgaactgggcattatga

SEQ ID NO: 38802 - DNA, 144 bp, Neisseria meningitidis
gtgtttgacggaaaaggagaagctaaaataccgagctatacttggcatcatcatcaggatacgggacgaatgcagttaatatccgaaagaaagcatacgcaaacagggcatataggtggtgaagcaatggataaaggaaaatga

SEQ ID NO: 38803 - DNA, 168 bp, Neisseria meningitidis
atgaatgaaaaagatttaatcgaatggctcgaagaccgtggcgagctgatggtcatgaagaaggacggcgaaggctttgtgattgcagcgcgtgcgccggacgggatgtggaagactgccgaggcggaaactttggctcaggcgataactttatgggaggaagtgtga

SEQ ID NO: 38804 - DNA, 966 bp, Neisseria meningitidis; identical to SEQ ID NO: 38346

SEQ ID NO: 38805 - DNA, 840 bp, Neisseria meningitidis
gtgaaacgaatttttctgtttttggctaccaatatcgctgttttggtcgtaatcaacattgttttggcggttttgggcatcaacagccggggcggcacgggcagcctgttggcgtattccgccgtcgtcggcttcactggttcgattatttcgctgctgatgtccaaattcatcgccaaacaatcggtcggcgcggaagttatcgacacgccgcgcaccgaagaagaagcctggcttttgaacactgtcgaagcccaagcgcggcaatggaacctgaaaacgcccgaagtcgccatctaccactcccccgaacccaatgcctttgccacgggcgcatcgagaaacagctccctgatcgccgtcagcaccggtttgctcgaccatatgacgcgcgacgaagtggaagccgtattggcgcacgaaatggcacacgtcggcaacggcgatatggttacgctgacgctgattcaaggcgtggtcaataccttcgtcgtgttcctgtcgcgcattattgccaacctgattgcccgaaacaacgacggcagccagtcccagggaacttatttcctggtcagcatggtattccaaatcctattcggcttccttgccagcttaattgtcatgtggttcagccgacaacgcgaataccgcgccgacgcgggcgcggcaaaactggtcggcgcaccgaaaatgatttccgccctgcaaaggcttaaaggcaacccggtcgatttgcccgaagaaatgaacgcaatgggcatcgccggagatacgcgcgactccctgctcagcacccacccttcgctggacaaccgaatcgcccgcctcaaatcgctctga

SEQ ID NO: 38806 - DNA, 255 bp, Neisseria meningitidis
  misc_feature 8, 9, 10, 11, 12: 'n' is a, c, g or t
gtgtgtgnnnnnggtcgccgccaactggcttacccgattaacaaaatccataaagcccattacgttttgatgaacatcgaaaccactcccgaagtggttgaagagctggaaaccgcattccgcttcaatgatgccgtattgcgccatctaaccatcaaaaccaaacacgccgttaccgaagcatcccctatgttgggtggtgaaaaggctaagaacctgttgagcggtgcgtctgaagaagcggtcgcccaataa

SEQ ID NO: 38807 - DNA, 2277 bp, Neisseria meningitidis
atgacaacattacatttctcaggcttcccgcgtgtcggcgccttccgcgaattgaaattcgcacaagaaaaatactggcgcaaagaaatcagcgagcaagaattgctggctgttgctaaagacttgcgcgagaaaaactggaaacaccaggccgctgccaacgccgatttcgttgccgtaggcgatttcactttctacgaccacatcctcgacctgcaagtcgccaccggcgcgattcccgcccgcttcggtttcgacagccaaaacctgtctttggaacaattcttccaactggcgcgcggcaacaaagaccaattcgctatcgaaatgaccaaatggttcgacaccaactaccactacttggtgcctgaattccacgccgataccgaattcaaagccaatgccaaacactatgttcaacaactgcaagaagcccaagccctcggtctgaaagccaaaccgaccgttgtaggtccgttgactttcctgtgggtgggtaaagaaaaaggcacagtcgaattcaaccgcctgagcctgttgcaaaaactgctgcctgtttacgttgaaatcctaaacgctttggttgaagccggtgcagaatggattcaaatcgacgagcctgctttgactgtcgatctgcctaaagaatgggtagaagcctacaaagacgtttacgctactttgagcaaagtaagtgccaaaatcctgctgagcacttacttcggttctgttgccgaacacgccgcattgttgaaatccctgcctgttgacggcctgcacatcgacttggtacgcgctcccgagcaactggacgcatttgccgactacgacaaagttctgtctgcaggcatcatcgacggccgcaacatctggcgcgccaacctgaacaaagttttggaaactgttgagcctctgcaagccaaactgggcgaccgtttgtggatttccagctcttgctctctgctgcacactccatttgacttgtcagttgaagaaaaactgaaagccaacaaaccggacctgtactcttggttggcatttaccctgcaaaaaacccaagaattgcgcgttctgaaagccgcattgaacgaaggtcgcgattccgttgccgaagaactggccgccagccaagctgctgccgattcacgcgccaacagcagcgaaatccaccgtgcagacgttgccaaacgcctggccgatttgcctgccaacgcagaccaacgcaaatctccatttgccgaccgtatcaaagcgcaacaagcatggttgaacctgcctctgctgccgacgaccaacatcggttctttcccgcaaactaccgaaatccgccaagcacgcgcagccttcaaaaaaggcgaactgtctgccgccgattacgaagccgcgatgaaaaaagaaatcgccttggtggttgaagaacaagaaaaactggatttggacgtactggtacacggcgaagccgagcgtaacgacatggtcgaatacttcggcgaattgttgagcggttttgcattcacccaatacggctgggtacaaagctacggctcacgttgtgttaaaccaccgattatcttcggtgacgtaagccgtcctgaagccatgactgtcgcttggtctacttacgctcaaagcctgaccaaacgtccgatgaaaggtatgttgaccggccctgtaaccattctgcaatggtctttcgtccgcaacgatattcctcgctctaccgtgtgcaaacaaatcgcactggctctgaacgacgaagtattggatctggaaaaagcaggcatcaaagtcatccaaattgacgaacctgccatccgcgaaggcttgccgctgaaacgcgccgattgggatgcctacctgaactgggcgggcgaatctttccgcctgtcctctgccggttgcgaagacagcacacaaatccacactcatatgtgctactccgagttcaacgatatcctgcctgcgattgctgcaatggatgcggacgtgatcaccatcgagacttcacgttccgacatggaactcttgaccgcgttcggcgaattcaaatacccgaacgacatcggcccgggggtttacgacatccacagcccgcgcgtaccgacagaagccgaagtggagcacctgttgcgcaaagccatcgaggttgtaccggttgaacgtctgtgggttaacccggactgcggcctgaaaacacgcggctggaaagaaactctggaacaactccaagtgatgatgaacgtaacccacaaattgcgtgccgaattggcgaaataa

SEQ ID NO: 38808 - DNA, 372 bp, Neisseria meningitidis; identical to SEQ ID NO: 36308

SEQ ID NO: 38809 - DNA, 507 bp, Neisseria meningitidis
atggttgacgcttggtctgtccctgattttgaatcgaaaatctgtccgcccgaggcattgtccgaacggttggctcggttgccgcgcccgctggtgtttaccaacggctgtttcgacatcctccacagggggcacgttacttatctggcgcaggcgcgttcggcaggggcggcgttggtgctggcgttgaataccgatgcttcggtgcggcgtttgggcaaggacggcgaccgcccgattaatcctttggagaaccgtgccgccgttgccgccgctttggaaagtgtggatttggtaacgtggtttgacggggatacgccggcggcgttgattgaggcggtcaaacctgagattttggtcaagggcggcgattgggctgcggataagattgtcggtgcggcagaaacgttggcgcgcggcggtcaggtgttttcaattccgtttctgcaccagacttcgacaacgaagactttggcaaaaatccgtgcggcagagggcggaaaatga

SEQ ID NO: 38810 - DNA, 3963 bp, Neisseria meningitidis
atgtctgtcgttttgcccttgcgcggcgttaccgccctttccgatttccgtgtcgaaaaactcttgcaaaaagccgccgcactcggactgcccgaagtcaaattaagcagcgaattttggtatttcgccggcagcgagaaagcattggatgccgcgactgtcgaaaaactgcaagccttgttggcggcgcaaagcgttgaacaaacgccaaaagcgcgcgagggcttgcatttgtttttggtaacgccccgtttgggtacgatttcgccgtgggcttccaaggcgaccaatatcgcggaaaactgcggtttggcaggcatcgagcgcatcgagcgcggcatggcggtgtggctggaaggtgcgcttaccgatgaacagaaacagcaatgggcggcgttgctgcacgaccgcatgaccgaatccgtgctgcccgattttcagacggcatccaaattattccaccatctcgaatccgaaaccttttccaccgttgatgttttaggcggcggtaaagaggctttggtcaaagccaataccgaaatgggtttggcactctccgccgacgaaatcgattatctggttgaaaactatcaggctttgcaacgcaatccgtccgatgtggagctgatgatgttcgcgcaggcaaacagcgaacactgccgccacaaaatcttcaacgccgacttcatcctcaacggcgaaaaacaaccgaaatcccttttcggcatgatacgcgacacgcacaacgcgcatcccgaaggcacggtcgtcgcttataaagacaattcgtccgtgatcgaaggcgcgaaaatcgagcgtttctatccgaatgcggcggaaaaccaaggctaccgtttccacgaggaagacacgcatatcatcatgaaagtggaaacgcacaaccacccgaccgccatcgcgccgtttgcaggcgcggcaacgggcgcgggcggcgaaatccgcgacgaaggcgcaacgggcaaaggttcgcgtccgaaagcaggcttgaccggctttaccgtgtccaacctcaacatccccggcctcaaacagccgtgggaacaagattacggcaagccggaacatatttcctcgccgctggacatcatgattgaaggcccgatcggcggcgcggcgttcaacaacgaattcggccgccccaacctcttgggctacttccgcacttttgaagaaaaatttgacggtcaggttcgcggctaccacaaaccgattatgattgccggcggcttgggcagcattcaggcgcagcagacgcataaagacgaaatccccgaaggcgcattgctgattcaactgggcggcccgggcatgcttatcggcttgggcggcggcgcggcttcttcgatggataccggcacgaacgacgcttctttagacttcaactccgtacaacgcggcaaccccgaaatcgaacgccgcgcgcaggaagtcatcgaccgctgctggcagctcggcgacaaaaacccgattatctccatccacgacgtgggcgcaggaggtttgtccaacgccttccccgaactggtcaacgatgccggacgcggcgcggtattcgagctgcgcgaagtgccgttggaagaacacggtttaacgcctttgcaaatctggtgcaacgaatcgcaagagcgttatgtgttgtcgattttggaaaaagatttggataccttccgcgccatctgcgaacgcgaacgctgcccgtttgccgtggtcggtacagcgaccgacgacggtcatttgaaagtgcgcgacgatttgttcgccaacaaccccatcgatttgccgttgaacgtcttgctcggcaaaccgcccaaaaccacgcgtaccgacaaaacagttacgccatctaaaaaaccgtttcacgccggcgatatcgacatcaccgaagccgcctaccgcgttttgcgcctgcctgccgtagccgccaaaaacttcctgattaccatcggcgaccgcagcgtcggcggcatgacccaccgcgaccaaatggtcggcaaataccaaacccccgtagccgactgcgccgttaccatgatgggcttcaatacctatcgcggcgaagcaatgtctatgggcgaaaaaccgaccgttgccctgtttgacgcgcctgcttcaggcagaatgtgcgtcggcgaagccatcaccaacatcgcggcggtcaacatcggcgacatcggcaacatcaagctctccgccaactggatggcggcgtgcggcaacgagggcgaagacgaaaaactctaccgcaccgtcgaagcggtttccaaagcctgtcaggcattggatttgagcattcccgtgggcaaagacagcctgtcgatgaaaactgtgtggcaggacggcgaagagaaaaaatccgtcgtctcgccattgagcctgattatctctgcgttcgcgccggtcaaagacgtgcgcaaaaccgttacgcccgaattgaaaaacgtcgaagacagcgtattgttatttatcgatttgggcttcggcaaagcgcgtatgggcggctctgcattcggtcaggtatacaacaacatgagcggcgacgcgcccgatttggacgatacaagtcgtctgaaagcgttttacaacgtgattcaacagcttgtcgccgaagacaaactcttggcataccacgaccgcagcgacggcggtttgtttgccgttttggtagaaatggcgtttgcggggcggtgcggcttggatatagatttaaatttattgcttgcacaaacatttattaccaaccataccgctctgtctcaatcattgcggactgaagaggtaaaagcgttggctgaatggcaagaaaccattgcccgcacattatttaatgaagagttgggtgctgttatccaagttagaaaacaagatgttgccgatattatcaatttattctatcaacaacagctgcatcataatgtctttgaaatcggtacgttaactgatgagaacacgttaatcatccgcgacgggcaaacgcaccttatttctgacaacctaatcaaactgcaacaaacctggcaagaaaccagccatcaaatccaacgcctgcgcgacaaccccgcctgcgccgacagcgagttcgcattgattggcgacaacggacgcagcgcattgtttgccaacctgaaattcgacgtgaacgaagacatcgccgcgccgtttatcaacagcggcgcgaaacccaaaatcgccatcctgcgcgaacagggcgtaaacgggcaaatcgaaatggccgccgcctttacccgcgccggattcgatgcttacgacgtgcatatgtccgacctgatggcaggccgcatccacctcgccgacttcaaaatgctggcggcgtgcggcggcttcagctacggcgacgtactcggcgcgggcgaaggctgggcgaaatcgattctgttccaccctgctctgcgcgaccagtttgccgccttcttcgccgacccggacacgctgacattgggcgtgtgcaacggctgccaaatggtcagcaaccttgccgaaatcatccccggcacggcaggctggccgaagttcaaacgcaacctgagcgaacagtttgaagcgcgcctaagcatggttcacgtccccaaatccgcgtcgctgattctgaacgaaatgcaaggctccagcctgcccgtcgtcgtcagccacggcgaaggccgcgccgacttcgcacttcacggcggcaacatttctgccgatttgggcattgcgctgcaatatgtggacggtcaaaaccaagttacccaaacctatccgctcaaccccaacggctcgccgcaaggcatcgccggcattaccaacgccgacggccgcgtgaccatcatgatgccccaccccgaacgcgtgtaccgcgccgcacaaatgagctggaaaccggaaggctggacggaactgtccggctggtaccgcctctttgccggcgcacgtaaagccttgggctaa

SEQ ID NO: 38811 - DNA, 429 bp, Neisseria meningitidis
ttggcgcatttgaaaaaaagaccgcaacacaagggtatgattgtcatcgggaatcaatttgagcaattgcagcctttacttcaaatgccgtctgaaaatctgcaggatatgcttagaaaagaatggcccgcccctaaaacgttcctattatccgccaaatcctgtgtcttacctgagttgcgcgggaaacagcgcagcaagttggcggtcagggttcccgcccatgtaggtgcgcgccgcttgtgtcaggctttgcaaacgcctttggtctcgacttcgtgcaaccgcgcaggcaaacgcgcgtgtcggacggagagggaagtcagaaggcaattcggacgcgatgtgtggattgttggtgggagaatcggcaggcagaaatcgccgagtcagattattgacggggaaacaggtaaacgtttgcgttag

SEQ ID NO: 38812 - DNA, 165 bp, Neisseria meningitidis
ttgcacttcaaatgcgaatccgccggcctgcaagtgcgtatcggccagcgtttttaccgcactaccgcccgcgccgttatcggcagcggcggcacggcggaaataccggcaatcgccgacgagccgggcgcggccgccaatgtggcgacggcgaggcgcaactga

SEQ ID NO: 38813 - DNA, 459 bp, Neisseria meningitidis
ttgttaactaagttgaaaattttgctatttttgttcttatttgtttttgtattggctattaatttgcttttcttcttttttagttcggatatcgagagtttcgggaactatcagtttgaatatgtttacgataaaggttggcctgctaattatattttagtcatgaaagatggaaatgaagggaattttgataaaataatatccggattggttttagaatattataaggaggatgataacatttatttttcttatattgacgggcaaggatttgcttcagactcttgctattacaaaccggaaattttatatggaaaaattattttaaataaaaatcatatcattaatattaatagcatggaaaaaaataattttctttcagaagataaaataatgaagggaacaagaaattggctagcagaccctaaaaataaatgtaatatacagactctagactaa

SEQ ID NO: 38814 - DNA, 1641 bp, Neisseria meningitidis
atgactgacaacagccctcctccaaacggacacgcccaagcacgcgtccgcaaaaacaacaccttcctctctgccgtctggctggttccgctgatcgcgctgattgccggcggctggctttgggttaaggaaatccgcaacagggggcctgtggttacgctcttgatggacagcgcggaaggcattgaggtcaacaatacggtcattaaggtattgagcatcgatgtcggacgcgttacccgaatcaaactgcgcgacgaccagaaaggcgtggaagtaaccgcccaactcaatgcggacgtatccggcctcatccgcagcgacacacagttttgggtggtcaagccgcgtatcgaccaaagcggcgtaaccggtttgggtacgctgctttcgggttcgtacatcgcctttacacccggcaaaagcgacgaggcaaaagacgtgttccaagtgcaggacattccgcccgttaccgccatcgggcaaagcggtctgcgcttgaatttgattggtaaaaacgaccgtatcctcaacgtcaacagccctgttttgtatgaaaactttatggtcgggcaaatcgaaagcgcgcatttcgacccgtccgaccaaagcgtgcattacaccatcttcatccaaagccccaacgacaaactgattcattccgccagccgtttttggctggaaagcggcatcaatatcgaaaccacaggcagcggcatcaaactcaattccgcccctctgcctgccctgctgtcgggcgcgatttcatttgattcgccgaaaaccaaaaacagtaaaaacgtcaaaagcgaagacagcttcacgctttacgacagccgcagcgaagtcgccaacctgcctgacgaccgctcgctgtactacaccgcgtttttcaaacaatccgtgcgcggcctgaccgtcggttcgcccgtcgagtacaaagggctgaatgtcggcgtggtttccgatgtcccttattttgaccgcaacgacagcctgcatttatttgaaaacggctggattcccgtacgcatccgcatcgagccttcccgtttggaaatcaatgccgacgaacaaagcaaagagcattggaaacaacaatttcagacggctttaaacaaaggcctgaccgccaccatctccagcaacaacctgctgaccggcagcaaaatgattgagttgaacgatcagccttcgtcttcgcccaagctgcgaccgcataccgtttatgcagacgataccgtcatcgctacacaaggcggcggtttggacgacttacaggtcaaattggcggatttgctggacaaattcggcaaactgcctttagacaaaaccgtttcaggtttaaacgcttcgctcgccgaactcaaatccacgctgaaatccattaacacgctaagcaataatccgcaaacgcaaaacattccgaacgagttgaaccaaaccctgaaagagttgcgcacaaccctgcaaggcgtatcgcctcaatcgcctatctacggcgacgtacaaaatacgttgcaaagtttggacaaaaccttaaaagacgttcaacccgtaattaatactttgaaagaaaaacccaacgcgctgattttcaacagcagcagcaaagaccccatcccgaaaggaagccgataa

SEQ ID NO: 38815 - DNA, 753 bp, Neisseria meningitidis
atggcaaaccaaagacctatctacggcttccatgccgtcaacgcccgattgtggcaaaaccccaaatccatcgtcgaactctatgtccaagaaggcaaaaacgatgtacgcacgcgcgaagtgttggaaaaggcggcaaacgaaaacatccgcgtatattttgccgatgccgaccgcctcaacgccatcagcaaaggtgcgcgccatcagggcgtggtcggatttatcgatgcctccaaaaaccacgtccacctcgaagacgtattggaaaacttaagcgaaccgccgctgctgctgatactcgacggcatcaccgatccgcacaacctcggcgcgtgcctgcgtaccgccgacgcaatgggcgtacatgccgtcatcgcaccgaaagacaaaagcgcggggctgaacgccaccgtcagcaaagtcgccagcggcgcggcggaaaccgtcccctacatcaccgtaaccaacctcgcccgcaccctgcgcgagctgaaagaatacggcatttggatcatcggcaccgatatgggcggcaacgccgacctttaccattgcgatctgcccgacagcgcggcatgggtgatgggcaacgaaggcgacggtatgcgccgcctgacacgcgaacattgcgacatgctggtgtccatacccatgttcggcacggtcgaaagcatgaacgtctccgtgtctgccggaatggtattaagcgaaacccgccggcagcgcgtattaaaaaacgaaaaagcgtaa

SEQ ID NO: 38816 - DNA, 651 bp, Neisseria meningitidis; identical to SEQ ID NO: 38345

SEQ ID NO: 38817 - DNA, 1050 bp, Neisseria meningitidis; identical to SEQ ID NO: 38313

SEQ ID NO: 38818 - DNA, 213 bp, Neisseria meningitidis
  misc_feature 190, 191, 192, 193, 194: 'n' is a, c, g or t
atgaatcccatgtacattacttttgcaatctatctggttgcagtccttctcatcgggcttgccgcctatttttccacgcgcaatttcgacgattatattttgggcgggcgcagcctaggcccgtttgttaccgcgatgtcggcaggcgcgtccgatatgtccggctggctgctgatgggtctgccgggcnnnnncacacacttaattaattaa

SEQ ID NO: 38819 - DNA, 618 bp, Neisseria meningitidis
atgagccacaaaaaacaagatgccttccaaggattgatcgacgcgctgaaggttttacccaacgtcgggccgaaatcggcacagcggatagcgtatcatttgctccaacacaagcgcaaagaggctgaaaaactggtggatgccttgcagacggcattgaagcaggtttaccattgcgcgatgtgcaacacgttttgcgaaggcggattgtgcgatatttgtgccgatgaaacacgcgacgggcggcggctgatggtggtgcatatgcctgccgacgtgtcgaatatggaagcggcaaactgccacgacgggctgtatttcgtcctgatggggcaaatcaatacggcattgggaatggacgtatccgccatcgcattggacaggctggcgcaacggctgggcggcggggaagtcgaagaaatcattattgcaaccgcttttaccgcagaaggcaatgcgacggcgtatgtcctgtccgagttttttaaaaacctgccttacaaagtcagcaggctgtcgcagggcattcccttgggcggcgaattggaatatgtcgatgcgggaacgctggcgcaggcggtgtacgaacgccgcctgattaaagaaggcggggcataa

SEQ ID NO: 38820 - DNA, 2055 bp, Neisseria meningitidis
atgacacgcaaaatcctcgttacctccgccctgccctatgccaacggcagcatccacctcggccatatggtcgaacacatccaaaccgacgtttgggtgcgctttcaaaaactgcgcggccacgaatgctactactgctgcgccgacgacactcacggcacgcccgtaatgcttgccgcgcaaaaacaaggcatcgcgcccgaagacatgattgccaaagtgcgcgaagagcacctcgccgactttaccgatttcggcatcggttacgacaattattacagcacccattcccctgaaaacaaacagttttcccaagacatttaccgcgcgctgaaagccaacggcaagattgagagccgcgtcatcgagcagcttttcgaccccgaaaaacaaatgttcctgcccgaccgcttcgtcaaaggcgaatgcccgaaatgccacgcccaagaccaatacggcgacaactgcgaagtctgcggcacgacctattccccgaccgaactgatcaacccgtattccgccgtttccggcgcgaaacccgaattgcgcgaatccgaacacttcttcttcaaactgggcgaatgcgccgacttcctcaaagcatggacttccggcaacaacccgcacgacggcaagccccatctgcaagccgaagccctcaacaaaatgaaagaatggctgggcgaaggcgaagaaaccacgctgtccgactgggacatttcccgcgacgcgccgtatttcggctttgaaatccccgacgcgccgggcaaatacttctacgtctggctggacgcgcccgtcggctacatggcgtcgtttaaaaacctgtgcgaccgcatcggcgtcgattttgacgaatacttcaaagccgacagccaaaccgagatgtaccacttcatcggcaaagacatcctctatttccacgccctgttctggcctgccatgttgcacttctccggccaccgcgccccgaccggcgtgtacgcacacggctttttgaccgtggacggacaaaaaatgtccaaatcgcgcggcaccttcatcaccgctaaatcctatctggaacaaggtttaaaccccgagtggatgcgctactacatcgccgccaaactcaacagcaaaatcgaagacatcgatttgaacctgcaagactttatctcgcgcgtcaacagcgacctcgtaggcaaatacgtcaacatcgccgcccgcgcgtcaggttttatcgccaaacgctttgaaggccgtctgaaagacgttgccgacagcgcgttgctggcaaaactgactgcgcaaagcgaagccattgccgaatgctacgaaagccgcgaatacgccaaagccctgcgcgacatcatggcattggcagacattgtcaacgaatatgttgatgccaacaaaccttgggaactggcgaaacaagaaggccaagacgcacgcctgcacgaagtatgcagcgagctcatcaacgccttcaccatgttgaccgcctacctcgcccccgtgttgccgcaaaccgccgccaacgccgcgcgtttcctcaatctggacgcgattacttgggcgaacacaagggtaaccttgggcgaacacgccatcaacaaatacgaacatttaatgcaacgagtggagcaaaaacaagtggacgatttaatcgaagccaacaaacaaagtattcagacaacccccgcgcctgttgaagacagcaaatacgaaaaagtcgccgaacaggcgggtttcgacgactttatgaaaatcgatatgcgcgtcgccaaagtattgaactgcgaagccgtcgaaggcagcaccaaactcctgaaattcgacctcgatttcggttttgaaaaacgtatcatcttctccggcatcgccgcgttttaccccaaccctgccgagttaaacggaagaatggtcattgccgtcgccaacttcgccccgcgcaaaatggcgaaattcggcgtatccgaaggcatgattttgagtgccgccacggcagacgggaaactgaaactgcttgatgtcgacgcaggcgcgcaaccgggcgacaaagtcggttaa

SEQ ID NO: 38821 - DNA, 1569 bp, Neisseria meningitidis
atgagtcaaaccgatacgcaacgggacggacgatttttacgcacagtcgaatggctgggcaatatgttgccgcacccggttacgctttttattattttcattgtgttattgctgattgcctctgccgccggtgcgtatttcggactatccgtccccgatccgcgccctgttggtgcgaaaggacgtgccgatgacggtttgattcacgttgtcagcctgctcgatgctgacggtttgatcaaaatcctgacgcataccgttaaaaatttcaccggtttcgcgccgttgggaacggtgttggtttctttattgggcgtggggattgcggaaaaatcgggcttgatttccgcattaatgcgcttattgctcacaaaatctccacgcaaactcactacttttatggttgtttttacagggattttatctaataccgcttctgaattgggctatgtcgtcctaatccctttgtccgccatcatctttcattccctcggccgccatccgcttgccggtctggctgcggctttcgccggcgtttcgggcggttattcggccaatctgttcttaggcacaatcgatccgctcttggcaggcatcacccaacaggcggcgcaaatcatccatcccgactacgtcgtaggccctgaagccaactggttttttatggtagccagtacgtttgtgattgctttgattggttattttgttactgaaaaaatcgtcgaaccgcaattgggcccttatcaatcagatttgtcacaagaagaaaaagacattcggcattccaatgaaatcacgcctttggaatataaaggattaatttgggctggcgtggtgtttgttgccttatccgccctattggcttggagcatcgtccctgccgacggtattttgcgtcatcctgaaacaggattggtttccggttcgccgtttttaaaatcgattgttgtttttattttcttgttgtttgcgctgccgggcattgtttatggccgggtaacccgaagtttgcgcggcgaacaggaagtcgttaatgcgatggccgaatcgatgagtactctggggctttatttggtcatcatcttttttgccgcacagtttgtcgcattttttaattggacgaatattgggcaatatattgccgttaaaggggcgacgttcttaaaagaagtcggcttgggcggcagcgtgttgtttatcggttttattttaatttgtgcttttatcaatctgatgataggctccgcctccgcgcaatgggcggtaactgcgccgattttcgtccctatgctgatgttggccggctacgcgcccgaagtcattcaagccgcttaccgcatcggtgattccgttaccaatattattacgccgatgatgagttatttcgggctgattatggcgacggtgatcaaatacaaaaaagatgcgggcgtgggtacgctgatttctatgatgttgccgtattccgctttcttcttaattgcatggattgccttattctgcatttgggtatttgttttgggcctgcccgtcggtcccggcgcacccactttgtatcccgcaccttaa

SEQ ID NO: 38822 - DNA, 894 bp, Neisseria meningitidis
atgattattgtcatgagcaggcgtgccgccgaagcggacattgccggcgttgtcgcctttatccgcagcagaggtctgcgagaacacatttctcacggcgacgagcgtaccgtcatcggcgcaatcggcgacgatagggttttgagcgtcagggaggtgcagacgctgccggaggtcgagaaagccgtccgcattttggatacatggaaaaccgtcagtcgggaaaatcgggcggaagacagccgcgttgccgccaaaggcgtggctttcggcggcggggaaaccgtccgtatcgccgcagaaccgtcagtatggcgcaatgcggatgcagtgtttctggatccgtttttcacttcggcaaacttatacgacacttcaagtgcggatgaaaggcggggacggtgcagacggttggcggaacagaccgcatcggcgcatggcgcagggaaacccgtattggtgcgcgtccgcaacgtccgccatgtcgaagcggctttgaatgcgggggcggacatcctgtatttgggcggcgggctgatgtccgatcttgccgtattgaatgaagccggaagcctgaacattcccttggtgctgtgtaaagacaagcaccattctgccgaagattggttgaatgccgcagaatatgttgtctcgcgcggcaaccgccacctgattctgggcgagtcgggcgtgttgagccataccaaagaccatccctaccgtttggatgtcgaatccatcgtgaaagtccgccaaatcagccatctgcccgtgattgcgaatattacgggattatggaaccgcgatatgccgcaggaaatcctgtacggcttggcaaaggcggcaggcgcgtgcggaatcgtcggaacctgttttgaaaagtcgggcggatag

SEQ ID NO: 38823 - DNA, 1002 bp, Neisseria meningitidis
atgattgacggacaaacaaccgaacccaaacaaaaaacccgaatcatccttgcccctatgcagggtctggtcgatgacgtgatgcgcgacctgctgacgcgtattggcggctacgacgaatgcgtcagcgaatttgtacgcattacccataccgtgcattcccgatccatatggttaaaatatgtccccgaaatcgccaacggaaacaaaacgttttccggcacgccctgcaccgtccaacttttgggcagcgatgcggacaatatggcggcgaatgcgctggaagccgtccgcttcggtgcgaacaaaatcgatttgaacttcggctgccccgcgcccaccgtcaacaaacacaaaggcggcgcaatccttttaaaagagccggaactgatattccacatcgtcaaaacgctgcgcggacgtttgcccgcacatattccgctcaccgcaaaaatgcggctcggttacgaagacaaaggccgggctttggaatgcgcctgtgcgattgccgaagggggcgcatgcggactgaccgtacacgcgcgtaccaaagccgagggttacgaaccgccggcgcattgggaatggataaggaaaatccgagacagcgtcaatattcccgttaccgccaacggcgacgttttcagcctgcaagactatatcggcatcaaaacaatcagcggctgcaacagcgtgatgctcggtcgcggcgcggtcatccgccccgatttggcgcggcaaatcaagcaatacgagaacggcgggccggtcaaagacacggattttgccgaagtttctaaatggatacggcagtttttcgagctgtgcctgacaaaagaggcaaacaataaatacccgatcgcccgtcttaagcaatggttgggcatgatgaaaaaaacgttcgacccggcgcaaacgctgtttgaccgcgtccgaacggttaaggatgcggatgaagtccgccgaatcctgaacgcatttgagcatgagataaatgtttga

SEQ ID NO: 38824 - DNA, 918 bp, Neisseria meningitidis
atgagcatcatccactacctctcgctgcacgtcgaatccgcccgcaccgcgctcaaagagcttctgcgccaacccttcggcacgctgctcaccctcctgatgctcgccgtcgcgatgaccctgccgctgtttatgtatttgggcattcaaagcgggcaaagcgtgttgggcaaactcaacgagtcgccgcaaatcaccgtctatatggaaaccgccgccgcacaaagcgacagcgataccgtccgcagcctgctggcgcgcgacaaacggatcgccaacgtccgcttcatcggcaaggaagacggcttggcggaattacagtccaacctcgaccaaaatttggtttcgatgctcgacggcaacccgctgcccgacgcatttatcgttacccccgaccccgcgacaacgcccgcgcaaatgcaggcaatctaccgggacattaccaaactgcctatggtcgaatccgcgtctatggataccgaatgggtgcaaacgctgtaccaaatcaacgaatttatccgtaaaattttatggtttctttccctgacgctgggtatggcgttcgtccttgtcgcacacaacaccatccgcctgcaaatcctcagccgcaaagaagaaatcgaaatcaccaaactcttgggcgcgcccgcatcgttcatccgccgccccttcctttatcaggcaatgtggcagagcatcctttccgccgccgtcagcctggggctttgcggttggctgctttccacagtgcgccccttggtcgatgccatcttcaaaccctacgagctcaatatcggctggcgtttcttttatcctgaagaaatcgcgctggtgttcggcttcgtcatcgcgttgggcgtattcggcgcgtggcttgccaccacccagcacctgctcggcttcaaagccaaaaaataa

SEQ ID NO: 38825 - DNA, 2151 bp, Neisseria meningitidis
atgaaaaccccactcctcaagcctctgctcattacctcgcttcccgttttcgccagtgtttttaccgccgcctccatcgtctggcagctaggcgaacccaagctcgccatgcccttcgtactcggcatcatcgccggcggccttgtcgatttggacaaccgcctgaccggacggctgaaaaacatcatcgccaccgtcgccctgttcaccctctcctcgctcacggcacaaagtaccctcggcacagggctgcccttcatcctcgccatgaccctgatgaccttcggctttaccattttaggcgcggtcgggctgaaataccgcaccttcgccttcggcgcactcgccgtcgccacctacaccacacttacctacacccccgaaacctactggctgaccaaccccttcatgattttatgcggcaccgtactgtacagcaccgccatcatcctgttccaaatcatcctgccccaccgccccgtccaagaaagcgtcgccaacgcctacgacgcactcggcggctacctcgaagccaaagccgacttcttcgaccccgatgaggcagcctggataggcaaccgccacatcgacctcgccatgagcaacaccggcgtcatcaccgccttcaaccaatgccgttccgccctgttttaccgtttgcgcggcaaacaccgccacccgcgcaccgccaaaatgctgcgctactacttcgccgcccaagacatccacgaacgcatcagctccgcccacgtcgactaccaagagatgtccgaaaaattcaaaaacaccgacatcatcttccgcatccaccgcctgctcgaaatgcagggacaagcctgccgcaataccgcccaagccctgcgcgcaagcaaagactacgtttacagcaaacgcctcggccgcgccatcgaaggctgccgccaatcgctgcgtctcctttccgacggcaacgacagccccgacatccgccacctgcgccgtcttctcgacaacctcggcagcgtcgaccaacaattccgccaactccagcacaacggcctgcaggcagaaaacgaccgcatgggcgacacccgcatcgccgccctcgaaaccggcagcctcaaaaacacctggcaggcaatccgtccgcagctaaacctcgaatcaggcgtattccgccatgccgtccgcctgtcccttgtcgttgccgccgcctgcaccatcgtcgaagccctcaacctcaacctcggctactggatactactgaccgcccttttcgtctgccaacccaactacaccgccaccaaaagccgcgtccgccagcgcatcgccggcaccgtactcggcgtaatcgtcggctcgctcgtcccctacttcaccccgtctgtcgaaaccaagctttggatcgtcatcgccagtaccaccctctttttcatgacccgcacctacaaatacagtttctccaccttcttcattaccattcaagccctgaccagcctctccctcgcaggtttggacgtatacgccgccatgcccgtacgcatcatcgacaccattatcggcgcatcccttgcctgggcggcagtcagctacctgtggccagactggaaatacctcacgctcgaacgcaccgccgcccttgccgtatgcagcaacggtgcctatctcgaaaaaatcaccgaacgcctcaaaagcggcgaaaccggcgacgacgtcgaataccgcgccacccgccgccgcgcccacgaacacaccgccgccctcagcagcaccctttccgacatgagcagcgaacccgcaaaattcgccgacagcctgcaacccggctttaccctgctcaaaaccggctacgccctgaccggctacatctccgccctcggcgcataccgcagcgaaatgcacgaagaatgcagccccgactttaccgcacagttccacctcgccgccgaacacaccgcccacatcttccaacacctgcccgaaaccgaacccgacgactttcagacggcattggatacactgcgtggcgaactcgacaccctccgcacccacagcagcggaacacaaagccacatcctcctccaacagctccaactcatcgcccgacagctcgaaccctactaccgcgcctaccgccaaattccgcacaggcagccccaaaacgccgcctga

SEQ ID NO: 38826 - DNA, 345 bp, Neisseria meningitidis
atgaacctagaaaattatgaaaacattttaataaaattactttttcatcataacaacttagtaaatgaatattcttattttattgagaataaaaacttatttaaaatagtatctcgaactaaaacgagtaagggcttttttttcactatagaaaaaccattaaattttctaagcaaaaaaacttattttgaatttaattttaaatatttacactcagggaaagaacgctttggttcgtttatgtgctggataaatactaatttaatggaatttgagggagttttttttaacgacccgctccctgataatatgataataaataacttttttgaaataaatgattaa

SEQ ID NO: 38827 - DNA, 189 bp, Neisseria meningitidis
gtgattactaacgatattttggcaattaattaccaaattgctttagcattaatagaaaacaaccatgaaacattaaatgacgatgatgtcgcaatgattttttcaggcagcccgcatgccggttttatgagtcagcgttatgccgaaaaattctattttcacgatgaataccaacaacttgatttgtaa

SEQ ID NO: 38828 - DNA, 216 bp, Neisseria meningitidis
atgaaggcaattcatccgtatgcatgtccgcgctgctgccggctgcctgccaacacgtttcggacaggcatggcaaattccgcttccaaattctgcattgccaaaggcggcagacgggaagtaaaaaaagacgaaagcggcggcggatatgccctgtgccatttgccggacagtaggattgtcgaggagtgggaatatttccgttcacaacattga

SEQ ID NO: 38829 - DNA, 2076 bp, Neisseria meningitidis
atgctgtgcgtgttggcgggcgcggcttacggcgtattcagaacggaagcggcactgtcttcgcaatggcgggcggaggcggtttcaggtgtgccgttgacggtggaagtggcggatatgccgaggtcggacgggcggcgcgtgcagtttgcggcaaaggctgtggacagcggtggtcggacgtttgatttgctgctgtcggactacaaacggcgcgaatgggcggtcgggagcagatggcggataacggcacgtgtgcaccccgtcgtcggcgaattgaacctgcgcggtttgaaccgtgaggcgtgggcattatccaacgggataggcggcgcggggacggtcggtgcggacagggttttgctgcatggcggaagcggttgggggattgcggtttggcgcagccgcatcagccgtaattggcagcaggcggatgcggacggcgggctttcagacggcatcgggctgatgcgcgcgttgagcgtgggcgaacagtcggcattgcgccccgaattgtggcaggcgttccggccgttggggctgacgcatttggtcagtatttcgggtttgcacgttacgatggtggcggtaatgtttgcgtggctggcgaagcggctgcttgcctgttccccgcgccttcctgcccggccgcgcgcgtgggttttggcggcggggtgtgcaggcgcgctgttttacgcgctgcttgccggtttttccgtgccgacgcagcgcagcgttttgatgttggcggcgtttgcgtgggcttggcgcaggggaagattgtcggcgtgggcgacgtggtggcaggcgttggcggcggtgctgctgttcgacccgtcggcggtcttgggtgtggggacttggctgtctttcggtttggtggcggccctgatatgggcgtgttcggggcgtttgcacgaagggaaacggcaaaccgccgtgcgcgggcagtgggcggcttcggtgttgtcgctggttttgctcggttatctgtttgcttcgctgcctttaatcagccctttggtcaatgcggtggcgattccgtggttttcttgggtattgacgccgctggcgttgctgggttcggtcgtgccgtttgcgcctttgcaacagttgggggcatttttggcggaatatactttgcggtttttggtgtggcttgccgatgtgtcgcccgagtttgccgttgccgccgcacctttgccgctgttggtgttggcggtgtgtgccgctttgctgttgctgctgccgcgcggcttgggtttgcgtccgtgggcggtgttgctgttggcagggtttgtgttttaccgttcacccggcgtgccggaaaatgaggttgcggttacggtttgggatgcggggcagggtttgtcggtgtcggttcagacggcaaatcatcatcttttgtttgacaccggaacggcagcggcggcgcagatggggattgtgccgagtttgaatgcggcgggtgtccgccgtttggacaagctggttctgtcgcatcacgacagcgaccacgacggcggttttcaggcagtcggcaagataccgaacggcgggatttatgccgggcagccggaattttatgagggggcgcggcattgtgcggaacagcgttggcaatgggacggcgtggattttgagtttttgatgccgtctgaacgcaaaaacatcgatgataatgggaaaagttgtgttttgcgtgttgtggcgggcggtgcggcactgctggtaacgggcgatttggatacgaagggcgaggaaagcctggtcggcaagtatggaggcaacctgtacagccaggttttggttttgggacatcacggcagcaatacgtcctcgtcgggcgtgttcctcaatgccgtctcgcccgaatatgccgttgcttcaagcggttatgccaacgcctacaaacatccgaccgaagcggtgcaaaaccgtatccgtgcacacggcatcaaattgttgcgtaccgatttgtcgggcgcgctgcaattcggcttggggcgcggcggcgtgaaggctcaacgtttgagagggtataaattctattggcagaaaaaaccgtttgaatga

SEQ ID NO: 38830 - DNA, 759 bp, Neisseria meningitidis
atgaaaatcacacccgtcaaagccctaaccgacaactacatctggatgatacagcacggcaaccatgccgtctgcgtcgacccttccgaaccctcgcccgtcttggaattcctcgtccgcaaccgcctcatgcttgcccaaacatgggtaacgcacccccaccccgaccacgagggcggtgcggcggcactctggcgcggctacatggaatcgcccgtttacggcgaatccgacatcgaagcagcaacccacaccgtaaccgccggcacccaattcaccttcggcgacggacaggttaccgtttgggcaacacccggccacacagaccgccacaccagctaccttctcgaaacttcagacggcatacacgtcttttgcggcgacaccctgttttccgccggctgcggacgcgtgtttaccggcacaatcgaacagctttacgacagcttccaacgcttcaaccgcctgcctgaaaacaccctgttctacccggcacacgaatacaccgccgccaacctggattttgccgcccatatcgagccggacaacgccgacattcagacggcactgaaagcggcggcgcatacgcctaccctgcccgttaccctcgcgcgcgaacgccgcgtcaacccgtttttgcgcgtcgacctgccgcacgtcagagaccgcgccgaggcattgagcgggaaaacgttaaacagcagcctcgatacctttgtcgcgctgcgtgaacttaaaaaccaataccggacgaaataa

SEQ ID NO: 38831 - DNA, 1188 bp, Neisseria meningitidis; identical to SEQ ID NO: 38210

SEQ ID NO: 38832 - DNA, 1479 bp, Neisseria meningitidis
atgaaatacaaagacctgcgcgacttcatcgccatgctcgagcagcagggcaaactcaaacgcatcgcgcaccccgtttccccgcatttggaaatgaccgaaatcgccgaccgcgtgctgcgcgccgaagggtcggcattgttgtttgagaatccgattaagcctgacggtacgcgctacggttatcctgtgttggcaaacctgttcggcacgcccgaacgtgtggcgatgggcatgggcgcggacagcgtgtccaagctgcgtgaaatcgggcagacgctggcgtatttgaaagaacccgaaccgcccaaaggcatcaaagatgcgttttccaaactgccgctactgaaagacatttggagcatggcgccgaacgtggtgaaaaacgcgccgtgtcaggaaatcgtgtgggaaggcgaagacgttgatttgtatcaacttccgattcagcattgctggccggaagacgttgcgccgctggtgacgtggggcttgaccgtaacgcgcgggccgcacaaaaaacgccaaaacttaggcatttaccgccaacaattaatcggcaaaaacaaactgattatgcgctggctgtcgcatcgcggcggcgcgttggattatcaggaattccgcaaactcaatcccgatacgccgtatcccgtcgccgtcgtgctcggctgcgaccctgccaccattttgggcgcggtaacgcctgttcccgataccttgagcgaataccagtttgccggactgctgcgcggttcgcggacggaactggtgaaatgtatcggcaacgatttgcaagtgcccgcacgtgccgaaatcgtactggaaggcgtcattcatccgaacgaaaccgcgttggaaggcccatacggcgaccacacgggctattacaacgagcaggatcatttccctgtgttcacggtcgaacgcattaccatgcgcgaaaacccgatttaccattcgacctacacaggcaaaccgcccgatgaacccgctgttttgggcgtggcgttgaacgaagtgttcgtaccgcttttacaaaagcagttccccgaaatcaccgatttctacctgccgcccgaaggctgctcctaccgcatggcggtggtgagcatgaaaaaacagtacgccggacacgccaagcgcgtgatgatgggctgctggtcgttcctgcgccagtttatgtataccaaattcatcatcgtggtggatgacgatgtgaacgtgcgcgactggaaagaagtcatctgggcggtaaccacgcgcatggaccccgtgcgcgacactgttttggtagaaaacacgcccatcgattatctcgacttcgccagccccgtcagcggactcggcggcaaaatgggtttggatgcgaccaacaaatggccgggcgaaaccgaccgcgagtgggggcgcgtcatcaaaaaagaccctgcggttacggctaagattgatgagatttggtgggaattggggttgtag

SEQ ID NO: 38833 - DNA, 1518 bp, Neisseria meningitidis
atgtctcctaaaaaaatacccatttggcttaccggcctcatcctactgattgccctaccgcttaccctgccttttttatatgtcgctatgcgttcgtggcaggtcggcatcaaccgcgccgtcgaactgttgttccgcccgcgtatgtgggatttgctctccaacaccttgacgatgatggcgggcgttaccctgatttccattgttttgggcattgcctgcgcccttttgttccaacgttaccgcttcttcggcaaaaccttttttcagacggcaatcaccctgcctttgtgcatccccgcatttgtcagctgtttcacctggatcagcctgaccttccgtgtcgaaggcttttgggggacagtgatgattatgagcctgtcctcgttcccgctcgcctacctgcccgtcgaggcggcactcaaacgcatcagcctgtcttacgaagaagtcagcctatccttgggcaaaagccgcctgcaaacctttttttccgccatcctcccccagctcaaacccgccatcggcagcagcgtgttactgattgccctgcatatgttggtcgaatttggcgcggtatccattttgaactaccccacttttaccaccgccattttccaagaatacgaaatgtcctacaacaacaataccgccgccctgctttccgctgttttaatggcggtgtgcggcatcgtcgtatttggagaaagcatatttcgcggcaaagccaagatttaccacagcggcaaaggcgttgcccgtccttatcccgtcaaaaccctcaaactgcccggtcagattggcgcgattgtttttttaagcagcttgttgactttgggcattattatcccctttggcgtattgatacattggatgatggtcggcacttccggcacattcgcgctcgtatccgtatttgatgcctttatccgttccttaagcgtatcggctttaggtgcgattttgactatattatgtgccttgccccttgtttgggcatcggttcgctatcgcaattttttaaccgtttggatagacaggctgccgtttttactgcacgccgtccccggtttggttatcgccctatccttggtttatttcagcatcaactacacccctgccgtttaccaaacctttatcgtcgtcatccttgcctatttcatgctttacctgccgatggcgcaaaccaccctgaggacttccttggaacaactcccaaaagggatggaacaggtcggcgcaacattggggcgcggacacttctttattttcaggacgttggtactgccgtccatcctgcccggcattaccgccgcattcgcactcgtcttcctcaaactgatgaaagagctgaccgccaccctgctgctgaccaccgacgatgtccacacactctccaccgccgtttgggaatacacatcagacgcacaatacgccgccgccaccccttacgcgctgatgctggtattattttccggcatccccgtattcctgctgaagaaatacgccttcaaataa

SEQ ID NO: 38834 - DNA, 231 bp, Neisseria meningitidis
atggctcgtcaatcattcaaacgtagaaaattctgccgtttcacggctgaaaaaatccaagaagtcgattacaaacaagttgatttgctgaaagactttatctctgaaaacggtaaaatcattcctgcacgcatcacaggaacgaaggcattctaccaacgccaattggctgttgccgtaaaacgcgcacgcttcctggctctgctgccttacaccgaccaacacaaataa

SEQ ID NO: 38835 - DNA, 1464 bp, Neisseria meningitidis
atgaaagaaacagcttttaaaactgggatgtgtttaggttccaataatttgagcaggctacaaaaagccgcgcaacagatactgattgtgcgtggctacctcacttcccaagctattatccaaccacagaatatggattcgggaattctgaaattacgggtatcagcaggcgaaataggggatatccgctatgaagaaaaacgggatgggaagtctgccgagggcagtattagtgcattcaataacaaatttcccttatataggaacaaaattctcaatcttcgcgatgtagagcagggcttggaaaacctgcgtcgtttgtcgagtgttaaaacagatattcagattataccgtccgaagaagaaggcaaaagcgatttacagatcaaatggcagcagaataaacccatacggttcagtatcggtatagatgatgcgggcggcaaaacgaccggcaaatatcaaggaaatgtcgctttatcgttcgataaccctttgggcttaagcgatttgttttatgtttcatatggacgcggtttggcgcacaaaacggacttgactgatgccaccggtacggaaactgcaagcggatccagaagttacagcgtgcattattcggtgcccgtaaaaaaatggctgttttcttttaatcacaatggacatcgttaccacgaagcaaccgaaggctattccgtcaattacgattacaacggcaaacaatatcagagcagcctggccgccgagcgcatgctttggcgtaacagacttcataaaacttcagtcggaatgaaattatggacacgccaaacctataaatacatcgacgatgccgaaatcgaagtgcaacgccgccgctctgcaggctgggaagccgaattgcgccaccgtgcttacctcaaccgttggcagcttgacggcaagttgtcttacaaacgcgggaccggcatgcgccaaagtatgcctgcaccggaagaaaacggcggcgatattcttccaggtacatctcgtatgaaaatcattactgccggtttggacgcagccgccccatttattttaggcaaacagcagtttttctacgcaaccgccattcaagctcaatggaacaaaacgccgttggttgcccaagataaattgtcaatcggcagccgctacaccgttcgcggatttgatggggagcagagtcttttcggagagcgaggtttctactggcagaatactttaacttggtattttcatccgaaccatcagttctatctcggtgcggactatggccgcgtatctggcgaaagtgcacaatatgtatcgggcaagcagctgatgggtgcagtggtcggcttcagaggagggcataaagtaggcggtatgtttgcttatgatctgtttgccggcaagccgcttcataaacccaaaggctttcagacgaccaacaccgtttacggcttcaacttgaattacagtttctaa

SEQ ID NO: 38836 - DNA, 441 bp, Neisseria meningitidis
ttggacaaacaaatcgacgaccacacccacacgcattttgacggcaaagcccaagtggcggagcaaatcaaaggcatcggttcgataacgacggctacgctgatggcgatgctgcccgaattggggcggctgtcgcacaaacggatagcgagtttggccggcattgccccgcacccgagggagagcggggaaaccaaattcaaaagccgctgctttggcggaaagtctgcggtacgtaaggcgctgtatatggctaccgtggcagcgacacgttttgaaccgcttattcgggatttctaccaacgcctgctgtccgagggtaagccgtataaggttgccgttacggcatgtatgcgcaaactgctggagacctttgcaaaattcctttccctcccgacagccgaaacccaaacacaggttttcgtctattttcgctcctaa

SEQ ID NO: 38837 - DNA, 789 bp, Neisseria meningitidis
atgaaacaagctatgaaaaattggtttgctgccttgctgttggcagtacccatgggtgcggcatttgcttcgggcggtcatgcacactatgagaaagtcgatatcgatttgcgcgaccaagtcagcctgcagcgcggcgcacaaatctttaccaactattgcctgtcctgccactcggcaagcggtatgcgtttcaaccgtttgaaagacatcggtttgactgacgaagaaatcaagaaaaacctgatgtttaccaccgataatgtcggcgatgtcatgcattcggcgatgaacccgaaagatgcggcaaaatggtttggtgctgctccgcccgatttgacgttgattgcgcgttccaaaggtgcagactacctttacgcctatatgcgcggcttctataaagatccgacccgtccgagcggctggaacaatactgtattcgataaagtcggtatgccccacccgttgtgggaacagcaaggcgttcaagccgttgagttggatgccaaaggtcagccggttatggtaaaagacgaacacggcgagatgaagcctaagctgtattgggaatctaccggtttgcacagccgccgtctgcctaacggcaaagtgatccaaaaagagtacgacgcatatgtacgcgatttggtcaattaccttgtgtacatgggcgaacctgcacaactgcaacgcaaacgtataggctatgtcgtgatgattttcctatttgcggttatgctgcctttggcgtatttcctgaaaaaagaatattggaaagacgtacactaa

SEQ ID NO: 38838 - DNA, 300 bp, Neisseria meningitidis
atgaaaatatttgaaaatatagaagatgttaaagccatccgtaaaaagaccgggctgaaccagatagacttctggggcaaggtcggcgttacccagtctggaggctcgcgctacgaaaccggccgcaaaatgcccaaacccgtacgcgaactgctccgcctcgtccatatcgaatgcatcgatttggcgaaagtcaacaaaaaagatatggaaatcgccgccctgttgaaaaaacaccatcccgacctgtatgccgagttgtccaaacagaccaagtccgaaagaaaaaaacaaagttaa

SEQ ID NO: 38839 - DNA, 363 bp, Neisseria meningitidis
atgaaccaactcgaccaacttggcacccgtatcaacctgatttgcaatgtcttcgacaaatggatcgggcagcaggatctgaattacaacctctttgccgtactttataccctggcaaccgaaggcagccgcacgcaaaagcatatcggcgaaaagtggagcctgcccaaacagaccgtttcaggcgtatgcaaaacccttgccggacaagggttgattgaatggcaggaaagcgaacaggaccggcgcgaacggttgctgtcgctgaccgaaaaaggcaaagcccatgccgcacctttaacagaaagcgcgcaggaattcagcgacaaagagacctttgcaaaattccccaaaatcccctaa

SEQ ID NO: 38840 - DNA, 591 bp, Neisseria meningitidis
atgggtttggaactgcctttgattttgggtacgagttcggttttccgccgcgaacagatggaaaggctcggcattgcctttcaggcggcgtcccccgattttgacgaaacgccgatgttgggggaatccgcccctcagacggcattgcgccttgccgagggtaaggcgcggtcgttgaccgggcgtttcccagaggcgttgattgtcggtgcggaccaggtggcgtggtgcgacggcaggcagtggggcaagccgatgaaccttgccaatgcgcaaaagatgctgatgcacttgagcggcagggagattgagttttacagcgcgatcgtgctgttgaatacggttacgggcaggatgcggcggcatatcgataagacggtggtcgtgatgaggcagttggacgagttgcatatcctccgctatttggagcgcgagcctgatgcggtttattgttcgtgtgcgctgaagagtgaggatttgggtgcattgctgattgaaaggattgagagtaccgatccgaatgctttaatcggtttgccggttttccgtctggtcgatttcttgaaaaatgagggcgtggaggttctgtaa

SEQ ID NO: 38841 - DNA, 582 bp, Neisseria meningitidis
atgaacctgcgcgatgatttgcaactgatttacgaccggatacccgaaggcagccgcgtcttggacttgggctgcggcgacggcgaactgcttgccgcattggtcgaacacaaaaaatgcagcggctacggcatcgaaatcgacaccgacagcgtgattgccgcgatgtcgcgcggcgtgaatgttatccaagccgatttggaagaaggtttaaccgcattcaacgatcaaagttttgatgtgattgtgttgagccaaaccatccaagcgatgcagaataccgaaaaaatcctgcgctgcctgatgcgcgttgccaaacaggcgattgtcagcttcccgaatttcggctactggcgcaaccgcgtccaaatcgcactcggcggacatatgccggtttccgaacgtatgccctaccattggtacgacacgcccaatatccattggtgcacgctcaaagactttgatttgttgtgcgccaaaaacaacatccgcgtcctcgaacgcgccgtgatgacgggcaacagacaggtcaaacatttccccaaccttttgggcagccttgcgttttaccgcgtcggctaa

SEQ ID NO: 38842 - DNA, 1059 bp, Neisseria meningitidis; identical to SEQ ID NO: 37985

SEQ ID NO: 38843 - DNA, 1770 bp, Neisseria meningitidis
atgaccgtacagaccaagacaaaaggtttggcgtggcaagaaaaaccgctatccgacaacgaacgtctgaaaaccgaaagcaattttttacgcggcacgattttggacgatttgaaagacccgctcacgggcggcttcaaaggcgacaacttccaactcatccgcttccacggtatgtatgagcaggacgaccgcgacatccgcgccgaacgcgccgaggcaaaactcgagcctttgaaatttatgcttttgcgctgccggctgccgggcgggatcatcaaaccgtcccaatggatagaactggacaaatttgcccgggaaaacagtcattaccgctccatccggctgaccaaccggcaaaccttccaatttcacggcgtgccgaaagccaagttgcagacgatgcaccgcctcttgcacaaactgggtttggattccatcgccacggcggcggatatgaaccgcaacgtgctttgcacgtccaacccgatcgagtccgaactgcaccggcaggcttacgaatacgcgaaaaagatttccgaacacttgctgccgcgcacgcgcggttatctggatgtgtgggtggacggcaaaaaagttcaaagttctgacgacttccttcaagaagacgagccgattttgggcaaaacctatctgccgcgcaaattcaaaaccgcagtcgtcatcccgcccttaaatgatgtggactgctacggcaacgacttggattttgtcgccatttcagacggcaacggacagcttgccggattcaatgttttggcgggcggcgggctttcgatggaacacggcaacaccaaaacctatccgaacatttcactggaactgggtttcgtgcctccggaacacgcgctgaaggccgccgaagcggtggtaaccacacagcgcgacttcggcaaccgcagcgaccgcaaaaacgcccgcacccgctacaccattcaaaatctgggcttggacaacttccgcgcggaagtcgaacgccgtatgggtatgccgttcgaacccatacgcccgttcaaatttaccgggcgcggcgaccgcatcggctgggtgaaaggcatagacggcaactggcatttgacccttttcatcgaaagcgggcgtttggttgacgaaggcgggaaacagcttctgaccggcgtgttggaaatcgccaaaatccacaaaggcgacttccgcatcaccgccaaccaaaacctcatcgtggcaaatgtcgccgaagcagacaaagcaaaaatcgaagaacttgcccgaacatacggattaatccgcaacgatgtcagcaagctgcgcgaaaatgcgatgtcctgcgtttcctttccgacctgccccttggcaatggcggaagccgaacgcgtgctgccagacttcatcgacgatctggataagattatggcgaaacacggcacgtcggacgactatatcgttacccgcattaccggctgccccaacggctgcggacgggcaatgttggcggaaatcgggctggtcggcaaagccgtcggacgctacaacctccatatcggcggcgaccgtgaaggcgtacgcatcccccgcctttacaaagaaaacatcaccctgcccgaaatccttgccgaattggacgacctgatcggcaaatgggcggcagaacgcaatatcggcgaaggtttcggcgatttcgccatacggacgggcatcgtcaaacccgtattaaatgcccccgttgatttttgggacgcatccaaagccgtcgcgattgcccgcgcctga

SEQ ID NO: 38844 - DNA, 504 bp, Neisseria meningitidis
atgtcagacgaattcaaccgatttatcgaacgcgtcctctcccacgagggcggttacgtcaaccaccctcaagaccccggcggcgaaaccaattggggcatcactaagcgcaccgcccaggcaaacggctacaacggctccatgcgtgccatgacgcgtgaacaggctatcggcatttaccgaaaggcgttttgggagcgttaccgcgccgaccaaatgccggaagcggtcgcgttccaattttttgatgcctgcgtcaaccacggttacggcaatgccgcccgtatgctccaacgcgccgcaggcgtgccggacgatggaatcatcggcgaaatcagcctcaaagccatcaattccctccccgaaaacgaccttttattgcggttcaacgccgagcgtctggtcttttataccaagctgggtacgttcacctctttcggcaagggctgggtacgccgtgtggcgcaaaacctgattcacgcgtctgcagataacactgattaa

SEQ ID NO: 38845 - DNA, 2274 bp, Neisseria meningitidis
atgaacattactcaaattctttcccaagaactttccgcgactaccgcgcaaatcaatgccgctattgagcttttagacgacggcgcaaccgtgccgtttatcgcgcgttaccgtaaagaagccaccggcgggctggacgacacgcagctgcgccggcttgccgagcggctgcaatacctgcgcgagttggaagagcgcaaagccgttgtgttaaaaagcattgaagagcaaggcaaactttcagacggcctccgcgcgcaaatcgaagccgccgacaacaaaaccgcgctggaagacctgtatctgccctacaaacccaaacgccgcaccaaagcgcaaatcgcgcgcgaacacggtttgcagccgctggcggacgtgttgcttgccgagcagtcgcaggacgtggaagccgccgcacaaggctacctgaacgaaaacgtccccgatgccaaagccgcgttggacggcgcgcgtgcgattctgatggagcagtttgccgaagacgcggaactcatcggcacgctgcgcgacaagctgtggaacgaagccgaaatccacgcgcaagttgttggaggcaaagaaaccgaaggcgaaaaattcagcgattattttgaccaccgcgaacctattcgtgcgatgcccagccatcgtgcgctagcggttttgcgcggacgcaacgaaggcgtgttgaacatcgcgctcaaatatcagcccgacgacacgccgattacgcagcaaagcgaatacgagcaaatcatcgcccgccgcttcaaagtttcagacggccacaaatggctgcgcgacaccgtgcgcctgacttggcgcgcgaaaatctttttgtcgttggaacttgaagctctcaatcgtttgaaagaagccgccgacaccgacgcgattaccgtgttcgcccgcaatctcaaagacttgctgcttgctgcgcccgccggacggctgaccacgctgggtctcgaccccggctaccgcaacggcgtgaaatgcgccgtggtggacgacaccggcaagctgctggataccgtcatcgtctatttgcatcaagaaaacaatatgttggcaacgctgtcgcgcctgattaaacagcacggcgtgaagctcatcgccatcggtaacggcaccgccagccgtgaaaccgacaaaatcgcgggcgaactggtgcgtgaaatgtcgaaaatggggctgcataaaatcgtcgtgtccgaagccggcgcgtcgatttattccgcgtccgaactggcagcgcgcgagttccccgacttggacgtttccctgcgcggcgcggtgtccatcgcccgcaggctgcaagacccgcttgccgagctggtcaaaatcgaccccaaatccatcggcgtgggccagtatcagcacgacgtgaaccaaagccggctcgccaaatcgctggacgcggtggtcgaagactgcgtgaacgccgtcggcgtggacgtgaataccgcctccgccccgctcttggcgcggatttctggtttgaatcaaactcttgcccaaaacatcgtcgcctaccgcgatgaaaacggcgcgttcgacagccgcaaaaaattgctgaaagtgccgcgtttgggcgaaaaaaccttcgagcaggcggcaggctttttgcggattaacggcggtaaagagccgttggacgcgagcgccgtccaccccgaagcctatcccgtcgtcgccaaaatgctggcgcaacaaggcattagcgccgccgaactcatcggcaaccgcgagcgcgtgaagcaaatcaaagtgtccgacttcaccgacgaacgcttcggcctgccgaccattttggacatcctgtccgaactggaaaaacccggccgtgatccgcgcggcgagtttcagacggcatcgtttgccgaaggtatccacgaaatcagcgacttgcaagtcggtatgatactcgaaggcgtggtttccaacgtcgccaacttcggcgcgttcgtggacatcggcgtccatcaggacggcttggtgcacatctccgccctgtccaacaagttcgtccaagacccgcgcgaagtggtgaaagctggcgacgtggtgaaagtgaaagtgctggaagtcgatgctgcacgcaaacgcatcgcgctgaccatgcgcttggatgacgaaccgggcggcgcaaaacataaaatgccgtctgaaaaccgcagccgcgaacggacagccggccgcaaaccccaacgcaacgaccgcgccccagccaattcggcgatggcggatgcgtttgcgaagctgaagcggtaa

SEQ ID NO: 38846 - DNA, 201 bp, Neisseria meningitidis; identical to SEQ ID NO: 37363

SEQ ID NO: 38847 - DNA, 675 bp, Neisseria meningitidis
atgtggaaagaaattttactgaattacggtattttcctgctcgaactgcttaccgtgttcggcgcaattgcgctgattgtgttggctatcgtacagagtaagaaacagtcggaaagcggcagtgtcgtactgacggatttttcggaaaattataaaaaacagcggcaatcgtttgaagcattctttttaagcggggaagaggcaaaacatcaggaaaaagaggaaaagaaaaaggaaaaggcggaagccaaagcagagaaaaagcgtttgaaggagggtggggagaaatcttccgaaacgcaaaaatcccgcctttttgtgttggattttgacggcgatttgtatgcacacgccgtagaatccttgcgtcatgagattacggcggtgcttttgattgccaagcctgaagatgaggttctgcttagattggaaagtccgggcggcgtggttcacggttacggtttggcggcttcgcagcttaggcgtttgcgcgaacgcaatattccgctgatcgtcgccgtcgataaagtggcggcgagcggtggttatatgatggcgtgtgtggcggataaaattgtttccgctccgtttgcgattgtcggttcggtgggtgttgtagcggaagtaccgaatatccaccgcctgttgaaaaacatgatattgatgtggatgtga

SEQ ID NO: 38848 - DNA, 1140 bp, Neisseria meningitidis
atgaaaaaaacactggcggcggcggcaatcctgagcctcgccttgactgcgtgcggcggcggaagcgataccgccgcccaaaccccctccgccaagcccgaagccggacaatcgggcaaactcaatatctacaactggtcggattatgtcgatcccgaaaccgtcgccgcctttgaaaaagaaaccggcatcaagacgcgttccgattattacgacagcaacgaaacactggaggcaaaagtcctgaccggcaaatccggctacgacctgaccgcgccgtccatcgccaacgtcggccggcaaatcaaagcgggtgcgtatcagaaaatcgacaaggcgcaaatcccccattacggcaacatcgataaagatttgctgaaaatgatggaagccgtcgatccgggcaacgaatatgccgtgccttatttctggggaatcaatactttggcaatcaatacccagcaggtgaaaaaggcattgggtacggacaagctacccgaaaacgagtgggatttggtgttcaaacccgaatacaccgccaaactcaaatcctgcggcatcagctatttcgacagcgcaatcgaacagattcccttggcgttgcactatttgggcaaagaccccaacagtgaaaatcctgaagacatcaaagccgccgtcgatatgatgaaagccgtccggggcgacgtgaaacgcttcagctcttccggctatatcgacgatatggcggcgggcaacctgtgtgccgccattggttacggcggcgatttgaacattgccaaaacccgtgccgaagaagccgcaaacggcgtggaaatcaaagtattgaccccgaaaaccggcgtgggcgtgtgggtggattcctttatgattccgcgcgacgcgcaaaacgttgccaacgcccaccgctatatcgactacacgctccggcccgaggtggcggcgaaaaacggcagcttcgtcacctacgcgcccgccagccgccccgcgcgtgatttgatggaagccaaatacacaaacgacccatcgattttcccgaccaaagaactgatggaaaaaagtttcatcgtatcgcccaaatccgcagaatccgccaaactgggcgtgaagctgtggcaagggctcaaggccggaaaataa

SEQ ID NO: 38849 - DNA, 711 bp, Neisseria meningitidis
atgaatgcagccatcgaacacgtccaagccgtcgccttcgatttggacggcacactgtgcgattccgtccccgaccttgccgccgccgcagaagcgatgttggaacaactcggtatgaaaccgctgcccgccaaagtggtcgaaagctatgtgggcgacggcatcggcaaactggttcaccgcgtcctctccaacgaccgcgaccgcgaagccgattccgaactgtgggaaaaaggtttcgtatcctatatgaaatactaccgcgaccatttgagcgtcttcacccgcccctatcccgaaaccgcaaccgggctggcattgctcaaatctttgggcatcccgctggcagtcattaccaataaaaacgaaatccttgccgtcgaactgttgaaacagctcggacttgccgactacttcagcctgatactcggcggcgacagcctgcccgagaaaaaacccagccccctgccgctgcggcacgccgccgaagttttgggtatcgatgttgcaaacatggttatggtcggcgactcgcgcaacgacatcatcgccgccaaagccgccggctgcctgagcgtcggcgttaccttcggttacggcgatatgacgctgctctcgcaagacgatgcgacccgccccgactggattatcggctcgctgcccgaaatttacgaaaacctgcaaccgcagaaaaataaagacgaagaataa

SEQ ID NO: 38850 - DNA, 792 bp, Neisseria meningitidis
atggcaagacatccctaccgccgcctgcgtcctgcaaaatccggctttcccgaagtcggcatttccgaagaaggcaatatccgttcgcttcacttgggcagcgacaccatccaaagctcaatgaacctcgaccacccgtccgagctggtactctcttacagccgcgcgatgatgggctggctgctgtttaccgacgcacttccgcagcatatcacccaaatcggcttgggcggcggttcgtttgcacgctggatagatacctacctgcccgatacgcgtcaaaccgccgtggacatcaacccgcaggtcatcgccattgcccgcaacctgttcgagttgcctttcgagggcgagaaatttgaaattatcgaagcagacggtgcagaatatatcaaaatcttccgccacaacaccgatgtgattttggtggacgggttcgacggcgaacaaatcatcgatgcgctggttgaagaaccgtttttccgagactgccgaaacgcactctcttcagacggcatattcgtaaccaactggtggagcggcgacaaacgctaccaacgcttcatcgaacgcctgttaaacgtctttgaagggcgcgtcttggaacttcctgccgaaagtcacggcaatgtcgcggtaatggccttccaaagcagccccaaagagcaaaacatagacaaactcaagaaacgcgccgacaaactgagcaacgcatacggattggacttccaccgtatgcttgccggcctgaaagcgtccaaccccaacaacggcaagcatttccacctttaa

SEQ ID NO: 38851 - DNA, 1041 bp, Neisseria meningitidis
atggatatttcagattttgattttaccctgcccgaaaagctgattgcccagcatccgcccgaagtgcgcggcagcagccgccttttggttgcgttgcccgatatgccgctgcaagaccgggtgttcggcgatttgccggattatgtcgaggcgggcgacgttttggtgttcaacaacaccaaagtcatgaaggcgcggctgtttgggcagaaagacagcggcggcaggatcgaagccctgattgagcgcgtgttggacaaccataccgcactggcgcacatccgttcgtccaaatcgcccaagcccggtatggggctggtgtttgaaggcggcatccgcgccgtgacggtcgggcgtgagggcgaactgttctgcctgcgttttgaaggcggtcaaaccgtttacgaacttttggaacagaacggacacctgcccctgccgccttatatcgaacgcgccgccgatgcggatgacgacagccgttatcaaaccgtttatgccaaatatcagggcgcggtcgccgcgccgacggcgggcctgcattttacggaagaacttttgcgccgcctgaaagacaaaggcgcagtaaccgcagaagtaaccctacacgtcggtgcggggacattccaacccgtgcgtgtggataaaatcgaagagcataaaatgcacagcgaatggtttgaagtgccgtctgaaaccgccgccgccgttgaggcggcaaaagcccgggggaacaaagtctgggcagtcggcacgacttccatgcgcgccctcgaatctgccgcgcgtgcgacgggtcgtctgaaagcggggcagggcgacaccgatattttcatcacgccgggctaccgttttaatgttgtcgacaggctggttaccaattttcatttgccgaaatcgacgctgctgatgcttgtcagcgcgttttcgggtatgggtcatatccgcgccgcgtatcgttatgcggtcgaacgcgaataccgtttcttcagctacggcgatgcgatggttttggggtggaacgaaggggtggtacgttag

SEQ ID NO: 38852 - DNA, 936 bp, Neisseria meningitidis
atggggcacaatatgatgaccacccaaaaatggtatgagcatattactaatgtaatcataggcaatactgctaatttcaatagcggttgccctgaagctatagattatgtagatgaaagaaaaggcgttccgcttgcagcgatgagacatattttaatgtatactgaagctgcggcttcccatgcctatctatttgaacatgatcttaataaattcaagcaatatgcttatgttgcaggaaagctgggtattttgcggagtgtaaattctacagaccctgaacccttcttctttccctgtgacatgctcaacattcaaaatccgatgtttctgatgctgatgagcgacagcccacagctgcgcgagtttctggtgcgcaatatcgacaacatcgccaacgatacagaagcctttataaaccgctacgacctcaaccgtcatatgatttacaatactctgctgatggtggagggtaagcagcttgatcggttgaaacaacgtagcgagaaagtcttggcgcatcccacccctagcaaatggctgcaaaagcggttgtacgattaccgcttcttcctcgctttcgccgaacaggatgccgaggcgatgaaggccgccttagagccgcttttcgataaaaaaaccgcgcgtatggctgccaaagaaacattgtcctatttcgatttctacctgcagccgcaaatcgttacctacgccaaaatcgcatccatgcacggtttcgatttgggcatagatcaagaaatcgcaccgagggatttgattgtttacgatccgctgccggcagacgaatatcaagacatcttcgattttatgaaacagtatgacttgtcttacccgtatgaatatctgcaggattggatagattactatacgttcaaaaccgataagctggtatttggtaacgcgaagcgagagtga

SEQ ID NO: 38853 - DNA, 1266 bp, Neisseria meningitidis
  misc_feature 6, 7, 8, 9, 10: 'n' is a, c, g or t
gtgtgnnnnngtggtaaataccatctgttcggtgatggtcgcggcagtgttaaaatcgggttacgccgtccaaacattgatgcaactgcggtcggccccatactgcctattacacacgaacggacaggatttgaaggtgttatcggctatgaaacccatttttcagggcacggacatgaagtacacagtccgttcgatcatcatgattcaaaaagcacttctgatttcagcggcggtgtagacggtggttttactgtttaccaacttcatcggacagggtcggaaatccatccggaggatggatatgacggaccgcaaggcagcgattatccgccccccggaggagcaagggatatatacagctattatgtcaaaggaacttcaacaaaaacaaagactaatattgtccctcaagccccattttcagaccgttggctaaaagaaaatgccggtgccgcctctggttttttcagccgtgcggatgaagcaggaaaactgatatgggaaagcgaccccaataaaaattggtgggctaaccgtatggatgatgttcgcggcatcgtccaaggtgcggttaatccttttttaatgggttttcagggattgggagttggggcaattacagacagtgcggtaaacccggtaacctatgcggcagcacggaaaactttacagggtattcacaatttaggaaatttaagtccggaagcacaacttgcggctgcaaccgcattacaagacagtgcttttgcggtaaaagacggtatcaactctgccaaacaatgggctgatgcccatccgaacattacagctactgcccaaaccgcccttgccatagcagaggccgcaactacggtttggggcggtaaaaaagtaaaccttaacccgaccaagtgggattgggttaaaaataccggctataaaacacctgctgcccgacctatgcagactgtagatggggaaatggccggtgggaataaaccgcctaaatctaatacttctacactactaacagaattcaatcaaaatgatattaaccatgtctttcagaaaaaacatgaatttgactcgttcttaaaaaattatacttcaaaagctgatgcatactcagccatacaaaatgtagcaaataatactttaaactcatcaacttatcaaaaaggaacatgggtaaccatccaagttgatggggtacctgtatcagtgaagggaaattttgttgatggtaaatttcgcattggtacagcaacaatgaaatcattttaa

SEQ ID NO: 38854 - DNA, 993 bp, Neisseria meningitidis
atgcaatccgccggtattcaggttttagccgggatagattacgaacccagctgcaaagaaacatatgaagccaatataaatgccaaatttatacaggctgatgtttttgaattgcagcctgaaaccttggaaaaagaactcgggttaaaaaagaatgatgatgatttgattcttataggttgtagtccttgtcaatattggagtgttattcaaacagacaaaagaaaatcggaaaaatccaagagtttgcttttggagtttcagcggtttgtagaatatttcaatcccggatatgttgttgtagagaacgtaccgggaattctgagcagaatgaaagaaagcaggcttgataatttcataaagttattggaagaaaaaggatttaccgtccatttcggtattcacaatacggctgattacggaattccccaaagccgtaaaagatttacgttaattgcaaacagaataaccaaagaaaagctggaaccagtcaagtattcgggcaaacggcttacggtacgcgatgttttgggaatggaaaatggctttcccaaaattattgcaggacaccaagacgaaacggattttatgcatagctgtgcgggattatctgatatcaacttgaaacgattggctttgatacctaaaaacggaggaaaccgtttggcttttgcgcatattcccgaattacagctggaatgttttatcggaaaagacaatagttttaaagacacgtttggtaggctatggtgggataagcccgcacctaccataacgaccaaattctttagtatttccaacgggaggtttgcccatcctgaagaagatagggcgttatcactgcgcgaaggtgcaacattgcaatcgttccctcgtaactatgtctttaaagcgggcagcagggacaagatagcccgtttgattggtaatgccgttcctccgatgtatgcggaaaaaataggcagggcaattgttgataatatcgaatgttag

SEQ ID NO: 38855 - DNA, 1809 bp, Neisseria meningitidis
atgaacaaaatataccgcatcatttggaatagtgccctcaatgcctgggtcgtcgtatccgagctcacacgcaaccacaccaaacgcgcctccgcaaccgtggcgaccgccgtattggcgacactgttgtttgcaacggttcaggcgaatgctaccgatgacgacgatttatatttagaacccgtacaacgcactgctgtcgtgttgagcttccgttccgataaagaaggcacgggagaaaaagaaggtacagaagattcaaattgggcagtatatttcgacgagaaaagagtactaaaagccggagcaatcaccctcaaagccggcgacaacctgaaaatcaaacaaaacaccaatgaaaacaccaatgaaaacaccaatgaaaacaccaatgacagtagcttcacctactccctgaaaaaagacctcacagatctgaccagtgttgaaactgaaaaattatcgtttggcgcaaacggtaataaagtcaacatcacaagcgacaccaaaggcttgaattttgcgaaagaaacggctgggacgaacggcgaccccacggttcatctgaacggtatcggttcgactttgaccgatacgctgctgaataccggagcgaccacaaacgtaaccaacgacaacgttaccgatgacgagaaaaaacgtgcggcaagcgttaaagacgtattaaacgcaggctggaacattaaaggcgttaaacccggtacaacagcttccgataacgtcgatttcgtccgcacttacgacacagtcgagttcttgagcgcagatacgaaaacaacgactgttaatgtggaaagcaaagacaacggcaagagaaccgaagttaaaatcggtgcgaagacttctgttattaaagaaaaagacggtaagttggttactggtaaaggcaaaggcgagaatggttcttctacagacgaaggcgaaggcttagtgactgcaaaagaagtgattgatgcagtaaacaaggctggttggagaatgaaaacaacaaccgctaatggtcaaacaggtcaagctgacaagtttgaaaccgttacatcaggcacaaaagtaacctttgctagtggtaatggtacaactgcgactgtaagtaaagatgatcaaggcaacatcactgttaagtatgatgtaaatgtcggcgatgccctaaacgtcaatcagctgcaaaacagcggttggaatttggattccaaagcggttgcaggttcttcgggcaaagtcatcagcggcaatgtttcgccgagcaagggaaagatggatgaaaccgtcaacattaatgccggcaacaacatcgagattacccgcaacggcaaaaatatcgacatcgccacttcgatgaccccgcaattttccagcgtttcgctcggcgcgggggcggatgcgcccactttaagcgtggatgacgagggcgcgttgaatgtcggcagcaaggatgccaacaaacccgtccgcattaccaatgtcgccccgggcgttaaagagggggatgttacaaacgtcgcacaacttaaaggtgtggcgcaaaacttgaacaaccgcatcgacaatgtggacggcaacgcgcgcgcgggtatcgcccaagcgattgcaaccgcaggtttggctcaggcctatttgcccggcaagagtatgatggcgatcggcggcggtacttatcgcggcgaagccggttacgccatcggctactcgagcatttctgacactgggaattgggttatcaagggcacggcttccggcaattcgcgcggtcatttcggtacttccgcatctgtcggttatcagtggtaa

SEQ ID NO: 38856 - DNA, 1377 bp, Neisseria meningitidis
atgcacgacaaaacctggtccggacgtttcaacgaacccgtttccgaactcgtcaaacaatacaccgcctccatcggtttcgaccgacggcttgccgaatgggacatccaaggctcgctggcacacgcgcaaatgttgaaagaaaccggcgtgttggacgaaggcgatttggcggacatccgtcagggcatggcggaaatcctcgaagaaatccgcagcggcaaaatcgaatggtcgtccgatttggaagatgtccacatgaacatcgaacgccgcctgaccgacaaaatcggcgacgcgggcaaacgcctgcacaccggccgcagccgcaacgaccaagtcgccaccgacatccgcctgtggctgcgcgaccagattaccgttattcaaaacctgattcaaaaccttcagacggcattgctggatttggcggaacaaaacgccgaaaccgttatgcctggctttacccacctgcaagtcgcccagcccgtcagcttcggacaccatatgctcgcctacgtcgaaatgctcggccgcgataacgaacggatggcggactgccgccgccgcgtcaaccgtatgccgctcggcgcagccgcccttgccggtacgacctacccgattcggcgcgaaattaccgccgaattactgggtttcgagcaaatctgccaaaactcgctcgatgccgtatccgaccgcgattttgccgtcgagttcaccgccgccgcctcgctgattatggttcacctgagccgcctgtccgaagaattgattttgtggatgagtccgcgtttcggctttatcgacatcgccgaccgtttctgcacaggttcgtccatcatgccgcagaagaaaaaccccgacgtgcccgaactcgtgcgcggcaaatccggccgagtcatcggacaccttatcggcttgattaccctgatgaaatcgcagcccttggcgtacaacaaagacaatcaggaagacaaagaacccttgttcgacaccgccgacacgcttatcgacacgttgcggatttacgccgatatgatgcgcggcgtaaccgtcaaacccgacaatatgcgcgccgccgtgatgcagggcttcgctaccgccaccgatttggcagattacttggtaaaaaaaggcatgcctttccgcgatgcccacgaagtcgtcgcccaagccgtgcgccacgccgatgaagctggcgtcgatttgagcgaactgccgctcgaagtcttacaaggtttcagcgatttgattgccgacgacgtttacggcgtgctgacacccgaaggcagcttaaacgcgcgcaaccacttgggcggcaccgcgcctgaacaggtacgcctccaagtcaaacgctggcgtgaagtgtcagcttaa

SEQ ID NO: 38857 - DNA, 132 bp, Neisseria meningitidis
gtgcgctatgatatcaataacaatatctatgttttggccaatccaaaaacattcaaaatcaaaacaatgtttaaaccaaacttaggaaagaagtattatgatggagaattcaaaaaagacatgggaaattga

SEQ ID NO: 38858 - DNA, 822 bp, Neisseria meningitidis
gtgaaccgaactgccttctgctgcctttccctgaccgccgccctgattctgaccgcctgcagcagcggaggcggcggtgtcgccgccgacatcggcgcggggcttgccgatgcactaaccgcaccgctcgaccataaagacaaaagtttgcagtctttgacgctggatcagtccgtcaggaaaaacgagaaactgaagctggcggcacaaggtgcggaaaaaacttatggaaacggcgacagcctcaatacgggcaaattgaagaacgacaaggtcagccgcttcgactttatccgtcaaatcgaagtggacgggcagctcattaccttggagagcggagagttccaaatatacaaacaggaccactccgccgtcgttgccctacagattgaaaaaatcaacaaccccgacaaaatcgacagcctgataaaccaacgctccttccttgtcagcggtttgggcggagaacataccgccttcaaccaactgcctgacggcaaagccgagtatcacggcaaagcattcagctccgacgatgctggcggaaaactgacctataccatagatttcgccgccaaacagggacacggcaaaatcgaacacctgaaaacacccgagcaaaatgtcgagcttgccgccgccgaactcaaagcagatgaaaaatcacacgccgtcattttgggcgacacgcgctacggcagcgaagaaaaaggcacttaccacctcgcccttttcggcgaccgcgcccaagaaatcgccggctcggcaaccgtgaagataggggaaaaggttcacgaaatcggcatcgccggcaaacagtag

SEQ ID NO: 38859 - DNA, 870 bp, Neisseria meningitidis
atgtccgcaaacgaatacacacaaatcggctggataggcttagggcaaatgggtctgcctatggtaacgcggctcttggacggcggcatcgaagtcggcgtatacaaccgctcgcccgacaaaactgcccccatctccgccaaaggcgcaaaagtttacggcaacaccgccgaactcgtccgcgactatcccgtcattttcctgatggtttccgactatgccgccgtgtgcgacatcctgaacggagtccgcgacggattggccggcaaaatcatcgtcaacatgagcaccatctccccgaccgaaaacctcgccgtcaaagcacttgtcgaagccgcaggcggacagtttgccgaagcacccgtttccggatcggtcgggcccgccaccaacggcacgctgctgattctgttcggcggcagcgaagccgttttaaacccgctgcaaaaaatattttccctcgtcggcaaaaaaaccttccatttcggcgatgtcggcaaaggttcgggcgcgaaactcgtcttgaactcgctcttgggcattttcggcgaagcgtacagcgaagcgatgctgatggcgcggcagttcggcatcgataccgacaccatcgtcgaagccatcggcggctcggcaatggactcgcccatgttccaaaccaaaaaatccctgtgggcaaaccgcgaattcccacccgccttcgccctcaaacacgcctccaaagacctcaacctcgccgtcaaagagcttgaacaggcaggcaacaccctgcccgccgtcgaaaccgttgctgccagctaccgcaaagcagtcgaagccggctacggcgaacaggacgtttccggcgtttacctgaaattggcagaacactga

SEQ ID NO: 38860 - DNA, 996 bp, Neisseria meningitidis
ttgaaggctgcctatcaaaatattgcaactgtctggcagggcgatttccacaatgccaaacaggtgctttccgcaatgaagaagaaggtccgcaaacctgccgccgtccgttccgatgcggatatcgccgcccttttccacgcccaccgtatgaagcaggcgcagcagagccgtattctgaatatgcttgccgttgaaatccgccccggttttgtgttggacaacaaacgcgcgcccgatatacgcgccgccctgctcgacgtgtacggagaggcggacggcaaaccgtttttcctgccgctcaatctgctgctggggtttatgggtgcgcacgagtggcataagaaaggggttgccgttccgcagctgggcggcagcatacacgttcctttcggcgtattctcgccgttgcgcggcgaatacctcgacctgctcgcccatgcgccgtcaacgggttttcagacggcattcgatatcgggacgggctcgggcgtgcttgccgccattttggcgaaacagggcattccttccgtcatcggcacggataccaatccgaaagccgtcgcctgcgcccgtgccaatattgcccgtttgggctttgaaaaacaggttgaaatccgcgaaaccgatctgtttcccgaagggtttgccgatctgattgtctgcaatccaccctggcttcccgccaagccgacttccgccgtcgaatccgcgttatacgaccccgaatctgcgatgctggctgcgtttttgcgggatgcgccgaaacatctgaatcccgacggagaaatccgcctgatcatttccgatcttgccgaacatctgcacctgcgtccgtccgattttctggataaggcatttgctcaggcgggtttgcgcgttgcggatgttttgaaaaccaaaccggttcacaaaaaagctgccgatccgaacaatccgctggcttttgcccgaaacagggaaactactttcctgtaccgtttgaaaaaggcataa

SEQ ID NO: 38861 - DNA, 1170 bp, Neisseria meningitidis
atgacagcacataaaatcctgcccgtcctgctttccatcatcttaggcgtttctcacacaacggctgcatcgcccgcgcccaacaaactgacggtacacgccgcccccacgctccaaacacccgaaaccctcacagcggcacacatcgttatcgaccttcaaagcagacagactttatccgccaaaaacatcaatacccctgtcgaaccggcggcactaacccaactgatgaccgcatatttggttttcaaaaacatgaaatcgggaaatatccaatctgaagaaaacttaaaaatacccgaatccgcatgggcttcagaaggaagcagaatgtttgtacgtcccggcgatacggtcagcaccgacaaactcttaaaaggcatgattgcactatccgcaaacgatgccgccctaacccttgccggccggctgggcaacggctcgattgaaaattttgtgcaacaaatgaacaaagaagcccgacgcttgggcatgaagaacactgtattcaaaaacccgacaggcttgagtagagaaggacaggtttccaccgccaaagacctcgcccagctgtctgaagcattgatgcgcgactttccggaatattacccgctgttttccatcaaatctttcaaattcaaaaatatagagcaaaacaaccgcaatatccttttatatagggacaacaatgtaaacggtctgaaagccggacacacagaaagcggcggctacaaccttgccgtgtcatactccggcaacggcaggcacatccttgtcatcacattaggttcggaatcggcggaaacacgcgcctcagacaacagcaagctgctgaactgggcattgcaagccttcgatacgcccaaaatatatccgaaaggcaaaaccgttgcccaaatccaaatttccggaggcagcaaaaaaaccgtccgcgcaggcttcctcaaagaagcctacatcactctgccacataaggaagcgaaaatggcagaacagattttggaaaccatacagccgattcccgccccggtaaaaaaagggcaaattttaggaaaaatcaaaatcagacaaaacggatacaccattgccgaaaaagaaatcgtcgcactggaaaatgtagaaaaaagaagccggtggcaaaggctttgggtgcgtctgacagggcagtaa

SEQ ID NO: 38862 - DNA, 615 bp, Neisseria meningitidis; identical to SEQ ID NO: 36682

SEQ ID NO: 38863 - DNA, 3486 bp, Neisseria meningitidis
atgcgcctgacccacatcaaactctccggcttcaaatcttttaccgacccgaccacgattcatgttccggggcagcttgtcgcggttatcgggccgaacggttgcggcaagtcgaatgtgattgacgcggtgcgctgggtgttgggtgaggcttcggcgaagcagcttcgcggcgagagtatgcaggacgtgatttttaacggtgcggcgacgcgccgtcctgcgccgagggcttcggtggagctggtatttgacaacagcgaccacagtttgcagggggcgtgggggcagtatgccgaggtgagtatcaagcggcagctgacgcgtcagggcgagtcgacgtatttcatcaacaatcagaccgtgcgccgccgcgacattaccgatttgtttctgggtacgggcgtgggcgcgcgcggttatgccgttatcgagcaagggatgatttcgcgcatcatcgaagcgcggccggaagagttgcgcgcctatatcgaggaggcggcaggcgtgtccaaatataaggaacgccgcaaggagacggaaggccgtctgaaagacacgcgcgagcatttgcagcgtttgggcgatttgcagaacgagttggcgcgtcaggtggaaaagctggagaaacaggcggaaaccgccgaacgctacaaatccctgaccgcgcagttgaaccaacagcaggatttgctcgattacgcccaatggcagcaatcgcttgccgccgccgacaaggcgaccgcgcagcatcagtctttgcaggcgcagcaggacgaaaccgccgcgcaggttcaggcgttaaacgacgaagtacacgcattgcagaccgccgaacagtcgcagcagcaggcggtacacgaactgggcaacaaacgcggcgtgttgcgcgagcagattgcccgtttggaagaacaaatccgccatcagcaaaacctgcaccaacgcatcgaacgcgacaagcaggcggcgcaggcgcagatgcaacgcatccatcaagagcagcagcaaatccgcgtcaagctggaagaaaacgagtcgcagaccgaagaaaagcaaaccgaattggcggaatgggcgatgcaggttgccgaacacgaagagcgtctgcccgaattggaagaagcccaagccacgctcaatgccgccttccaaacccagcaggacgaggcaaaccgcatccgccgcgaactggcgttgaagcagcagcagcttgcccatgccgaacaaaccgttgccaagcacgaagagcgcaaaggtcgtctgaaacaggaaaaccaagccctgaacctgcccgacgaagccgaaaccgccgccgcgcaggaagccgccgccttgttgcaaagccagcaagagcattacgaagaacaaatcatcgccgccgaagaagctctacacgccgcccgcgaggcgtttcagacggcctcaaaccgcttccaaagcctgaagcagcaacacatcaccttgcaggcgcagcagcaggcgttgtcgcaaatcctgtcgcaacagcaggaagccgccgacttctggcaggcaaccgaccacgccgccgcgccgcagctgtggcaacacatcaccgcgcctgccgagtggcagcacgccttgtccgtcatccttgcagaacgcctgcacgcccgcgccgtgccgcaaggtttcgtaccgcccgaacctttgccgcaggggcaggcggcgtggctttcagacggtctctccggcggcatcaaaaaatccctgcccgtacaggcattgctgaaccaaatccaagcgcagccgccgtttcagacggcattgcactactggctcgacggcgtattgtgcgcgcccgatttgagctatgccctcgcgcatcaaaacgatttgggcgcacaccaaatctggctcacgcccgaaggtcatcaggtcgataaagtcagcgtcctgctctatgccaaacccgcgcaggaaagcctgattgcccaaaaagcgcgcctcgacggcatcgcgtccgaactggaaaacctcgcccccgaactttccgccgccgaagccgcgttcaaacaggcggaagctgccgtgcgctcgtctgaagtgcaacataaaaacctgatgcagcagcaacagcagcacacgcgccaatacagtcaggcgcagcaacgcgccgccgaactcttagcgcgtaccaaccaagggcaaatccgccgcgaacacatcgagcgcgaactggcgcagttggcggaagaacagaccgtgttgcaacacacgtccgacgggctttcagacgacatcgttaccttgcaggaagccgccgccgaactcgaacaccagcagcaaaccaccgcgcacagccgccaagagcagcaaggccgtctgaaacaggcgcagcttgccctgttggaagccaaccgccaatatgggcttgccgaagtcgccgtccacaaactcaaccagcaaaaacaaaactaccggcagcaaatcgcccagcttgaacagcaaaccctcgactggcaggaacgccagcaagagcttgcccttgcctatgaaaccgagttccaaaacgacgagcagcacatcaagctcgaagagttgagcgaagccgtacagagtttggacgaagaatatattgtcgtacaggagaaactcgcgcagattcaggagcagggtagggaacaatacgcccgcgtacaaaccctgcaaaccaagctgccacagcttcaggccgccacccaaaccgccctgttgcaacaacaggaagccctgatcaacgccaaacgctaccatcaaaacctgaccgaacgcgccgccgatttggatgcgctcgaagcgttggcgaaagaatcgccgaaagtattgaacagcagcatcggcagcctctcgcaacaaatcgaagccctcggcgcggtcaacctcgccgccctgcaagaactcgaagaagcgcgcgaacgcgacggctactaccgcagccaaagcgaagacgtgcaggccgccatcaccattttggaagaagccatcgcccaaatcgacgacaaaaccaaagcgcgtttcaaagaaaccttcgacgccgtcaacggcaaagtccaaaccttcttcccgaccctgttcggcggcggcgaagccactctcaaaatgataggcgacgacctactgaccgccggtgtgtccattatggcgcgtccgcccggcaagaaaaacagcaccatccacctcctctccggcggcgaaaaagccctcaccgccatgagcctcgtgttcgctctgttcagcctcaaccccgctccgttctgccttttggacgaagtcgatgccccgctggacgacgccaacacctcgcgcttctgcaacctggtcaaagaaatgtcggcgcaaacccagttcctctacatctcccacaaccgcctgacgatggaaatggcagagcagctcgtcggcgtaacgatgcaggaaaaaggcgtatcgcgcgtcgtcgccgtggacatcaaacaagcgttggaaatggcggaagccgtttga

SEQ ID NO: 38864 - DNA, 822 bp, Neisseria meningitidis
atgagcagtccgcgccatgtgttttacatttccgaccgtaccggtctgactgccgagaatatcggcgaggctttgctgaaccagtttggcaatctgtcgttcaaacgccatacgcatccgtttgtcgatacgccggaaaaggcgcgcgcggtggtggagaaggtcaatcggagccggcaggaaaacggtcagcgtccgattgcgtttgtcagtgtggttgatgacgaaatccgtcggattatcaaaggggcggatgcttttcagattaatttctttgagacttttttgggactgttggagaaagaactcaataccgaagccacggcatccgagcaggggcatcacagtatcggtaatacgaagcgttacgatgcgcgtatggaggcggtaaatttctcattgaaccacgatgacggggtcagcgataagaaccttcaggaagcggatgtaatcttgatgggtgtatcgcgttcgggcaaaacgccgacctgcctttacctcgccctgcaatacggcatccgtgcggcaaactatccgctgattcctgacgatttggaatcggccgatctgccgcgtatggtcaagccttatagggataagctgttcgggttgaccatccagccggaacgtttgcaggccatccgccaagagcgccgcccgaattcaacttatgccaaaatcgatacatgccgcagcgaggtggcagacgcgcagagtatgttcagacggcatgggattccgtttgcgaatacgacggataaatcggttgaggaattggcggtacacatccttcaggcgtgcaagctcaaacgcaagttttga

SEQ ID NO: 38865 - DNA, 861 bp, Neisseria meningitidis
atgaaaccctattccgccaatcccaacctgaccgaaccgcgccggctgcgcgtgttgctgattgccgccgcgctgggctttctgctgctgatgctggtcgtgccgctcgtcgccgtgttttacgaagccttaaaaggcggttgggatttgtacctgaaatccttaaacgatcccgaagcgtggtctgccatcaaattgacgctgattaccgcgctgattgtcgttcccgtcaatgctgtattgggtgtggcgatggcgtggctgctgacccgttttgattttcgcggcaagcagttgctgaccaccctgctcgatttgccgttttccgtatcgcccgtggtggccggtttaatgttcgtcttattgttcggcgcgcacacggcattgggtggctggctcgaagcgcaaggcatacagattatcttcgccatccccggcattattctggcgacgctgttcgttactttcccctttgtcgcacgcgaaatcatcccgctgatgcaggctcagggcgacagcgaagaacaggcggcattgatactcggcgcaagcggctggcagatgttttggcgcgttaccctgcccaacatcaaatgggcgttactctacggcatcatcctcaccaacgcccgcgcgatgggcgagttcggcgcggtcagcgtggtatcgggacacatacgcggcgaaaccaacaccgtcccgcttttggtcgaaatcttctacaacgaatacaacttcaccggcgcattcgccctctccggcgtattggcacttttggcactggcgacgctggcggtgcagaacatcattaccaaattacaagacaaaaaactcgccgccgccgaaaggaacgcagtatga

SEQ ID NO: 38866 - DNA, 780 bp, Neisseria meningitidis
atgaaagaacacaaagcccgcaagcgtttcgggcagaattttttgcaggacacgcggattatcagcgatattgtcaacgccgtgcgcccgcaggcggatgatgtcgtgattgaaatcggtccgggtttggcggcgattaccgaacctttggcgaaaaagctgaaccgcctgcacgttgtcgaaatcgaccgcgacatcgtatgccgtctgaaaacgctgccgtttgcggataaactcgtcattcatgaaggcgacgtgttgcagtttgatttcaacaacattgaaggcaaaaagaaaatcgtcggcaacctgccgtacaacatttccacgccgcttttgttcaagctggcggaggtggcggacgatgtcgtcgatatgcactttatgctgcaaaaagaagtggtcgagcgcatggttgccgcgccgaaaagcaacgactacgggcgtttgggcgtgatgctgcaatatttcttcgatatggaaatgctgattgacgtgccgcccgaatcgttcgaccctgcgccgaaagtggattccgccgtcgtccgtatgattccggtgaaacaccgcatcggcagggcggacgatttcgagcattttgccaaactcgtgaaactcgccttccaccaacgccgcaaaaccatacgcaacaatctgaaagagcttgcaggcgacgatgatttgcaggcagtcggcatcaatccgcaagaccgcgccgaacatatcgcgccggaagaatacgtggcgttgagcaattatttggcgggcaaggccgtctga

SEQ ID NO: 38867 - DNA, 1410 bp, Neisseria meningitidis
atgacctccacattcccccgccgcctcgcccgcaaaatccgccaaacccgccgcctgtcgcgcaaaagcatcgcctttctgttccttttggcaggttcggcactcgtcgccctgaccgcgctgttttttgcccatcttgccgattttgcgctggaactgaacgccaaactggttcaacaatacccgtggttcgcgtgggtcgcgcttcctttgggtttgccgcttattgcgtggctcacacgcaaattcgcccccttcaccgccggcagcggcatcccgcaggtcatcgcctcactgtcgctgccctacggcgcacagaaaacgcggctgatccgcctcgggcagacgctgctgaagattccgctgacctttttgggtatgctgttcggcgcgtccatcggacgcgaaggtccgtccgtgcaggtcggcgcggcagtgatgggcgcgtggggcgcgtggtgcaagaaacacggcttggcattcaaagggatgcaggaaaacgatttgatggcggcgggcgcggcgggcggtttggcagccgcgttcaacgcgccgctggcgggcgtgattttcgccattgaggaactcgggcgcggcatcatgttgcgctgggagaggcaaattcttttgggcgtgctcgcctccggtttcatacaggtcgccattcagggcaacaacccgtatttttccggcttcaacggcggcgtattggaacatatctttctgtgggtcgcactgtccggcctggtttgcggcgcggcgggcggcctgttcggacgtttgctctatcgcggtgcggcggcgtttgcaccgcgcaagatacgcggcttcatccgcaaccgtccgctgctgctggcggcactgatggggctgctgctcgccctgctcggcacgttctaccaaggcaaaacctacggcactggctaccacgaagccgcccaagccctgcacggcatctacgaagcccccttcggactcgccgccgccaaatggctcgccaccgtattcagctattgggcaggcgttccgggcggcattttcactccctcgctgaccataggcgcggttttgggcgagcatatcgccgccatcgccgacatatcgcagggtgcaaacatcatcgtcctcatctgcatggcggcatttctggcgggcgcgacacaatccccgattacttccgccgtcgtcgtcatggaaatgacgggcggacaaagcctgctgttttggatgctgattgcctgcattttcgcctcgcaggtttcgcgccagttttcgccgcgtccgttctaccacgcatcgggaatgcgcttccgccagcgcgtgcttcaagaaaccgccgcccaaaccggcaatgcgcccgcaagaccgcaaacagcaaacagcaaaacgggaatgccgtctgaaaattaa

SEQ ID NO: 38868 - DNA, 378 bp, Neisseria meningitidis
gtgggtcaaagcggcgagttgttttgtttcgggcaaatgcccgtatggaaggcggaaaacctgccggaagttttgttgtcgggctattcgtccgaggaaggggaatgggtctgcctgaatgtgttgcagggcgatgtcgaagtccgcacgcaggacggggcggcggaggtttggtcggcagaaagcggcgattgcgtgtttgcgccgcagcaggtgttttcggtcaaactgaaaacggacgatgccgaaatccgtttgtcgctgtattgcgcggcggcagactattttcacaaaaaatacgggatgagtgccacgcattctgcggtcgcggcggcacgggataccgtaccggcgggcagggcgttggatatgggttga

SEQ ID NO: 38869 - DNA, 669 bp, Neisseria meningitidis
atgacgacccatctgtccaatgtcgcccccgacctgcaaaactatttgaacgccatcggcgaacccgaacatcccgttttgacgcggctgcgtgagaagaccgggcatcaccgtatgggcaaaatggcgattgcgcgcgaacaggcggcggttttggtttggctggcaaagctgatccgtgcggaaaaatatctggaaatcggcgtatttaccggatacagcagcaccgcgcttgcattggcgttgcccgaacacgggcggattaccgcctgcgacatcaatgtaacctttaccgatacggcgcgtcaggtctggaacgaggccggtgtggcacataaaatcggcctgcacctgcaacccgcattgctgacattggatgatttgattgcacagggtgaagccggaagctacgatttggcactgatagacgcagacaaaccgcccacgccgcaatatttcgagcgttgcctcaagcttgtccggcaaggcggcatcattgccatcgacaatattttgttgaacggaagggtgatgcgcgaagcggcttccgatgcgccgcccagcgtcggcatcctcaaagattttaatcaaaacctgccgaacgatacgcggattgtccccatcaccctgcccgtcggcgacggtttgaccctgcttctgaaaaaataa

SEQ ID NO: 38870 - DNA, 1203 bp, Neisseria meningitidis
atgaagaactaccacgcgcccgacgagaagggctttttcggcgaacacggcgggctgttcgtgtccgagaccctgattcccgctttgcaagagctggcggatgcctataaggcagcgaaaaacgacccgtcgttttgggaagaattccaccgcgatttgaaacactacgtcggcaggcccagccccgtttaccatgccgcgcgattgtccgagcatttgggtggcgcgcaaatttggttgaagcgcgaagacttgaaccacaccggcgcgcacaaagtcaacaacaccatcggtcaggcactgttggcaaaacgtatgggtaaaaaacgcgtcatcgccgaaactggcgcgggtcagcacggcgtggcgagtgccaccgttgccgcacgcttcggtatgacttgcgacgtgtatatgggcgcggacgacatccaacgccaaatgcccaacgtgttccgtatgaaattattgggcgcgaatgtcgtcggcgttgacagcggcagccgtactttgaaagacgcgatgaacgaagccatgcgcgaatgggtcgcccgcgtggatgacacattctacatcatcggtaccgccgccggtcccgcgccgtatcccgaaatggtgcgcgactttcaatgcgtgatcggcaatgaagccaaagaacaaatgttggaagccatcggcagacagcccgacgttgccgttgcctgcgtgggcggcggatcgaacgccatcggtttgttccacccgtatatcggcgaagaaaacgtgcgcctcgtcggcgtggaggctggcggtttgggcgtgaacacccccgatcacgccgcgccgattacttcgggcgcaccgattggcgtattgcacggtttccgcagctatctgatgcaggacgaaaacggtcaggttttgggtacgcactctgtttccgcaggcttggattaccccggcatcggcccggaacacagccatctgcacgacatcaagcgcgtcgaatacactgttgccaaagacgacgaagcactcgaagcctttgacttgctctgccgcttcgagggcattattcctgcgctggaatccagccacgccgttgcttgggcggtgaaaaacgcgccgaaaatgggcaaagaccaagtgattctggtcaacctatccggtcgtggcgacaaagacatcaataccgtcgcgaagctcaaagggattaaactgtaa

SEQ ID NO: 38871 - DNA, 1407 bp, Neisseria meningitidis
atggaaaaaaacaccctatccgcccgcgcaccatccccttggctgccgcttctgctggcaattgccatttttatgcagatgttggatgcgaccattttaaataccgcactgcctgaaattgccgccgacctgaatgagtcgccattgaacatgcagctggcggttatttcctacacgctgacggttgccctgctgattcctttgagcggttatttggcggacaggttcggaacgaaaaaagtctttttcggttcgattgccgtttttatgctcggatcggcattgtgcgccgcatcgggttcgctgtttgaattgacgctttcccgtgtcgttcagggcatcggcggttcgatgctggttccgataccgcgtctgaccatcttgcgtgtgtacgacaagtccaagctgctcaacgccatcaattatgcggttatgcccgcattaatcggaccggttttagggcctttggcgggcggttatctggtcgaatacgcttcgtggcactggattttcctgctcaacctgcccatcggtcttctgggtttcatattgggacgcaacatcatgcccgatgtcaaaggcaacgataccgctctggattttaaaggctatctgattttttctgccgccgcgtgcctcttgttactttcggcagaaagcctgtcgcacgcgctgcctccgtattttgcactgttgccgctgtgcggcggactgctgtttgcacgccgttatttccgacatatgaaaaccgcgtccaaaccgatttattccgccgacctgtttctgatacgcactttccgtctaggactggcgggcaatctgttcagccgtctcggcatcagctcgattccttttctgatgcccctgatgtttcaagtcgctttcggcttcggcgcaagcctgtcgggttggctggtcgcacccgtcgccctgtcttcgctgctggtcaagccgttaatctccaccttgatgaagcgtttcggctaccgcaaggtgctgctttggaacaccaaactgcttgccgccttcatcatgctgctcgccctgcctgatggaaactcgccgctgtggatttggattttcctctcgctggcgatcggcgcgtgcaactccctacagttttctgccatgaacacactgaccctcgccgatttgcgcccgcaacagaccggcagcggcaacagcctgatggcggtcaaccaacagcttgccatcagcatgggcattgttgtcggcgcattaatccttaaaaactggacatttctgataccggcttcttcaggtctgcattccgccttccgtatgaccctgctcagcatcggcggcatcacccttgcctcgtcgttggttttcaagcgtctgcacgtttcagacggcgcaaacctgacacggaacacaccgtcctaa

SEQ ID NO: 38872 - DNA, 285 bp, Neisseria meningitidis
atgaaaaaactgttattggctgccgttgtttccctgagtgccgcaaccgcatttgccgacgattctgccgagcgtcagatttacggtgatccccattttgaacaaaaccgcacaaaagccgtaaaaatgttggaacagcgcggttatcaggttcacgatgtcgatgccgacgaccattggggcaaacctgttttggaagtggaagcctataaagacggccgcgaatacgacatcgtgttgtcttaccccgacctgaaaatcatcaaagagcagctcgatcgctga

SEQ ID NO: 38873 - DNA, 294 bp, Neisseria meningitidis
atgtcgaacattaaaattgtcgcactggttaccgtcaaaccagaatacacagaaacactggtagcacagtttaaagaactggtcaaagccagccgtgcagaagagggcaacatcagctacgatctccatcaggaaatcggcaaaccgaaccgttttgttttcgtggaaaattggaaatcccaagcagctattgacgaacataacgccagcgcgcatttccaagccttcgtccagtccgtcgacggcaaaaccgaagcgttggaaatcgtattgatgaatgaagttgtcgcttaa

SEQ ID NO: 38874 - DNA, 720 bp, Neisseria meningitidis
ttgactttaacccgaaaaacccttttccttctcaccgccgcattcggcacacactcccttcagacggcatccgccgacgcagtggtcaaggcagaaaaactgcacgcctccgccaaccgcagctacaaagtcgccggaaaacgctacacgccgaaaaaccaagtcgccgaattcacgcaaaccggcaacgcctcgtggtacggcggcaggtttcacgggcgcaaaacttccggcggagaacgatacgatatgaacgcctttaccgccgcccacaaaaccctgcccatccccagctatgtgcgcgtaaccaataccaaaaacggcaaaagcgtcatcgtccgcgtcaacgaccgcggccccttccacggcaaccgcatcatcgacgtatccaaagccgccgcgcaaaaattgggctttgtcagccaagggacggcgcacgtcaaaatcgaacaaatcgtcccgggcaaatccgcaccggttgccgaaaacaaagacatctttatcgacttgaaatctttcggtacggaacacgaagcacaagcctatctgaaccaagccgcccaaaacttcgccgcttcgacatcaagcccgaacctcgccattgaaaaacgccgttacgaatacgtcgtcaaaatgggtccgtttgcctcgcaggaacgcgccgccgaggccgaagctcaggcgcacggtatggttcagacggtattgaccgccggttga

SEQ ID NO: 38875 - DNA, 1104 bp, Neisseria meningitidis
  misc_feature 1085, 1086, 1087, 1088, 1089: 'n' is a, c, g or t
atgaaattgtctattcaaaaattcatgatgctgtttgcagcagcaatatcgttgctgcaaatccccattagtcatgcgaacggtttggatgcccgtttacgcgatgatatgcaggcaaaacactacgaaccgggtggtaaataccatctgttcggtgatggtcgcggcagtgttaaaaatcgggtttacgccgtccaaacatttgatgcaactgcggtcggccccatactgcctattacacacgaacggacaggatttgaaggtgttatcggctatgaaacccatttttcagggcacggacatgaagtacacagtccgttcgatcatcatgattcaaaaagcacttctgatttcagcggcggtgtagacggtggttttactgtttaccaacttcatcggacagggtcggaaatccatccggaggatggatatgacggaccgcaaggcagcgattatccgccccccggaggagcaagggatatatacagctattatgtcaaaggaacttcaacaaaaacaaagactaatattgtccctcaagccccattttcagaccgttggctaaaagaaaatgccggtgccgcctctggttttttcagccgtgcggatgaagcaggaaaactgatatgggaaagcgaccccaataaaaattggtgggctaaccgtatggatgatgttcgcggcatcgtccaaggtgcggttaatccttttttaatgggttttcagggattgggagttggggcaattacagacagtgcggtaaacccggtaacctatgcggcagcacggaaaactttacagggtattcacaatttaggaaatttaagtccggaagcacaacttgcggctgcaaccgcattacaagacagtgcttttgcggtaaaagacggtatcaactctgccaaacaatgggctgatgcccatccgaacattacagctactgcccaaaccgcccttgccatagcagaggccgcaactacggtttggggcggtaaaaaagtaaaccttaacccgaccaagtgggattgggttaaaaataccggctataaaacacctgctgcccgacctatgcagactatagacgnnnnncacacacttaattaa

SEQ ID NO: 38876 - DNA, 1977 bp, Neisseria meningitidis
atgccacgcattgccgccctgcccgaccatctcgtcaaccaaatcgccgccggcgaagtggtcgaacgccctgccaacgccctgaaagaaatcgttgaaaacagcatagacgcaggcgcgacggcgattgatgtcgaactggcgggcggcggcatccgtctcatccgcgtcagcgacaacggcagcggtatccatccggacgacatcaaactcgcactccaccgccacgctaccagcaaaatcaaaaccttaaacgatttggaacacgtcgccagtatgggctttcgcggcgaaggcttggcaagcatcgcctccgtcagccgcctgaccctgaccagccgccaagacggcagcgcacacgcgacacaagtcaaagccgaagacggcaaactcagcagccctacggcagccgcccaccccgtcggcacgaccatcgaagccgccgaactcttcttcaatacccctgcgcggcgcaagttcctcaagtctgaagccaccgaatacgcccactgtgccacgatgctcgaacgcctcgcgctggcgcatccgcacattgccttctcgctcaaacgcgacggcaaacaagtgttcaaacttcctgcccaaagcctgcatgaacgtattgccgccattgtcggcgatgattttcagacggcatccttagaaatcgacagcggcaacggcgcattgcggctctatggcgcgattgccaagccgactttcgccaaaggcaaaaccgacaaacaatactgcttcgtcaaccatcgttttgtccgcgacaaagtcatgctccatgctgtcaaacaggcataccgcgacgtattgcacaacgcgctgacgcctgctttcgtcctctttctcgacctgccgcccgaagccgtggatgtcaacgtccaccctaccaaaaccgaaatccgcttccgcgacagccagcaggtgcaccaactcgtgttccacacgctcaacaaagcccttgccgacacacgcgccgacctgaccgaaagcgtcggcaacgcaggcgaagtgttgcatgacattactggcgttacgcctgcaccaatgccgtctgaaaacaacagcgaaaatctgtttgatcgcgcatccaactacccgacgggcaacaaacccgatacacgcaatgcctttggtgcatcaggcaaaaccgcgcctatgccttaccaagccgctcgtgcgccgcaacaacgcagcctgtccttgcgcgaaagccgcgcagccatgaatacttacgccgagctttacaaaaaaaccgacgacatcgaccttgagttgaaccgattagagcaggcacgtttcggcaatatgccgtctgaaacgcctactcccaaaacagatgcgccgctttcagacggcatcccgtcccaatccgaactgccgccgctcggcttcgccattgctcaattacttggcatctacatccttgcccaagccgaagacagcctgctgctcatcgatatgcacgccgccgccgaacgcgtcaactacgaaaaaatgaaacgccaacgtcaggaaaacggcaggctgcaaagccaacgcctgcttattcccgtaacctttgccgcgtcccacgaagaatgcgccgcccttgccgaccatgctgatgcactggcaggcttcggcttggaactgtccgacatgggcggcaatacccttgccgtccgcacagttcccgccatgctcggcaaagccgacgtcgtctcactcgccaaagacgtattgggcgaactcgcccaagtcggcagcagccaaaccatcgaagaacacgaaaaccgcatcctcgccactatgtcctgccacggctccgtccgcgccggccgccggcttaccctgccggaaatgaacgcgctgctgcgcgatatggaaaacacgccgcgcagcaaccagtgcaaccacggcaggccgacgtgggtcaaactgactttgaaagaattggacgcactgttcttgcgcggacaataa

SEQ ID NO: 38877 - DNA, 300 bp, Neisseria meningitidis
atgaagaaaatgttcgtgctgttctgtatgctgttctcctgcgccttctcccttgcggcggtaaacatcaatgcggcttcgcagcaggagttggaggcgctgccgggcataggccctgcgaaggcgaaggccattgcggaataccgtgcgcaaaacggtgcgttcaagtctgtggacgatttgaccaaggtaaagggcatcggccctgcggtgctggcgaagctgaaggatcaggcttctgtcggcgcgcccgcaccaaaaggcccggcaaaaccggctataccggccgctaaaaaatag

SEQ ID NO: 38878 - DNA, 411 bp, Neisseria meningitidis
gtgaaactgctggcgaataactggcaaccaattgccatcatcgcgcttgtcggcacgctcttggcggtgtcgcaccatcaaggctacaagtcggcttttgcgaagcagcaggcggtcattgacaagatggaaaaagacaaagcgcaagccctgctgttgtcggctcaaaactatgcacgcgagctggaacaggcgcgtgcggaagctaaaaaatatgaagtcaaggcgcacgccgtcggcatggctttggcgaaaaaacaggcggaagtcagccgtctgaaaacggaaaataaaaaggaaatcgaaaatgtccttactcaagaccgtaaaaatgcaggcggcggttgtattgacggctttggccatcacggcttgcagctctacaagcgcgccctcggctacggaaattaa

SEQ ID NO: 38879 - DNA, 372 bp, Neisseria meningitidis
atgaaaccatacaaaatctacacccatcccgccctgccgccccaagccgtcaaacaaggctggtcgtggccgggccttttgttcggcacgctgtgggcgtgtttcaaaagaatgtggggtttggggctggggctgacgggcgcgatattcgtgctggcggtgtttgcccaactggtttacggcgacacgcccgccacagactcggcgtttaacgtattgggcttggcggtttccgtctggttcggcgcaaagggcaacagcctttatgcacgccaccttttatcgcgcggctataccgaattgcccgaaacggttgaggcagccaatccccaagccgcattggcgcaatatttcgggcgcgggggccgataa

SEQ ID NO: 38880 - DNA, 273 bp, Neisseria meningitidis
atgcccattgaggacatccctttttatatttttgatttggcggatttcgatgtaggaattggcgatattggcaatattgtaggttttgctccgagttccagcctgccgaaatcgaaaaaaaatgccttgaccggcattgccttcttaagggggatagatgtctatgaccctcccgtttcaaaagaaaaagcattaaaagccttaaagaaacatcctgaaatttatcagaaatttcagcatttctttccgtttgtagagctgcctccgctttaa

SEQ ID NO: 38881 - DNA, 765 bp, Neisseria meningitidis
atgtgttcctgccttgttgtcaaaaataccgttatcggaagcggacgcaccaaaatcgccgtgccgcttgtcgcccgcgatgccgccgaactttccgccgtacttgagcaaatcaaaaatatgcccttcgatattgcggagttccgcgccgactttttggaatgcgcgggcagtatcggcgaaatattgcaccacacgcagaccgtccgcgacgcgctgcccgacaagccgctgctgtttacgttcagacggcatggcgaaggcggctcgttcccgtgttcggacgattattattttgaactactcgacgcgctgatcgaaagccgcctgcccgacatcatcgacatcgagctgttttccggcgaaaccgccgtccggtgcgccgtggcaaatgctcaaaaaaacggcatcgccgccctgctctgcaatcatgagtttcaccgcacgccgccgcaagaagaaatcgtatgccgtctgaaacagatggaggactgcggcgcggacatctgcaaaattgcggtgatgccgcaaagcgcggaagatgtgctgactttgctttccgccacgctcaaagcgaaagagcttgccgccaaaccgattgttacgatgtcgatggggcagacgggggcggtcagccggcttgccggacaggtgttcggctcaagcatcacgttcggttcgggaacgcaaaactccgcgccggggcaaatcggcgtatccgccctccgtgcgacactcgactgtctcgaaagcggcgcagactga

SEQ ID NO: 38882 - DNA, 1272 bp, Neisseria meningitidis
atgttccaatggctttatgatgtattgtggctgcttgcgccgatatggatacggcgttatttggacaaacgctccggaagtgccccggcatatcgggcgcatcggggcgagcgtttcggcaagccgtatccgaatcccgttaccggcgcggtttggatacacgccgtttcggtcggggaaacgcgtgccgcccaacctttgatacgcgagttgcggcagcgttttcccgatgcgccgctgctgatgacgcagatgaccccgacgggacgggaaaccgcgcaagttctgtttcccgatgcgcaatgccgctatcttccgtatgacaaaaaaacgtgggtacggcagtttttgcgcgaacaccgcccgatgttcggcgtattgatggaaacggaaatctggcccaacctaatgaaggaatgccggcgcgcgggtgtgccgctgtttttggcgaatgcgcggctgtcggaaaaatcgttgaacggttatctgaaagtccgcagcctgatccgtcctgctgtcgcttcgctgacgggctgtctggtacagacggaggcggatgcggcgcggttggcgaaattgggcgcggcatccgtgcaggtgtgcggcaataccaaatacgacctgatgccgtcggaacagatgaaaacgctggcggggcagtttgaaaaacgcatcggagaccggccggttgccgtgtgcggcagcacgcgcgtttatcggggtgaagacgaggcggagaaactgctggcggcgtggcaacaatatcgcggcgatgccctgctggtcgtcgtgccgcgccatcccgagcattttcagacggcatttgaaacggcaaaacgcttcgggtttaaggttcagcggcgcagcgacggtttgccggtcgaacccgatacgcaggtgtggataggcgacagtatgggcgagctgtatgcgtattacctgtgcgccgatgttgcttttgtcggcggcagtctggtcgattcgggctgtcagaacatcatcgaaccgctttcctgcggcgttccgacgatattcggcttttcgacctacaatttttccgaagcctgccggcacgccttggcatcgggtgcggcggttcaagtcgaatcggcggacgcgtggcgggaagccgttgaaaaaaccttatcgtacgaggggggcggaatgcagatgcaggcgcgcgtggacggctttatcgcacaacatcgcggagcgggcgcgagaatcgccgaggcggtgcgggaagcggtatgcggacatcgggggcgatag

SEQ ID NO: 38883 - DNA, 1059 bp, Neisseria meningitidis
atgaccgccgccctgcacatcggacacctgtccaaaagttttcaaaacaccccggttttaaacgacatttcgctcagcctcgacccgggcgaaatcctctttatcgtcggcgcgtccggctgcggcaaaaccacccttttacgctgccttgccggttttgaacaacccgattttggcgaaatttcgctttccggcagaaccatcttctcgaaaaataccaacctccccgtccgcgaacgccgtttgggttatgtcgtacaggaaggtgtgctgttcccccacctgaccgtttaccgcaacaccgcctacgggctgggcaacggcaaaggcaagacggcgcaagagcggcagcgcatcgaagctatgttggaattgaccggcatttccgaacttgccggacgctatccgcacgaactttcgggcggacagcaacagcgcgtcgccctcgcccgcgcccttgcacccgatcccgaactgattttgttggacgaacccttcagtgcgctggacgaacagttgcgccgccagattcgcgaagacatgattgccgccctgcgcgccaacggcaaatctgccgttttcgtcagccacgaccgcgaagaagccctgcaatacgccgaccggattgccgtgatgaaacaggggcgcatcctccaaactgcaagccctcacgaattgtaccgacaacctgccgaccttgatgccgccctgtttatcggcgaaggcatcgtgttccccgccgcgctcaacgccgacggcaccgccgattgcggattgggccgcctgcctgttcaaagcggcgcacccgcaggcacacgcggcacactgctcatccgtccggaacagttcagccttcacccccattccgcacccaccgcctccattcacgccgtggttctcaaaaccacgcccaaagcgcggcataccgaaatcagcctccgggtcggacaaaccgtcctcacgctcaacctcccttccgcccccaccctgtcagacggcatttccgccgtcctccatttggacggttccgccctgttcttccccggaaataccctctga

SEQ ID NO: 38884 - DNA, 780 bp, Neisseria meningitidis
atgcttaaaatcatttccgccaacgtcaacggcatccgctccgcctacaaaaaaggtttttacgaatatatcgccgcatcgggcgcggacattgtctgcgtgcaggaactcaaagcgcaggaggctgatttgtctgccgatatgaaaaatccgcacgggatgcacggccattggcattgcgccgagaagcgcggttacagcggcgtggcggtgtacagcaaacgcaaacccgacaatgtgcaaatcggtatgggcattgaagaattcgacagggaagggcggtttgtgcgttgcgatttcgacaggttgagcgttatttcgctttacttgcccagcggcagcagcgcggaagaacgccagcaggtgaaataccgtttccttgatgcgttttaccctatgctcgaagcgatgaaaaacgaaggacgcgacattgtcgtttgcggcgactggaacatcgcccaccaaaacatcgacctgaaaaactggaaaggcaatcagaaaaattcgggcttcctaccggaagaacgcgagtggataggcaaggttatccacaagctcggttggacggatatgtggcgcacgctttatcccgatgtgccgggctacacgtggtggagcaaccgcgggcaggcgtatgcgaaagatgtcgggtggcgcatcgattatcagatggttacgcccgaacttgccgccaaagccgtgtccgcacacgtttataaagatgaaaaattttccgaccatgcgccgctggtcatggagtatgactatgctgccgaataa

SEQ ID NO: 38885 - DNA, 444 bp, Neisseria meningitidis
atgagcgaagaactgcaacccgtattcagcatcgagcgactgtatgtcaaagacttgtctttggaagtgccgcacgcgccgcaaatctttttggaacagggcgagcccgaagtggatatgcgcgtttccaccggcagccaaaagctggaagacggctactacaacgtggatgtaaccgttaccgtaaccgccaaattggataacgagcgcacgatgtttttgaacgaagtaacccaaagcggtattttccgtttggaaaacatccccgaagaagatgccgacctgctgctcggcgtggcgtgtccgaacatcctcttcccttacgcgcgcgaagccgtttccggtacggtaacgcgcgccggcttcccgcccgtcctgctcgcgccgattaattttgaggcgatttaccaacaacagcaggaagccgaagccgccggagcttga

SEQ ID NO: 38886 - DNA, 651 bp, Neisseria meningitidis
atgccgtctgaaccgccttcagacggcattgcccgacaccccaaaagcacaatcaaaatggcaaaaaaaccgaacaaacccttcaggctgacccccaaactcctgatacgcgccgtattgctcatctgtatcaccgccatcggcgcattggcaataggcatcgtcagcacattcaacccgaacggcgacaaaacccttcaagccgaaccgcaacacaccgacagcccccgcgaaaccgaattctggctgccaaacggcgtagtcggacaagatgccgcccaacccgaacaccaccacgccgcctcatccgaacccgcacagccggacggcacagacgaaagcggcagcggactgccgtcccctgccgcacccaagaaaaaccgggtcaaaccgcaacctgccgacacagctcaaaccgacaggcagccggacgacgccggaacacaagctgaaaacacactcaaagaaacccccgtactgcccacaaacgtcccccgtcccgaaccccgaaaagaaacacccgaaaaacaggcgcagcccaaagaaacacccaaagaaaaagaaacgcccaaagaaaaccataccaaaccggacaccccgaaaaacacgccgcccaaaccccataaagaaattctcgacaacctcttctga

SEQ ID NO: 38887 - DNA, 1734 bp, Neisseria meningitidis
atgtattcgaataatgctataactaataatagaaacaatattacactaggtgcgtatagggatgctattattttcatattttctgatgaaaatgtggttagggcgattggtacgattaactcaatgtacgaagaatatttgacccgttcgcacaagatagatcaaaaagaatttttaagggagggtgagcgtctgtctgctaaggcaagagaattccaacgcacagcagaagaggcacaaaaaagcttaaaagaaggaattggaagagctgctagtaaatttcgtggtaattcaaaggaggcatttgttgcaagaaaagtacaaagtgatttgcaaaaagcattgaatgctagcaactataacaagcagcaatatgcaagacgtgcggcaacagcgttagagaatgcttcaaaatcaaaagttatggcagcgaatttgggtaagtttacttatggggcaactgttgccatgggaactttgagtatgggaagtgcttggtggaaagccttggatggagaaggaaattggagtgatgttggtctctcatcagcttcttttttgggtgggctaatgggcgtccaatggggtgcggctttgggtgttggggcttttggtttacttactggtggcgcaggttggctagtagttggagctatacttggaggtggcgcaggagcttggtggggatcattaggagctgaaaaagcttggagatggtttgaggatttcttaaatcttaaccgcagcgacaaataccacgtttacgaccccctcgccctggatttggacggtgacggtatagaaaccgttgccaccaaaggctttgcaggtgcattgttcgaccaccgcaatcaaggcatccgcaccgccaccggttgggtttctgccgatgacggtctgcttgtgcgcgatttgaacggcaacggcatcatcgacaacggtgcggaactcttcggcgacaacaccaaactggcagacggttcttttgccaaacacggctacgcggctttggccgaattggattcaaacggcgacaacatcatcaacgcggcagacgccgcattccaatccctgcgtgtatggcaggatctcaatcaggacggcatttcccaagctaatgaattgcgtacccttgaagaattgggtatccaatctttggatctcgcctataaagatgtaaataaaaatctcggtaacggtaacactttggctcagcaaggcagctataccaaaacagacggtacaaccgcaaaaatgggggatttacttttagcagccgacaatctgcacagccgcttcaaagacaaagtggaactcactgccgaacaggcaaaagccgccaatcttgcgggcattggtcgtctgcgcgatttgcgcgaagctgccgcattgtccggcgatttggccaatatgctgaaagcttattctgccgccgaaactaaagaagcacagttggcattgttagataatttgattcacaaatgggcggaaaccgattcgaactggggcaaaaaatcgccaatgcgactttcaaccgattggacgcaaacggctaatgaaggtattgcactgacaccatcccaagtagcacaactaaaaaagaacgctttagtttccctttctgataaagctaaagcagctattgacgccgcccgcgaccgcattgccgtgcttgatgcctacacggggcaggattccagcacgctctattacatgagcgagagatgcgcttaa

SEQ ID NO: 38888 - DNA, 198 bp, Neisseria meningitidis; identical to SEQ ID NO: 36305

SEQ ID NO: 38889 - DNA, 828 bp, Neisseria meningitidis
atgaaactcgatatttatgctttgctggaacgcgccctgctttcggacgacccagatgaaaaaggacggctgacggatgaggcgtttgccgccgttcaaaatgcggacggggcggaagcaaacgcgccgccggcggacttcccccgagcgggacggccggacaagcctgttttggtcgcgccgtcgcaactgaccccgcgcaaaatgaacacaaccgaaggttatgcggcgatgctgcacgcgattgcgcatatcgaattcaacgccgtcaatctagctttggacgcggcataccgtttccgcacgctgccgtttcagtttgtccgcgactgggtgaaagtggcgaaggaagaggtgtaccatttccgcctgatgcgcgacagattgcgcgctttcggcttcgattacggcagtttcgaggcgcacaaccatttgtgggatatggcgtacaaaaccgcctacgacccgctgttgcgtatggcgttggtaccgcgcgtgttggaagcgcgcgggctggacgttacgccggggatacgcgcgaaggtggcgcagcgcggcgattcggaaacctgcggcgtattggacatcatttaccgcgacgaagtgggccatgtcgccatcggcaaccattggtatcaacacctctgccgcgaacgcggtttggaacctgtcgccctgttccgcagtctgattgcccgttacgatatgtttatcttccgtggctatgtgaacatcgaagcgcgggaaaaagcgggcttcagccgctttgaattggatatgttggaagatttcgagcagggtttgaaacaaaataaacatgccgtctga

SEQ ID NO: 38890 - DNA, 2049 bp, Neisseria meningitidis
atgcgccgttttctaccgatcgcagccatatgcgccgtcgtcctgttgtacggactgacggcggcaaccggcagcaccagttcgctggcggattatttctggtggatagttgcgttcagcgcaatgctgctgctggtgttgtccgccgttttggcacgttatgtcatattgctgttgaaagacaggcgcgacggcgtattcggttcgcagattgccaaacgcctttctgggatgtttacgctggttgccgtactgcccggcgtgtttctgttcggcgtttccgcacagttcatcaacggtacgattaattcgtggttcggcaacgatacccacgaggcgcttgaacgcagcctcaatttgagcaagtccgcattgaatctggcggcagacaacgcccttggcaacgccatccccgtgcagatagacctcatcagcaccgcctccctatccggcaatatgggcagggtgctggaacattatgccaacgggtttacacagttgtccctttacaatgccgcaagcggcaaaatcgaaaaaagcatcaacccgcacaagctcgatcagccgtttccggataaggcgcgttgggaaaaaatccaacaggcgggttcggtcagggatttggaaagcataggcggcgtattgtacgcgcagggctggctgtcggcgggtacgcacaacgggcgcgattacgccttgtttttccgtcagccggttcccaaaggcgtggcagaggatgccgtcttaatcgaaaaggcaagggcgaaatatgctgagttgagttacagcaaaaaaggtttgcagacctttttcctggcaaccctgctgattgcctcgctgctgtcgatttttcttgcactggtcatggcactgtatttcgcccgccgtttcgtcgaacccgtcctatcgcttgccgagggggcgaaggcggtggcgcaaggcgatttcagccaaacccgtcctgttttacgcaatgacgagttcgggcgtttgaccaagttgttcaaccacatgaccgagcagctttccatcgccaaagaagcagacgagcgcaaccgccggcgcgaggaagccgccagacattatcttgaatgcgtgttggaggggctgaccacgggcgtggtggtgtttgacgaacaaggctgtctgaaaaccttcaacaaagcggcggaacagattttggggatgccgcttacccccctgtggggcagcagccggcacggttggcacggcgtttcggcgcagcagtccctgcttgccgaagtgtttgccgccatcggcgcagcggcaggtacggacaaaccggtccatgtgaaatatgccgcgccggacgatgccaaaatcctgctgggcaaggcaaccgtcctgcccgaagacaacggcaacggcgtggtaatggtgattgacgacatcaccgttttgatacacgcgcaaaaagaagccgcgtggggcgaagtggcaaaacggctggcacacgaaatccgcaatccgctcacgcccatccagctttccgccgaacgtctggcgtggaaattgggcgggaagctggatgagcaggatgcacaaatcctgacgcgttcgaccgacaccatcgtcaaacaggtggcggcattgaaggaaatggtcgaagcattccgcaattatgcgcgttccccttcgctcaaattggaaaatcaggatttgaacgccttaatcggcgatgtgttggcattgtatgaagccggtccgtgccggtttgcggcggagcttgccggcgaaccgctgatggtggcggcggatacgaccgccatgcggcaggtgctgcacaatattttcaaaaatgccgccgaagcggcggaagaagccgatgtacccgaagtcagggtaaaatcggaagcggggcaggacggtcggattgtcctgacggtttgcgacaacggcaaagggttcggcagggaaatgctgcacaacgccttcgagccgtatgtaacggacaaaccggcgggaacgggattgggtctgcctgtggtgaaaaaatcattgaagaacacggcggccgcatcagcctga

SEQ ID NO: 38891 - DNA, 375 bp, Neisseria meningitidis
atgataatccttcacggcattccaaattgcgacacagtcaaaaaagccaaaaacaggcttgccggatacggcttggagtttgaatttcgggattttaaaaaacagaggccgtctgaagcggaaatctgctcgtggctggaacaagtgcctttggcaaccctgctcaacaaacgcgggacgagctggcgcaaacttgatgccggaacacagcaaaaagtgctgtcctcgacggcggaggccgtcaaactgatgtccgaaatgccgagcctgatcaagcgtcccgtattggagtgcggcggcagggtttatgtcggcttcagcgaagaaacctacgacggcatcttcaatcggcaagccctgtgcagacagggataa

SEQ ID NO: 38892 - DNA, 321 bp, Neisseria meningitidis; identical to SEQ ID NO: 38627

SEQ ID NO: 38893 - DNA, 153 bp, Neisseria meningitidis
atgcccgaccgcatcaaaccaagccgaaacggcgacggtgcagacgacatagcccgacagcaaggcacggcgcagacgggcgcgaaacccgaaacatccccgaccgcgaggcacggggattttttgagcccgttgcagggggattggatttaa

SEQ ID NO: 38894 - DNA, 1092 bp, Neisseria meningitidis
  misc_feature 6, 7, 8, 9, 10: 'n' is a, c, g or t
gtgtgnnnnnaaaccaaccgcctggtcgcgttggcgcacgaaatgcaggagcatcccgatccgcgcgaattggacgtggttttgtccaccggcgaacaagtaaccatcggccttttggcgatggcattgaaagacatcggcgtggatgccaaaagctacacaggctggcaggtcgccctcaaaaccgataccgcccacaccaaagcccgcatcgaaagcattgatgacgaaaaaatgcgtgccgaccttaccgccggcaaagtcgtcatcgttgccggcttccaaggcatcagcagtgaaggtaatatttccacgctcggacgcggcggttccgacacttccgccgttgcgctcgccgcagccctcaaagcggacgaatgccaaatctataccgacgtggacggcgtgtacaccaccgatccgcgcgtcgtacccgaagcgcgccgcatggatacggttacatttgaagaaatgatcgaattggcaagcctcggctcgaaagtcttgcaaatccgttcagtagaattcgccggaaaatacaaagtgcgcctgcgcgtattgagcagcctgcaagacggcggcaatggcaccttaattacctttgaagaggacgacaacatggaaagagctgccgtaaccggtatcgcattcgataaaaaccaagcccgcatcaacgtgcgcggcgtacccgacaaacccggcgttgcctatcagattttaggcgcggttgccgatgccaacatcgaagtcgatatgattatccaaaatgtcggcagcgaaggcacaaccgatttttcctttaccgtaccgcgcggcgattacaagcagactttggaaatcctgtcggaacgccaagacagtatcggcgcggcttctattgatggcgacgacaccgtgtgcaaagtctccgcagtcggtttgggtatgcgttcgcacgtcggtgtagccgccaaaatcttccgcacgctcgccgaagagggtatcaacatccaaatgatttccacctccgaaatcaaagtttccgtattgattgatgaaaaatacatggaactggcaaccagggtattgcataaagcctttaatttgggctga

SEQ ID NO: 38895 - DNA, 966 bp, Neisseria meningitidis; identical to SEQ ID NO: 38346

SEQ ID NO: 38896 - DNA, 207 bp, Neisseria meningitidis
  misc_feature 192, 193, 194, 195, 196: 'n' is a, c, g or t
atgtcgctttttattaccgacgagtgcatcaactgcgacgtatgcgaacccgaatgccccaatgatgccatttcccaaggcgaggaaatttacgaaatcaaccccaacctctgcacgcagtgcgtcggacactacgatgagccgcagtgccagcaggtttgcccggtggactgcatcctgattgacgaagannnnncacacacttaa

SEQ ID NO: 38897 - DNA, 474 bp, Neisseria meningitidis
atgcaagttaccaaaaatttcagtctgcgcgagttgacacgcagtgaaaccgcgcgtcgcgcaggtgtaccgaacgaaccgtcgcccgccgacatggacaacatttattacaccgcacagcagcttgaaaaaatccgcgaatacgtcggtcgcccgattatcgtaacaagctgcttccgcagcgagcgggtaaacaaattggtcggtggcagcccgacatcggcgcaccggcacggacttgccgccgattgtgacgcatcgggtatgacctcgccggcatttgccaaactgttaatcaaaatgcgtgatgaaagcgcgctgaaattcgaccagttgatactcgaatttcccgagcgcggggacggcgcatgggtacacatcggtttccgacgcaacagcccgcaacgcaaccagatactgaccgcaaccaagaaaaacggcaaaaccgtgtatctgcccgggctgcatccttga

SEQ ID NO: 38898 - DNA, 1677 bp, Neisseria meningitidis
atgtcccaacaatacgtctattctatgctgcgcgtaagcaaggttgtgccgccgcagaaaaccatcattaaagatatttccctttctttcttccccggcgcgaaaatcggcctgctcggtttgaacggcgcgggcaagtccaccgtgctgcggattatggcgggtgtggataaggaatttgagggcgaagccgtgccgatgggcggcattaaaatcggctacctgccgcaagagcctgagcttgatcctgaaaaaaccgtgcgcgaggaagtggaaagcggtttgggcgaagtggctgccgcgcagaaacgtttggaagaagtgtatgccgagtacgccaatcctgatgcggattttgacgcgttggcagaagagcagggccgcttggaagcgattattgcggcaggttcgtccacgggcggcggtgcggaacacgaattggaaatcgccgccgacgcgctgcgcctgccggaatgggatgccaaaatcgataatttgtccggcggtgaaaaacgccgcgttgccttgtgcaaactcttgttgagcaaacccgatatgcttttgctggacgagccgaccaaccacttggacgcggaatctgtcgagtggctggagcaatttctcgtgcgcttccccggtacagtcgttgcggtaacacacgaccgctacttcctcgacaacgccgccgaatggattttggaactcgaccgcggccatggtattccgtggaaaggcaattactcgtcttggctggagcagaaagaaaaacgcttggaaaacgaggcaaaatccgaagccgcgcgcgtgaaggcgatgaagcaggaattggaatgggtgcgccaaaatgccaaaggccgccaagccaagtccaaagcgcgtttggctcgttttgaagaaatgagcaactacgaataccaaaaacgcaatgaaacgcaggaaatcttcattcccgtcgccgagcgtttgggtaacgaagtgattgaatttgtgaatgtttccaaatcgttcggcgacaaagtgctgattgacgatttgagcttcaaagtgcctgcgggcgcgattgtcggcatcatcggtccgaacggcgcgggtaaatcgacactgtttaaaatgattgcgggcaaagagcagcccgattctggtgaagtgaaaatcgggcaaaccgtgaaaatgagcttgattgaccaaagccgcgaaggtttgcaaaacgacaaaaccgtgttcgacaacattgccgaaggtcgcgatattttacaggtcgggcagtttgaaatccccgcccgccaatatttgggacgcttcaatttcaaaggcagcgaccaaagcaaaatcacggggcagctttccggcggcgaacgcggacgtttgcacttggcaaaaaccttgttgggcggtggcaatgtgttgctgctggacgaaccgtccaacgacctcgacgtgggaaccctgcgcgcgttggaagacgcattgctggaatttgccggcagcgtgatggtgatttcgcacgaccgctggttcctcgaccgtattgctacgcatatcttggcttgcgaaggcgactccaaatgggtgttctttgacggcaactatcaggaatacgaagccgacaagaaacgccgactcggcgaagaaggcacgaaaccgaaacgcatcaaatacaaaccggtaacgcgttaa

SEQ ID NO: 38899 - DNA, 933 bp, Neisseria meningitidis
  misc_feature 910, 911, 912, 913, 914: 'n' is a, c, g or t
atgttagacaatttaaccggccgcttcagcaatgtcttcaaaaacatccgggggcaggccaaactgaccgaagacaatattaaagaggccttgcgcgaagtccgcctcgccctgcttgaggcggatgtcgccctgcctgtcgtcaaagagttcgtcaacaacgtcaaagaaaaggccctcggtcaggaagtggctggcagcctgacgccggatcaggcatttatcggcgtggtcaacaaagccctgaccgaactgatgggcagggaaaacaaaacgctggatttgtcggttgcgccgcccgccgtcgtgttgatggcaggtttgcagggcgcgggcaagacgacgaccgccggcaaactcgcccgcctgctgaaaaacgatcagaagaaaaaggttttggtcgtatctgccgacgtttaccgccctgccgcgattgaacaactgcgcctgttggccgaacaggtcggcgtggactttttcccatccgataccaaccaaaaaccggttgaaattgcaactgccgccgtcgattacgccaaaaaacatttttacgatgttttgatggtcgataccgccggccgtctggcaatcgatgaagagatgatgaacgaaatcaaagcccttcacgcggcggttaacccggtggaaactttgttcgtcatcgatgcgatgctgggtcaggatgcggtgaacactgctcaggcatttaatgaagccctgccgctgaccggagtcgtattgaccaagatggacggcgactcgcgcggcggtgcggcattgtccgtacgccatgtaaccggcaaaccgattaaatttatcggtgtcggcgaaaaaatcaacggcctcgaacctttccaccccgaccgtcttgccagccgtatcctcggcatgggcgacgtattgaccctgnnnnncacacacttaattaattaa

SEQ ID NO: 38900 - DNA, 279 bp, Neisseria meningitidis
atgtactaccaagtcggaaataaatgtcttgagaagcaccaggctgaaaacctttatttcagcttggtagtaccaagaatcaaagaaaacggacagattgtcaggccggaatataacggcagcctgtggaagatgtcggacggtcagccgctaaggcttttattggcggaatgcagtctgaaagacaacctgcaaagcggccttgaaacaggctggatagtattcggcatcctcgcgtccgtttactttgtttccctgctgaaaaaggttttgaaatga

SEQ ID NO: 38901 - DNA, 957 bp, Neisseria meningitidis
atgaatataatcgggctggacatctcaaaggataccatagacgcaacattgcataaaacaaacggaagtatccattacattaaatttaagaataatgatgatggattaaaacagtttagattgtggataaagggaaacagaatcagaaaagcctatatcggcatggaggcaacaggcatctattacgaaaaggcagcagatatgctttcttcctactataccgtttacgttatcaatcccttaaaaatcaaggactacgggaaaagcaggtttaaccgtaccaaaaccgacaaagcagattcaaacctgatagcagattacataaaaaggcatcaagatacattgataccgtatcagatacccaaaaacaaagcactgcaaaaactgattaaccttaaaaatcaattacagcaacatcagaagcaaattaaaaaccgtcttcatagcactgaagaagacttcataaggaacatacatcaagacttgatagataccatacaggacaagatggaacaggtaaaaatagccatatccgaacaaatcaaaaaacaaacggacaataaccattaccgcaatcttcaaaccatcccgagcataggcaaagacaccgcatcagttctttatgcgcaactgacagaaaaacattttaaaaccgcaaaccagtttgtatcctatgccggattaagtcccgccatcatacaatcagggacaagcgtaagaggtcggggcagattgagccgatacggaaacagacgattaaaaagtacgctgtatatgcccgccctttgtgcttaccgttttaacgcatttccgaaattaataaataatctgaaaaaagcgggtaagccaaagatggtaattatcgttgccatcatgcgcaaactggcgaagctcgcctattatattgttaaaaccggccagccttacgatgcggaaagacaccgattgaatcaataa

SEQ ID NO: 38902 - DNA, 1164 bp, Neisseria meningitidis; identical to SEQ ID NO: 38788

SEQ ID NO: 38903 - DNA, 1410 bp, Neisseria meningitidis
atggatacacaaatcaaaactgaagccggtcagcagaataaccggcgttatctgaccgtttggcggtggcatttttatgccggtctgctggttatgccttttcttaccctgcttgccgttacgggtttgggtatgctgctgtttgccaatattaccggtaaggagggcgagcggattcatgttgtgccgcaggcaacggtacaacctctgtctgttcaggcggaagcggcacgcagtgccgttaatccggaaacttcgtccgtcgttcagtatattgcgccgcgtgccgatgatatggttgccgtgttccgtgtcaacaatgagggcaaggcaacgatggtcgcggtcgatccttatacggcaaaagtggtcagtaccatgccgcgcaatcagggttggtattacgcgatggatgaaatccacagcgatatgatgctcggttcgacaggtgattatcttttggaaacggctgcatcgctgacgattatcatgataatcagcggtttgtacctttggtgggtgaaacggcgcggcatcaaggcgatgctgctgccgccaaaaggcaaggcgcgttcttggtggcggaatctgcacggcgcgtttggaacttgggtgtcgttgattttactgttgttctgcctgtcgggtattgcttgggcaggtatttggggcggcaagttcgtgcaggcttggagtcagttcccggcaggcaaatggggtgtcgaaccgaaccctgtttcagtcgtgccgacccatggcgaggtattgaacgacggcaaggttaaggaagtgccgtggattttggagcttacgcctatgcctgtttcagggacgactgtgggcaaagacggcattaaccccgacgagccgatgacattggaaaccgtcgaccgttttgcgcgggaaatcggtttcaaagggcgttatcagttgaatttgcccaaaggcgaggacggcgtatggactttgtcgcaagactctatgagttacgatatgattagtccgtttgccgaccgcacggtgcatatcgaccagtacagcggcaagattcttgccgacatccgttttgatgattacaacccgttcggcaaatttatggcggcaagcattgcgctgcatatggggactttgggctggtggagcgtgttggcgaacgtcttgttctgccttgccgtgatttttatcggcatcagcggctgcgtgatgtggtggaaacgccgtccgtccggagcggcgggcatggttccgccggcgcaaaaaatcaagctgcccgtctggtgggcaatggcggtgccgctgctgctgattgcattgcttttcccgaccgcgctgcttgccattgccgtgatttggctgttggataccttgctgctgtcgcggattcctgttttgaggaaatggtttaaatga

SEQ ID NO: 38904 - DNA, 540 bp, Neisseria meningitidis
atgaacatcattgataccgccattcctgacgtaaaactgcttgagccccaagtcttcggcgacgcgcgcggcttttttatggaaaccttccgcgacgagtggtttaaaacccaagtctgcgaacgcaccttcgtgcaggaaaaccactccaaatccggcaaaggcgtattgcgcggcctgcactaccaaaccgaaaacacacaaggcaaactcgtacgcgtagttgtcggcgaagtattcgacgtggccgtcgatatgcgtaaagactcccccactttcggcaaatgggtaggcgagattctgtccgcagaaaacaaacgccaactgtgggtacccgaaggtttcgcacacggcttctatgtactgagcgatgaagccgagttcgtctataaatgcacagactattacaaccctgaagccgaacactcactaatttggaatgatccgaccgtcggcatcgactggccgctacaaggcgagccgaacctgtcgcctaaagacttggccggcaaagtattggctgaagcggtcacgttttaa

SEQ ID NO: 38905 - DNA, 648 bp, Neisseria meningitidis
atgaaaggcgtttacttcgtcagcggcatagacacggacatcggcaaaactgtcgccaccggtatgttggcaaaacaattgttgcagcagggcaaaagcgtgatcacgcaaaagcccgtgcaaaccggttgccaagacatcgccgaagacatcgccgttcaccgcaaaatcatgggcatcccgatgcaggaagcggacaaacaagggctgaccatgcctgaaatcttcagttatccagcttcgcctcatctcgctgcccgtcttgacggcagggctttggacttggacaaaatccgcaccgccacgcagcaactggcggcgcaatacgaaatcgtcttggtcgaaggcgcgggcggattgatggttccgctgacggaaaacctgttaaccattgattatatccgtcagcaaggctatcccgtcatcctcgttaccagcggacggcttggcagtatcaaccacactttactcagtttcgccgcgctcaaacaatacggcatccgcctgcacagcctgattttcaaccatattcacgacagttccgacgaatgtgtcgcccaagacagcctgagctacttgaaatgccgtctgaaagccgatttttccgaagcggaatggatggagttggcaaaaacagacgcggtataa

SEQ ID NO: 38906 - DNA, 627 bp, Neisseria meningitidis
atgaaaaacatcgtcatcctgatttccggacgcggcagcaatatgcaggcaatcgtcaatgccgccattcccaacgtccgcattgccgccgtgttgagcaacagcgaaacggctgccggtttgcaatgggcggccgaacgcggcatcccgaccgatagcctgaatcataaaaactttgaatcacgacttgccttcgatacggccatgatggaaaaaatcgacgcatatcaacccgacttggtggttttggcaggttttatgcggattctgacccccgagttttgcgcccattacgaaggcaggctgatgaacatccatccgtccatcctgccttcatttactgggcttcatacgcacgaacgcgctttggaagcgggttgccgcgttgcaggctgtacgattcactttgttacggccgagctggattgcggcccgattgtatcgcaagggattgtgccgatacttgatggtgatacggcagacgatattgccgcccgggttttggctgtcgaacacaaactctatccgaaagccgttgccgattttgccgccggccgcctgattatcgagggaaaccgcgtcagaaattcggaaaacgccgatgccgcccgtttcctgacggcgtaa

SEQ ID NO: 38907 - DNA, 438 bp, Neisseria meningitidis
atgcccgtgaaaaaagttgaaaaaaacatcttggtgctgcacggcgcggacaaaatgttcgagctggtcgataaggttgaggattacccgaactttctgccgtggtacagcaaaaccgaggtcatcgggcgcaacggcaacgaactgaaggcgcggctgtttatggactatatgcacgttcgccaatcattcgccacgcacaaccgcaacattccgggcagggaaatccgtatggaactgctcgagggtccgttcaaaaccttacgtggaacgtggaaatttatcgatttgggcgacgatatgtgcaaaatcgaattcaatttggaatacgatttttccaatgccgttttgtccgccttaatttcccccgtcttcaaccacctttccgccacgctggtcgaagcgttcgtcaaagaggcagaccgccgttatgcttga

SEQ ID NO: 38908 - DNA, 264 bp, Neisseria meningitidis
  misc_feature 241, 242, 243, 244, 245: 'n' is a, c, g or t
atgattcattataaaataaccccgtcccctctcgaccacgagtggcacatcctgctgacattcacacaagatgatgatcttcctatagaaataagcctgccgaattgggtaccgggcagctatctgattcgggatttttcccgccacatcacttctatccatgcatcctgtaacggcacgtccatgccgctcgaacaaattgcaaaaaaccgctggcacgctgccgccgtacgcggcgagnnnnncacacacttaattaattaa

SEQ ID NO: 38909 - DNA, 945 bp, Neisseria meningitidis
  misc_feature 926, 927, 928, 929, 930: 'n' is a, c, g or t
gtgaaaccgctgcgcagactgacaaacctccttgccgcctgcgccgtagcggccgccgccttcggacagcccgccctcgcggcggacttggcgcaagacccgttcattaccgataacgcccaacggcagcactacgaacccggcggcaaataccacctcttcggcgacccgcgcggcagcgtttccgaccgcaccggtcaaatcaacgtcatccaagactatacccaccagatgggcaacctgctcatccaacaggcaaacatcaacggcacaatcggctaccacacccgcttttccggacacggacacgaagaacacgcccccttcgacaaccacgccgccgacagcgcaagcaaagaacaaggcaacgttgacgaaggctttaccgtgtaccggctcaactgggaaggacacgagcaccatcccgccgatgcctacgacggcccgaagggcggcaattaccccaaacctacgggcgcacgcgacgaatacacctatcacgtcaacggcacagcacgcagcatcaaactcaatccgaccgacacccgcagcatccggcaacgcatatccgacaattacagcaacctcggcagcaatttctccgaccgcgccgatgaagccaacagaaaaatgttcgagcacaatgccaagctcgaccgctggggcaacagcatggagtttatcaacggcgtcgccgccggagcactcaacccctttatcagcgcgggcgaagccttgggcataggcgacatactgtacggaacgcgctatgccatagacaaagccgcaatgcgcaacatcgcccccttgcccaccgagggcaaattcgccgtcatcggcggcttgggcagcgtggcgggctttgaaagaatacgcgcgaagccgttgaccggtggatacaggaaaaccccaatgccgccgaaacnnnnncacacacttaattaa

SEQ ID NO: 38910 - DNA, 423 bp, Neisseria meningitidis
atgagcatcatgcaagttgaggtggtaagtagcgagcagaaaatctattcaggcgaggcaacatttatcgttgttccgactgtacagggcgaactcggtatttatccgcgacacgagccgattatgagtttggtgcggccgggggctttgcgtttgaccgttccgggcgaggataaagaggttttggttgctgtttccggcggtgttttggaagtacagcctgataaagtaactgtcttggcggatgttgccgtccgcagtgcagagatggatcaggcacgtgcggaagaggcgaaaaaagccgcagaagcgggcatttcccaagctaaagacgataaggctttggcggaggcgcataaagcattggctgctgcgattgcacagcttaaaactttggactatatccgttcgcacaagaaataa

SEQ ID NO: 38911 - DNA, 1497 bp, Neisseria meningitidis
atgaccacggaaaaccaagccggcagtccggcatccggaatcggcacgtccgaacaaacaaaagccgcgccgaaagcaaaaaaaacattcgatccgcgagccagcgtgattcaaatccatcccgaaggcgaacgcatccatcccaaaaaggcggaaggacggttcgccaaactgcgtatcgccgccgtattggcgacgcagtttgtgttttacgtcattccgtggttcaactggagcggcaggcaggccgtcgttttcaatatccccgaacggcatttcttcattttcggattgtcgttgggggtgggcgatttgatttaccttgccttgctgctgatgatttgcgccttcgggctgttttggtggacgacgattgcagggcgactgtggtgcggctattcctgcccgcaaacggtttacaccgaaattatgctgtggattgacaacctggtcgaaggcgatagaaacaaacggctgaaactggaaaaatcgccgtggaatttcactaaaatccgcatcaaagccaccaaatacctgctgattttccttgtctgcgcgtggacgggcatcacgtttgcaggctggtttgtccctatccgccagttcgttcccgatttattcactggagcagcaggtggcggcgcgatgtttgccgcagcgttttatggctttatgaccttcttcttcgcccacattatgcgtgaaaaagtatgcctgcatatgtgtccgtatgcacgtttccaaagcgcgatgttcgacaaggacacgctgattgtttcttatgacgcggaacgcggcgaaccgcgcggcgcgcgcaagaaaacggtcaataaggaagaggcgggtttgggcgactgcatcaactgtgcgatgtgcgtccaagtctgccccgtcggcatcgacatccgcaacggtctgcaataccaatgtatcggctgcgccgcctgtatcgacgcgtgcgatgagattatggacaaaatgggctatccgcgcggattaatccgttatacgaccgaaagcgcgctggaacacgaatattctgaaaaagacattaaaaaacggctgctcagaccgcgcgtggcaggttacggcgcggtgttggcgttagttatcattgccttcctggccggtttgtccacgcgcaaaatggtcgaggtcgatattttgaaagaccgtggcgtactggtgcgcgaaaacgccaaaggctggctggaaaacgcatacagcctgcgtatcatcaacaaaagtgaaaaagaacagctcattaccgcaagtgtcaaaggctttgacgaaatcgccctgaccgggctgcccgaaggcggtatcaaggttgccccgcgcgaaacggtaacccttcccgtccaagtgtccaccattccggaatacgcggacaaaggcagccaccctatcgaatttaccttccaataccgcgaaagcggcgcgcccgacggcaagccggtcgtcttggaagaagatgcaacctttatcggagaataa

SEQ ID NO: 38912 - DNA, 651 bp, Neisseria meningitidis; identical to SEQ ID NO: 38345

SEQ ID NO: 38913 - DNA, 306 bp, Neisseria meningitidis
atggctaagaaagcacttattaatcgtaatctgaaacgtcaagctttggctaaaaaatatgcggctaaacgcgcggcaattaaagcggtaatcaatgattcgaatgcaactgaggaagagcgttttgaggctcgtttgaggtttcaatccattcctcgtaatgcggcacctgtgcgtcaacgtcgtcgttgtgctttgacaggtcgccctcgtggtactttccgtaaatttggtttgggtcgtattaaaatccgtgaaatcgccatgcgtggcgaaattccgggtgttgttaaagccagctggtaa

SEQ ID NO: 38914 - DNA, 363 bp, Neisseria meningitidis
atgaatctgccacgcaaccgctttatcctgctctcggcattgtggtttgcaggcagcatttactcactgcttttcaaagctgccgaaaccgcgccaccgccttttccgcattttgacaaagtggcgcacctcgccctgtttttcgcacaaatctggcttctgaccaaagcattcagaaccgacaaccgccccatcccctatcgcagcctgatggtctttgccctctgtttcgccctcttcagcgaatgcgcgcaggcatggtttaccgcaacgagaaccggcagtttgggcgatgtccttgccgacctgacgggcgcagcccttgccctctttaccgcgcgagctgcctgccgcccggactaa

SEQ ID NO: 38915 - DNA, 447 bp, Neisseria meningitidis
atggatcaggcaaaacgtacagcctatgttaaaattattaacgctttattcgacggagctgtcaaggtgcagcccggtcaaattaccgaaaccgtcgttgatatggcggacaagatgtttgacgagattgcgacctgccatgagcgcatcaggccgatggcggtgttggcagacggtattgcagaaagtattgtcaaacttgcgccaaacgaaattccgcttatttttgggaattcgtcgtttggaagctatctgaaaagtaaaacccgtgatgaagtgtttaacgtgttgaagcaaagcaaggttaataatgccggtaaagtccttgaggcattttacgaaagctggttaaagtacactgcaaaagaccgccgtctgaaagtctgcatcgtaaccgcgcaatcccgttggcgttcgcgctttgaaatcgaattgctgggaatttaa

SEQ ID NO: 38916 - DNA, 1134 bp, Neisseria meningitidis
atgaaaagaattctttgcattacaggtaccagagccgacttcggcaagctaaaacctttattagcctatattgaaaatcacccagaccttgaattgcatttgattgtaactggtatgcatatgatgaaaacatatggcagaacctacaaggaagtaactcgagaaaactatcaacatacatatctgttttcaaatcaaatccaaggtgaaccaatgggtgccgttttaggcaataccattacgtttatctctcgtctatctgatgaaattgaacctgatatggtcatgattcacggcgaccgtttagaagcactagcaggcgcaactataggtgcattaagcagccgtttagtttgccatatcgaaggtggtgaactatctggtacagtagatgactccattcgtcattctattagtaaactttctcatatccacttggtagcaaatgaacaagctgtcactcgcctagtgcaaatgggagaaaaaagaaagcatattcacatcatcggctcccccgatttagatgttatggcctcttccaccctcccatccttagaagaagtcaaagaatattacggtttaccatacgaaaattatggtatttctatgtttcaccccgtgactacagaagcacatttaatgccacaatatgcggcccaatatttcaaagcattagaattaagtggccaaaatatcattagcatctaccctaataatgacactggcactgaaagtattctgcaagaattattaaaatatcaatctgataaatttattgcatttccttccattcgatttgaatattttttagtcttattgaaacatgctaaatttatggtcggcaactcaagtgcaggtattagagaagctcctctctacggtgtcccttcaattgatgttggtacacgccaaagtaaccgccatatgggaaaatctattattcatacagattatgaaactaaaaatatctttgatgcgattcaacaagcatgcagtttaggcaaatttgaagcagatgatacctttaatggcggagatactcgcaccagcacagaaagatttgctgaagtaatcaacaatcctgaaacgtggaatgtttctgctcaaaaacgttttatcgatttgaatctttaa

SEQ ID NO: 38917 - DNA, 828 bp, Neisseria meningitidis
atgaaactgattgaacaacatcaaatttttggcggttcgcaacaagtttgggcgcatcatgcccaaacgctgcaatgcgaaatgaaatttgccgtctatttgccaaataatccagaaaatcgaccgcttggtgtgatttattggctttccggcttgacgtgtacggaacaaaatttcattaccaaatcaggctttcagcgttatgcggcagaacatcaagtaattgtggtggcctccgataccagccctcgcggagagcaagtgccgaacgatgatgcttacgatttaggacagggtgcaggcttttatttgaatgcgaccgaacagccttgggcggcgaattatcaaatgtatgattacattttgaacgagctgccccgtctgattgagaaacactttcctaccaacggcaaacgttccattatggggcattcaatgggcggacacggcgcattggtattggcgctgcggaatcaggaacgttatcaaagtgtttctgccttttcgcctattttatcgccaagcctcgtgccgtggggagaaaaagcctttactgcttatttagggaaagaccgtgaaaaatggcagcaatatgatgcgaactcactcattcaacaaggctataaagtgcaaggtatgcgcatcgatcaaggcttggaagatgagtttttgccgacacaattgcgtaccgaagattttatcgaaacctgccgtgcggcaaaccagccggtcgatgtgcgtttccataaaggctacgatcacagctattacttcatcgccagttttattggcgagcatattgcttatcacgccgcgtttttgaagtaa

SEQ ID NO: 38918 - DNA, 249 bp, Neisseria meningitidis
atgctgacctcggaacaagtaaaagccatgattgaaggcgtggcaaaatgcgaacatatcgaagtagaaggcgacggacaccattttttcgccgtcatcgtttcatcagaatttgaaggcaaggcacgcctcgcgcgccaccgcctgattaaagacggactcaaagcccaactggaaagtaacgaactgcacgcactttccatttcggttgccgccactccggcggaatgggcagccaaagcacaataa

SEQ ID NO: 38919 - DNA, 516 bp, Neisseria meningitidis
atgaaacgcaccaaaaaataccctttcttaacgttgcagcggcaacgtttccatttgaactttgaaaacgcctcttccgccgccggcatcccagccgaacgcgatttctaccgctgggcgtggtctgccttgaaaaatgaataccgccgcgccgacatcagcctgattcttctggacgaagaagaagcccgagcctacaaccgcgactaccgcggcaaagattacgccaccaatgtattgagtttcgcgctcaacgaaggcgaaatcctgccctgccaagtttcggaaaaactgtacggcgatttgattatctgcccgcaagtggttttgaaagaagccgccgaacaaggcaaaacacccgagcagcattttgcccacctgaccatacacggtactttacacctgatgggctacgaccacatcgaagacgacgaagccgaaataatggaagccgaagaaatccgcctgatgcgggcggcaggcttccccaacccctaccaagaggacggacattaa

SEQ ID NO: 38920 - DNA, 1494 bp, Neisseria meningitidis
atgttgtcaggactccccatccccaaagacatcgcgcgcccgcccgaaacgatattggtcaacatcacgccgcaggaaacgcgcgtagcggtgttggaggaaaacaatatctgcgagctgcacatcgagcgcaacagcgaacacagcctagtcggcaatatctatttgggcgtggtgcgccgcgtgctgcctgggatgcagagcgcgtttatcgacatcggcttggaacgcgcggcgtttttacacatcgtcgatgtcctcgaacaacgccgcaaccccgaagaaacccagcgcatcgaacatatgctgtttgaagggcagtctgttttggtgcaggtcatcaaagacccgatcaacaccaaaggcgcgcggctttctacccaaatctcgctggcggggcgtttcctcgtccatcttccgcaagaagaccacatcggcgtgtcccaacgcatcgaagacgatgccgaacgcagcagcctgcgcgaacgcctcgacaagctcctgccggaaaatgcctgccggggctacatcatccgcaccaacgccgaaaacgccaccgacgaacagctccagtccgacatcgactacctgaccaaagtgtgggaacacatccaagaacaggcgaaaatccggccgccggaaaccctgctttatcaggatttgcccttgagtttgcgcgtgttgcgcgatatggtcggctgcgacacgcaaaaaatcctcgtcgattccaccgtaaaccacggccgcatgacgcgttttgccgaacaatacgtccacggcgcattgggcaggatagaattgttcaaaggcgaacgcccgctatttgaaacccacaacgtcgaacaggaaatcagccgcgccctgcaaccgcgcgtcaacctcaacttcggcagctacctgattatcgaatccaccgaagcgatgaccacgatagacgtgaacacaggcggcttcgtcggcgcacgcaatttcgatgaaacgattttccgcaccaacctcgaagcctgccacaccatcgcccgcgaattgaggctgcgcaacctcggcggcatcatcatcatcgacttcatcgatatggcgcaggaaagccaccgcgaagccgtgttgcaggagcttgccaaagccctcgccttcgaccgtacccgcgttaccctgcacggttttaccagcctgggactggtcgagctgacgcgcaaacgctcgcgcgaaaacttaaaccaagtcctctgcgaaccctgcccttcctgccaaggcagaggccgtctgaaaacgccgcaaaccgtgtgctacgaaatccagcgcgaaatcgtccgcgaagcgcgccgttacgatgccgaaagtttccgcatcctcgccgcccccaacgtcatcgatttgtttttggacgaagaatcgcaatccttggcaatgctgatagatttcatcggcaaaccgatttctctggcggtcgaaaccgcttacacgcaggaacaatacgatatagtgctgatgtaa

SEQ ID NO: 38921 - DNA, 330 bp, Neisseria meningitidis
atgtttgatggcgaagtagaagcagatgaaagttattttggcggacaacgcaaaggcaaacgtggtcgcggtgctgccggtaaagtcgccgtattcggtcttttgaagcgaaatggtaaggtttatacggttacagtaccgaatactcaaaccgctactttatttcctattatccgtgaacaagtgaaacctgacagcattgtttatacggattgttatcgtagctatgatgtattagatgtgcgcgaatttagccattttagcttcgctgaaacttcgttttcgtatcaatcacagcacacattttgccgaacgacaaaaccatattaa

SEQ ID NO: 38922 - DNA, 537 bp, Neisseria meningitidis; identical to SEQ ID NO: 37832

SEQ ID NO: 38923 - DNA, 1155 bp, Neisseria meningitidis
atgactgaaactactcaaaccccgaccttcaaacctaagaaatccgttgcgctttcaggcgttgcggccggtaataccgctttgtgtaccgttggccgtaccggcaacgatttgagctatcgcggttacgacatcttggatttggcacaaaaatgcgagtttgaagaagtcgcccacctgctgattcacggtcatctgcccaacaaattcgagctggccgcttataaaaccaagctcaaatccatgcgcggcctgcctatccgtgtgattaaagttttggaaagcctgcctgcacatacccatccgatggacgtaatgcgtaccggcgtatccatgctgggctgcgttcatcccgaacgtgaaagccatccggaaagtgaagcgcgcgacatcgccgacaaactgattgccagcctcggcagcctcctgctgtactggtatcaatattcgcacaacggcaaacgcattgaagttgaaagcgacgaagagaccatcggcggtcatttcctgcaactgttgcacggcaaacgcccaagcgaatcacacatcaaagccatgcacgtttcactgattctgtatgccgaacacgagttcaacgcttctacctttaccgcccgcgtgatcgccggtacaggctctgatatgtactccagcattaccggagcaatcggcgcgttgaaaggtccgaaacacggcggcgcgaacgaagtggcttacgatattcaaaaacgctaccgcaatgccgacgaagctgaagccgacatccgcgaacgcatcggccgcaaagaaatcgtgatcggtttcggtcatccggtgtataccatttccgacccccgcaacgttgtcattaaagaagtggcacgcggtttgagcaaagaaaccggcgatatgcgcctctttgacattgccgaacgtttggaaagcgtgatgtgggaagagaaaaaaatgttcccgaatctggactggttctctgccgtttcctaccaaaaattgggcgtaccgaccgctatgttcacaccgctgttcgtaatttcccgtacaaccggttggagcgcacacgttcttgagcaacgcaaagacggcaaaatcatccgtccgagcgcaaactacacgggccctgaagatttggcgtttgtggagattgaagaacgctga

SEQ ID NO: 38924 - DNA, 618 bp, Neisseria meningitidis
atggtcattgcagccattatggcgatgatagccctccccaatatgagccaatggattgcatcccgccgcattgccagtcacgcggagcaggttgccaaccttttgcgtttctccaggggagaagccgtccggctcaatcttcctgtctatatctgtcctgttcaagttaaaaaaggcggtgcgcccaacaataaatgtgactccggcaagaaggggcagggaatgttggcttttggcgataagaatggcaataagacatatgacggcgatacggcggatgttcttctccgcagtgtggtattgaatgatgatatcaatgataagcggattaattatgccttcaaccatatcgctttcggttcgtctcagccgaccgccgaccgtgtagtttggacattcaatcaaaacgggacgttcggttatacgaaagaccagcatcttacaagcaaatccagctttttttattccgacggttatatccaaatcgtgctgacagatgcgagagcagtttcagatgccgataagaaattccgttcggcggtggttttgattgacagcagcggcagggttgaggtttgtcctagaaacgataggcgtaccgtatgccaatataaatga

SEQ ID NO: 38925 - DNA, 435 bp, Neisseria meningitidis
atgaactttgctttatccgtcatcacatttaccctcgcctctttcctgcccgtcccgcccgccgaagccgccgtctttacttggaaggacggcggcggcaacagctattcggatgtgccgaaacagcttcatcccgaccagagccaaatcctcaacctgcggacgcgccaaaccaaaccggcggtcaaacccgcccaagccgacgcagggaagcgcacagacggcgcggcacaggaaaacaatcccgacactgccgagaaaaaccggcagcttgaggaagaaaagaaaagaattgccgaaaccgaacggcagaacaaagaagaaaactgccggatttcaaaaatgaacctgaaagcggtgggaaattcaaatgcaaaaaacaaggatgatttgattcggaaatacaataacgccgtaaacaaatactgccgttaa

SEQ ID NO: 38926 - DNA, 537 bp, Neisseria meningitidis
gtggatttgagggaagtaaaattaggcggcgaaaccatttacgagggcggttttgtcagcatcagcagggataaggtcaggttgcccaacggcaatgaagggcagcgtatcgtcatccgtcatccgggcgcggcgtgcgtgttggcggtaacggatgatgaaaaggtcgttttggtgcggcagtggcgttatgcggcaaatcaggcgaccttggaacttcctgcgggcaagctggatgtggcaggcgaggatatggcagcgtgtgcgctgcgagaattggcggaggaaacaccttatgttgccgacagcgtgcgcctgctgtacagtttttatacggcggtcggtttttgcaacgaaaaaatgtatctgttcgaggcggaaggcgtgcgtttgggcagtacgcttgccaatgacgaagacgagattacggaaaccgtattgatgtcgaaagaagaagtccgtcaggcattggcaaacgatgaaattaaagatggtaaaacattaatcggtttgcaatactggctgatgaaggattga

SEQ ID NO: 38927 - DNA, 324 bp, Neisseria meningitidis; identical to SEQ ID NO: 37053

SEQ ID NO: 38928 - DNA, 1302 bp, Neisseria meningitidis
atgccgtctgaaaccgcccgccccctttatgcggacacgtgcgccgcacacacgctcgtctggttccgccaaaacctccgcatccgcgacaacgccgccttatgcgccgccgttgccgaaggtttgcccgttatcggtatttggattgacgatgccgaaacagacaaccctcgccgcgccgcgttctaccgccaatccgccgccgaactcgcccaagggcttgcagggcgcggcattccgttctacacggcggcatcgcctgccgggcttgtccggctcgccgtccgcctcaatacccgcgccgtcatcgccgacgaatcccatacttttgccgacaaactcaccgacaacgccctttggcatgagctggacaaacacggcatcgcgttaaccttcgtcaacgaccgcgccgttttcggcaaaaccgacctgatacccgacggcggcacggcatatgccgatttcgaccgctaccgcgaagtatggctcgaccgcttttccaagcagccccccgccggttcggacctattcgcggcataccgccaacccttccccgaaaacctttccgccccgcagcctgccgtgctttcagacggcatcttcctgccgcgaaacggcggtgaaacggcggcttggcggcagtggcggcggtttctcgaacaggcggattcctactccgtcttaaaggatttcccctcgcgcaaaaacacttcgctgatgggcgcgtatttgagtgccggctgcatctcgccgcgcctgctcgcgcggaaaagcctcgaacgccgtctgaacgcgtggacggacaacatcatccgccgcgattttttccttcaacttgccttgcagcacacggatgacgacccttcagacggcaatcctgaacacaccctgcgcctgacgctttggcagcagggccggaccggcattccgattatcgatgccgcgatgcgctgtttgcacaaaaccggcagcctccaccccgccctgagacgcttgagcgcggattttttctgccacgttttaaacctcccccgccgcgaaggcgagatatggtttgcccggcagctgaccgatttcgatgcagcaatcaaccaaggcaactggcggcttgccgcctcacggcacacctgccccgacattgccgccgccgcacacaaaaccgaccccgacggcacctttgtcagacggcacattcccgagcttgcccacctgtccgccgacaccgtccacacgccttggcggtttgcctgttcggtcgatacccacggctatcccgcccatcctgtcgccggtattccctaa

SEQ ID NO: 38929 - DNA, 429 bp, Neisseria meningitidis
atgatatctatttttaaagcttattacgatgtttatgaatttaatggggaactattaaaaagatgtatatttttagatgaagaaaatgaagaaaataatgaaataattaaagatagaatatatggatacttaatttatgttttaacaggagacctttatctacaaaaagacatagatgaaaatttagaatttatccatcaagcagaaaataatcccaatgaagtttattcaggaggtggacaaggtttttgctgggatatttctgctgaaaaagtagttttctataacaacgaatttgatgaagaagacggctggcctgatttaagctgttcgctgcatacttttaaaactgctttaattgcttggaatgcttttttgcaattgcctaaaagtattcattcggtggtggaaaccgtgattgaggaataa

SEQ ID NO: 38930 - DNA, 489 bp, Neisseria meningitidis
ttgacacagccggccgaattttccgactaccaacgtgtttatttggatgaaacaggatttgaccgctacctgttccgtccctatgcccgcagcctgaaagggcaaatagtgaaagcgcagataagtggaaaaagataccaacgcttatctttggtgtccgcacaagtcggcaaccggctgattgctccgatggtttatcaaaatacgatgaccggagtcttttttgaagcgtggtttcagcaatgcctactgcccgcattgactcaaaaatcggtgattattttagataatgcgcgatttcaccgtatgggtgtcttacgggaaatggcggaaaaattgggacataaggtattgcctcttgcaccttattcacctgagctcaacccgattgagaaagtgtgggcgaatattaagcggtatctgcgaaccgttttgtctgattacgcccgatttgacgatgcactactgtcctattttgattttaattga

SEQ ID NO: 38931 - DNA, 378 bp, Neisseria meningitidis; identical to SEQ ID NO: 37228

SEQ ID NO: 38932 - DNA, 870 bp, Neisseria meningitidis
  misc_feature 8, 9, 10, 11, 12: 'n' is a, c, g or t
gtgtgtgnnnnngacgaaatcctgattcccgcgcccgactaccctttgtggacggcggcggcaacgcttgcgggcggtacggtacgccattatctgtgcgacgaagaaaacggctggttccccaaccttgccgatatggaagccaaaatcacgcccaaaaccaaagccatcgtcgtcatcaatcccaataatccgacaggcgcggtgtacagcagggaaatcctgttggaaatcgccgaactggcgcgcaagcacggtttgattattttcgccgacgagatttacgataaaatcctttatgacggcgcggttcaccaccacatcgccgcgcttgcccccgaccttttgacggtaacgttcaacggtttgtccaaatcctaccgcgtcgccggcttccgccaaggctggatggtgctcaacgggccgaaacatcacgcaaaaggttacatcgagggtttggatatgctctcgtctatgcgcctgtgtgccaatacgccgatgcagcacgcgattcagacggcattgggcggctatcagagcatcaacgaatttattttgcccggcgggcggcttttggaacagcgcaacagggcgtgggaactggtcagccaaatccccggcgtgtcctgcgtcaaaccgatgggcgcgatgtatatgttcccaaaaatcgataccgaaatgtaccgtatccacgatgacatgaaattcgtttacgatttgctggtgcgcgaaaaagtcttgctggtacagggaacggggtttaattggattaaacctgaccatttccgcattgtcacgctgccttacgtccatcagattgaagaggcgatgggcaggttggcaagattcctgcaaacctaccgccaataa

SEQ ID NO: 38933 - DNA, 2205 bp, Neisseria meningitidis
ttgttgcccttacttttggcatcttgcatcggcggcaatttcggcgtgcagcctgttgtcgaatcaacgccgaccgcgtaccccgtcactttcaagtctaaggacgttcccacttcgccccctgccaaaccttctatagaaaccacgccggtcaatcaacctgccgtcggtgcggcaatgcggctgccaaggcggaatatcgcagcttttgataaaaatggtaatgaaattcccgatagtaagcaggcagaggagtatctgccgctcaaagaggaggatatcctgtttttagacggtacgccgaaagaacaggctgacaaacttaaaaaggaaatcaacggacggtatcctaatgtaacaatctacacgtccgatttaaaagatgctgtgtataaatatgaacatgtccgggccggatatgtttatactagatttggaacagatgaaatcgaacagaactcaggtggtaagcaggttacccaccgcttaggttatgatggttttgtatattattctggagaacgtccttcccaatctttaccgagcgcgggaacggtgaaatattccggaaactggcaatatatgaccgatgtcaaacgtcatcgagcaggtaaggcggttggcattgacaatttgggttatatcacattttatggtaacgatgttggtgcaacttcttatgcggctaaggatgtcgacgaaagggaaaaacatcctgctaaatatacggttgatttcgataagaaaactttgacaggtcaattaattaaaaatcagtatgtgcaaaagaaaaccgatgaaaagaaatcactgaccatttacaacattactgcaaaattggacggcaaccgctttaccggcagtgccaaggtcaatcctgatttagcgaaaaaccctgccggtaatgagcgtttgtttttccatgccgatgccgatcagcggcttgagggcggttttttcggcgataacggagaagagcttgccggacggtttatcagcaacgacaacagcgtattcggcgtattcgcaggcaaaaaaacagagacagcaaacgcagcagatacaaaacctgccctgccgtctggaaaacacaccaaaatcttggattctctaaaaatttccgttgacgaggcgactgatggccatgcccgtaagtttgccatttcctctatgcccgattttggtcatcccgacaaacttcttgtcgaagggcgtgaaattcctttggtaaacaaagaacaaatcatcaagcttgccgacggcaggaaaatgaccgtcagtgcttgttgcgattttctgacctatgtgaaactcggacggataaaaaccgaacgccccgccgtcaaaccgaaggcgcaggatgaagagggggacgaagaggatgcaggcgttgataacggcgaagacgaagaagaaatcgccgaagaaagcgaagacgaagtttccgaagatgaaggcgaagaagccgaagtttccgaagatgaaagcgaagaagacgaagaaatcgtcgaagaagaaaccgaagaagaagctgaacccgaagaagccgaagaaaccgaagaagaatcgccggcagaaagcggcagcggttcaaacgccatcctgcctgccccggaagcccctggcagggacatcgaccttttcctgaaaggtatccgcacggcggaagccgacattccgcaaaccggaaaagcacgctataccggcacttgggaagcgcgtatcggcgaacccattcaatgggacaatcaggcggataaagaagcggcaaaagcagtatttaccgttgatttcgacaagaaatcgatttccggaacgctgacggagcaaaacggtgtagaacctgctttccatattgaaaaaggcaagattgagggcaacggtttctacgcgacagcgcgcactcgggataacggtatcgacctttccgggcagggttcgaccaaaccgcagatcttccaagctaatgatcttcgtgtagaaggaggattttacggcccgaaggcggaggaattgggcggtactattttcaataaggatgggaaatctcttggtataactgaaggtactgaaaataaagttgaagctgaagttgaagttgaagttgaagctgatgttggcaaacagttagaacctgatgaagttaaacacaaattcggcgtggtattcggtgcgaagaaagatatgcaggaggtggaaaaatga

SEQ ID NO: 38934 - DNA, 1575 bp, Neisseria meningitidis
atggctcaaatccaaatgagcgcaaatgttaaaaccatcaacgccgtctttgccgccatgctggtaggtacagtcggctattttatttattggggcttgggttatacccattacaattacgccgccttattcattattgccacgatgttcggcgtgtttatggcgttcaacatcggcggcaacgatgttgccaattctttcggcaccagcgtcggtgcgggtacgctgaccatcccgcaggctttgctgattgcggcggtatttgaggtcagcggcgcggtcatcgcgggcggcgaggtaaccaataccatacgcaaaggcatcgtcgatttgaagggtgttgatttcgaacccatacagtttgtgtttattatgatgtccgcgcttttggcggcggcgttgtggctgttgtttgcctcgaaaaaagggcttccggtatctaccacccattccattatcggcggcattgtcggcagcgcggtatgtatggcggtaatgaacgatgccgcatcgggcgatttgatacgttggggcaagctgggcggtattggtgtttcttgggtattgtcgcccgtgttgggcggcgcggtgtcctatttcctgttttcgcgcgtcaagaaaaacgtcttagattacaacgcttgggcggaaggcacgctcaagggcatcaagcaggaaaaaaaggcctataaagaacggcaccgcctgtttttcgagggtttgtccgaagccgaaaaagtcgagtacgccaccaaaatggcgcacgacgcgcaaatttacgacgaacccgaattcgatccgcaagagctgcaatcggagtattaccgcggtctttatgcgttcgacaaccgtaaaaacaatgtcgattcctacaaagcactgcattcttggattccctttatcgcttcgttcggcgcgatgatgatttccgctatgctgattttcaagggcttgaaaaacctgcatttggggatgagcaacgtcaacagcttcctgaccatctttatgataggcgcggcggtgtggatggggacgtttgtgtttgccaaaagcctcaagcgtaaagacttgggcaaatcgacctttcagatgttttcatggatgcaggtctttaccgcctgcggcttcgcattcagccacggggcgaacgatatcgccaacgccatcggtccgtttgccgcgattatggatgttttgcgtaccaacagcgttgccgcgcaaaatgtcgtccccccgattgcgatgctgactttcggcatcgcgctgattgtcggtttgtggtttgtcggtaaagaggtgattaaaaccgtcggtacgagtttggcggaaatgcaccccgcctcgggttttaccgccgaactgtccgccgcatccgtcgtgatgggcgcgtcgctgatggggctgcccgtgtccagtacgcatatcttggtcggcgcggtactcggcatcggtctggtcaaccgcaatgccaactggaaactgatgaagcccatcggtttggcgtgggtcattaccctgcctgccgccgccgtattgtcggttgtctgctacttggttttacaggcagtattctga

SEQ ID NO: 38935 - DNA, 810 bp, Neisseria meningitidis; identical to SEQ ID NO: 37887

SEQ ID NO: 38936 - DNA, 1635 bp, Neisseria meningitidis
atgaccaaattcattttcgtaaccggcggcgttgtctcctcactgggtaaaggtatcgccgccgcttctattgccgccatcctcgaatcgcgcggcttgaacgttaccatgctcaagctcgatccttatatcaacgtcgatcccggcacgatgagcccgtttcaacacggcgaagtgttcgtaaccgacgacggcgcggaaaccgacctcgacttgggacactacgaacgtttcatcgattccacgatgacccgccgcaacagcttcagcacggggcaggtgtacgaaaacgtcatcgccaaagaacgacggggcgactacctcggcggtacggttcaagtcatcccgcacattaccgacgaaatcaaacgccgcatccacgaaggcgcggcaggttacgatgtggcgattgtcgaaatcggcggtacagtcggcgatatcgaatctttgccattcttggaagccatccgccaaatgcgcagccagctcggccgcaacaatacattgtttgcccacctgagctatgttccttacatcgccgctgcaggcgaaatcaaaaccaagccgacccagcacaccgttaaagaaatgttgagcatcggtttgcaacccgacatcctgatttgccgtatggacaggacaatgcctgcggacgaacgccgcaaaatcgccttgttctgcaacgtggaagaacgcgcgattgtcggcagctacgatgtggacagcatctacgaatgccccgaaatgctgcacgaccaaggcatcgataacatcattaccgagcagttgcagcttaatgtgcagcaggcggatttgaccgcgtggaaaaaaatcgtccacgccatccaaaacccgaaacacaccgtcaaaatcgccatggtcggcaaatacgtcgatttgaccgagtcctacaaatcgctgatcgaagccttgaaacacgcaggcattcacaccgaaaccgacgtacaaattacctttgttgacagcgaaagcatcgagaaaaacaacggcgacgtttctatgctcaaagatatggacgccatcctcgttcccggcggtttcggttcgcgcggcgtggaaggcaaaatcgccgctgtgcgctatgcccgcgaaaacaacgtgccatacttgggcatctgcctcggtatgcagattgcgctgatcgaatacgcccgcgacgtggcaggtttgaaaggtgcgaattccaccgagttcgacctcaaatgcgccgcccccgtcgttgccctgattgacgaatggcaaactgccgacggcagcgtcgaaacccgcgacgaatccgccgatttgggcggcaccatgcgtttgggcgcgcaagaagtcgaattgaaagcaggcagcctcgccgccaaaatctacggcagcgaacacatccgcgaacgccaccgccaccgctacgaagtcaacaacaactacgttcctacgctggaacaggcaggtttggtcatcggcggcgtatccgccggacgcgaacgcttggtcgaaaccatcgaactgccgaaccatccttggttcttcgcctgccagttccaccccgagtttacctccaatccgcgcaaagggcatcctttgttcaccgcgtttgtcaaagctgcgttgaacaataaaaaagcctga

SEQ ID NO: 38937 - DNA, 489 bp, Neisseria meningitidis
  misc_feature 466, 467, 468, 469, 470: 'n' is a, c, g or t
atgaacatcattgataccgccattcctgacgtaaaactgcttgagccccaagtcttcggcgacgcgcgcggcttttttatggaaaccttccgcgacgagtggtttaaaacccaagtctgcgaacgcaccttcgtgcaggaaaaccactccaaatccggcaaaggcgtattgcgcggcctgcactaccaaaccgaaaacacacaaggcaaactcgtacgcgtagttgtcggcgaagtattcgacgtggccgtcgatatgcgtaaagactcccccactttcggcaaatgggtaggcgagattctgtccgcagaaaacaaacgccaactgtgggtacccgaaggtttcgcacacggcttctatgtactgagcgatgaagccgagttcgtctataaatgcacagactattacaaccctgaagccgaacactcactaatttggaatgatccgaccgtcggcatcgactggnnnnncacacacttaattaattaa

SEQ ID NO: 38938 - DNA, 1281 bp, Neisseria meningitidis
  misc_feature 6, 7, 8, 9, 10, 1262, 1263, 1264, 1265, 1266: 'n' is a, c, g or t
gtgtgnnnnngcttcggcgaaaccaaactgtcccgcgaaaaagccaaacgtgcagccgattggattgccctggaagaagccatggaaaacggcgacatcctgtccggcatcatcaacggaaaagtcaaaggcggcctgaccgttatgattagcagcatccgcgcattcctgccgggttctttggtcgacgtacgtcctgtaaaagacacttctcacttcgaaggcaaagagatcgaattcaaagtgatcaaactggacaaaaaacgcaacaacgtcgttgtttcccgccgcgccgttctggaagccactttgggtgaagaacgcaaagccctgctggaaaacctgcaagaaggctccgtcatcaaaggcatcgttaaaaacattaccgattacggtgcattcgttgacttgggcggcatcgacggtctgttgcacatcaccgatttggcatggcggcgcgtgaaacacccgagtgaagtcttggaagtcggtcaggaagttgaagccaaagtattgaaattcgaccaagaaaaacaacgcgtttccttgggtatgaaacaactgggcgaagatccttggagcggtctgacccgccgttatcctcaaggcacccgcctgttcggcaaagtatccaacctgaccgactacggcgcattcgtcgaaatcgaacaaggcatcgaaggtttggtacacgtctccgaaatggactggaccaacaaaaacgtacacccgagcaaagtcgtacaactgggcgacgaagtcgaagtcatgattttggaaatcgacgaaggccgccgccgtatctctttgggtatgaaacaatgccaagccaatccttgggaagaatttgccgccaaccacaacaaaggcgacaaaatctccggcgcggttaaatccattaccgatttcggcgtattcgtcggcctgcccggcggcatcgacggtttggttcacctgtccgacctgtcctggaccgaatccggcgaagaagccgtacgcaaatacaaaaaaggcgaagaagtcgaagccgtcgtattggcaatcgacgtggaaaaagaacgcatctccttgggtatcaaacaactggaaggcgatccgttcggcaacttcatcagcgtgaacgacaaaggttctttggttaaaggttccgtgaaatctgttgacgccaaaggtgctgttatcgccctgtctgacgaagtagaaagctacctgcctgcttccgaatttgcagccgaccgcgttgaagatttgaccaccaaacnnnnncacacacttaattaa

SEQ ID NO: 38939 - DNA, 1284 bp, Neisseria meningitidis
atgactgcatcgaaatcaggttttatcgggcaaatcttttcccgaaatatgctcgtctgtatttttacggggtttacctcggggctgccgctgtactttctgattaacctgattccggcgtggttgcgcagcgagcaggtggatttgaagagcatcgggctgatggcgttaatcggtctgccgtttacttggaaatttttgtggtcgccgctgatggacgcggtcaggctgcccgttttgggacggcggcgcgggtggatgctgctgacgcaggcagggttgctggcggctttggcggcctatgcctttttaaacccccgtaatcatctgccgctgattgccggcttgtcggtgcttgtcgcttttttttccgccagtcaggatattgtattggatgcgttcaggcgcgagattttgtcagacgaagaattgggtttgggcaactcggttcatgtgaacgcctaccggattgccgccctgattcccggttcattgagtttggtgttggcagacaggatgccgtggtcagaagtatttgttatcacttcattatttatgctgcccggccttctgatgacgctgtttcttgcgcgcgaacccgtgttgccgcctgccgttcctaaaacgttgaagcagaccgtggtagagccgtttaaagaattttttacgcgcaagggcatcgcttcggcggtgtgcgtgctgctgtttatcttcctttacaaactcggcgacagtatggcaaccgcgttggcaacgccgttttatctggatatgggtttcagcaagacagacatcggtttgattgcgaaaaatgcaggactgtggccggcagtggcggcaggtatcttgggcggcgtgtggatgctgaaaatcggcgtaaacaaagccttgtggctatttggcgcggtgcaggctgtaaccgttttggggtttgtatggctggcagggttcggacatttcgacacggtcggcacaggcgagaggctgatgctggcggcagttatcggcgcagaggcagtcggcgtgggtttggggacggcggcgttcgtatcgtatatggcgcgcgagaccaatcccgcatttaccgcaacgcagcttgcgctgtttaccagcctgtccgccgtcccgcgcacggtcatcaattcctttgccggttatctgattgaatggctcggttatgtaccgtttttccaactgtgtttcgcactcgccctaccgggtatgctgctgctgctgaaagttgcgccttggaacggggagaaaactcaggatgcaggcagatga

SEQ ID NO: 38940 - DNA, 999 bp, Neisseria meningitidis
gtggcggcatatatcggacgcattgatacggacgcgcctttgaaacccctgtacgtcatccacggcgaggaagaactgttgcgtatcgaggcattggacgcattgagggcggcggcgaagaaacaaggttaccttaatcgggaagtttatacggcagacaatgccttcgattggaacgaactgttgcaaaccgcaggcagtgcgggtctgtttgccgatttgaagctgttggaactgcatatccccaacggaaaacccggcaaaaccggcggcgaggcgttgcaggattttgccgcccgcctgccggaagatacggtaaggctggttttgctgcccaaactggagaaaacccagctccagtccaaatggtttgccgcattggcggcaaagggggaagtgtgggaagccaaaccggtcggcgcggcggccttgccccaatggatacgcggacggctggacaaaatcggtttgggtatcgaggcagacgcattggcactgtttgccgagcgcgtggaaggcaatttgttggcggcgcgtcaggaaatcgacaagctcgcgctgctgtatccgaaagggcataccgtcaatatcgatgaggcgcaaaccgccgttgccaatgttgcccgctttgacgtttttcagcttgccggcgcatggatgaagggcgatgtcccgcgcgtatgcaggttgttggacggattgcaggaggaaggcgaagaaccggtactgcttctgtgggcggttgccgaagacgtgcggacgctgattcggcttgccgctgtcctgaaacaggggcagggtgtccaatccgtacgcaacagtctcagactttggggcgacaagcagacgctcgcgccgcttgcggtcaagcggatttccgtcgtccgcctgcttgacgcgctcaaaacctgcgcccaaatcgaccgaatcatcaaaggcgcggaagagggcgatgcatggacggtattcaaacggcttgtcgtgtcgctggcggaataa

SEQ ID NO: 38941 - DNA, 1251 bp, Neisseria meningitidis
atgaccaaactgacacgaagacaaatcatccgccgcaccgccggcacactgttcgccctaagccccatcgcatccgccgttgccaaaacgatacgcgcaccacaattcactgccgcacggatatggccatcgcacacctacacccgcctgacgctggaaagcaccgccgcgctcaaataccagcacttcgcgctcgacaacccaagcaggctggtcgtcgatatacaaaacgcgaacatcaataccgtattgcacggactgtctcagaaggttatggcggacgacccctttatccgcagcatacgcgcgggtcagaacacgccgaccaccgtccgcctcgtcatcgacctgaaacagcccacccacgcacaagtcttcgcgcttccgcccgtcggcggttttaaaaaccggcttgtcgtcgacctctatccgcacgggatggatgccgacgatccgatgatggcgctgcttaacggcagcccgaacaaaacccggcgcggctctccggaagccgacctcgctcaaaacactcccgcacaaaccgaacgcggcaaaaacgggcgcagacccgtcattatgatcgaccccggacacggcggcgaagaccccggcgccgtcagcccgggcggtttgcaggaaaaacacgtcgtcctctccatcgcccgcgaaaccaaaaaacaattggaagccttgggttacaacgtctttatgacgcgcaacgaagacgtgttcatccctttgggcgtgcgtgtcgccaaagggcgcgcacggcgggcggacgtatttgtctccatccacgccgatgccttcaccagcccctccgcgcgcggaacgggggtctatatgttgaacaccaaaggcgcgaccagctccgccgccaaattcttggaacaaacccaaaacaatgccgacgcggtcggcggcgtaccgaccagcggcaaccgcaacgtcgataccgccctgctcgacatgacccaaaccgccacgctgcgtgacagccgcaaactcggcaaactggtgcttgaagaattgggcaggctcaaccacttgcacaaaggcagggtggacgaagccaatttcgccgttttgcgcgcacccgatatgccgtctatcctggtcgaaaccgccttcctgtccaaccctgccgaagagaagctgctgggcagcgaatccttccgccgacagtgcgcccaatccattgcctcgggtgtccaacgctacctcaatacatccgtattgaagcggggttga

SEQ ID NO: 38942 - DNA, 1215 bp, Neisseria meningitidis
atgaccgtcaaaacccccgtttacctcgactacgccgccaccacccccgttgacaaacgcgttgccgaaaaaatgattccctatctgaccgaaaccttcggcaaccccgcctccaacagccacgcattcggctgggaagcagaagaggccgtcgaaaaagcccgcgccgacatcgctgccctgattaatgccgaccccaaagaaatcgtcttcaccagcggcgcgaccgagtccgacaacctcgccatcaaaggcgcggcaaacttctacaaaaccaaaggcaaacacctcatcaccgtcaaaaccgaacacaaagccgttttagatacaatgcgcgaactcgaacgccaaggttttgaagtaacctacctcggcgttcaagaaaacggtttgattgatttggaagaactcaaagccgccatccgcgacgacaccatcctgatttccgtaatgtgggcaaacaacgaaatcggcgtggtgcaagacattcccgccatcggcgaaatctgccgcgaacgtaaaatcgtcttccacgtcgatgccgcccaagcctgcggcaaagtgcctgtcgatgtcgaagccgccaaaatcgacctgctctcgatgtccgcgcacaaagtgtacggccccaaaggcatcggcgcgctgtacgtccgccgcaaaccgcgcgtccgcctcgaagcccaaatgcacggtggcggccacgaacgcggcttccgcagcggcacattaccgacccaccaaatcgtcggtatgggcgaagccttccgcatcgccaaagaagaactcgaacaagatatggcgcactaccgcaaactgcgcgacatcttcctcaaaggcatcgaaggcatcgaagaagtctatatcaacggcgacctcgaacaccgcgccccgaacaacctgaacgtcagcttcaacttcgtcgaaggcgaaagcctgattatggcagtgaaagaactcgccgtatccagcggctccgcctgcacctccgcctcgctcgaacccagctacgtcctgcgcgcattgggcagaaatgacgaattggcgcactcgtccctgcgcatcaccttcggccgcatgaccaccgaagaagaagtgcgattcgccgcagaactgattaaatccaaaatcggcaaactgcgcgaactgtcgccgctgtgggaaatgtttaaagatgggattgatttgaactcgattgaatgggcggcgcattaa

SEQ ID NO: 38943 - DNA, 642 bp, Neisseria meningitidis
atggcagtgaaattaccgaacggtgcgaccgttcacattgcgaccgctttggcggcggagaaaaaagctacggtggcaactaatgctgccgaatgcgtcctgacggtagcaggacacgggtttgccaacggcgatttggttttgtttaaaagcggctggggaaagttgaatgaacgcgttttccagattggcgatgtcaaagccgatacattcaagctgaccggcattgatacttccaatgcagatgagtttccggcaggcagcggtattggtgctgttcagaaaattaccgattgggtgcaagtttcgcaaattgtagaattttcgaccagtggcggcgagcagcaatatgtggattttggtttcctggaggacgattttgaccagcaaatcccatccacgaaatcagctatgtcaatgtcgattaagatcgctgacgatacttcgttgtccggctacaaggcggctgcaaaatgcagcgataaaggcggcaagtggcctttgaaagtggttttgaaaggtggtgggctgatttgctataacggttatcccagcatgaataaaacccccgaattggttcgtaaccaagtaatggcggtaacgttgtcctacgccatttccggcgaagtaaaccgttattga

SEQ ID NO: 38944 - DNA, 1485 bp, Neisseria meningitidis
atgtcgaaacctgtttttaagaaaatcgcactttatactttgggtgcaatcagcggcgtggccgtcagtctggcggtgcagggttttgccgccgagaaggacaggcgggataacgaagtcctgccggtgcaatccatccgcacaatggcggaggtttacggtcaaatcaaggcaaactactatcaggacaaacccgatgccgatttgtttgaaggtgcgatgaagggtatggtggccggtttggatccgcattccgaatatatggataaaaaaggttatgccgagataaaggagtccaccagcggcgaatttggcggcttggggatggaaatcgggcaggaagacggatttgtcaaagtggtttcgccgattgaggacacgcctgcggaacgggcgggggtgaaaagcggcgatttcattgtgaaaatcgataatgtttcgacacgcggcatgacggtcagcgaagcggtgaagaaaatgcggggcaagccgggtacgaagattactttgacgctgtcgcgcaaaaatgccgacaagccgatagtcgtcaacctgacccgtgccattattaaagtgaaaagcgtccgccatcacctgatcgaacccgattacggctatatccgcgtgtcgcagttccaagagcggacggtcgaaagcgtcaataccgccgcaaaagagctggtaaaggaaaataaaggaaaaccgctcaaggggctggtgttggatttgcgcgacgaccccggcgggcttttgactggcgcggtcggcgtgtcggcggcatttctgccgtctgaagcagtcgtcgtcagcaccaagggacgcgacggcaaagaccgcatggtactgaaagccgttcctgaagattatgtgtacgggatgggcggcgattcgttggcgggcattcctgccgagttgaaaaccataccgatgacggtattggtcaattccggttcggcttccgcgtcggagattgtcgcaggtgcattgcaggatcataaacgcgcggtcatcgtcggtacgcagagcttcggcaaaggttcggttcagactttgattcctttgtccaacggcagcgcggtcaagctgacaacggcactgtattatacgccgaacgaccgttctattcaggcgcaggggattgttcccgatgtcgaagtaaaagataaggaacgcatttttgaaagccgcgaggcggatttggtcggacacatcggcaatcctttgggcggcgaggatgtgaacagtgaaacccttgccgtgccgcttgaaaaagatgcggataagcccgctgtaaaagaaaaaggtaaaaagaaaaaggacgaggatttgtcttcaaggcggattcccaaccctgccaaagacgaccagttgcggaaagctttggatttagtcaagtcgcccgagcagtggcagaagtctttggggctggcggcgaaaaagccggtttcaaataaagataagaaagataaaaaagataagaagtag

SEQ ID NO: 38945 - DNA, 1356 bp, Neisseria meningitidis
atgtcggaatatacgcctcaaacagcaaaacaaggtttgcccgcgctggcaaaaagcacgatttggatgctcagtttcggctttctcggcgttcagacggcctttaccctgcaaagctcgcaaatgagccgcatttttcaaacgctaggcgcagacccgcacaatttgggctggtttttcatcctgccgccgctggcggggatgctggtgcagccgattgtcggccattactccgaccgcacttggaagccgcgtttaggcggccgccgtctgccgtatctgttttatggcacgctgattgcggttattgtgatgattttgatgccgaactcgggcagcttcggtttcggctatgcgtcgctggcggctttgtcgttcggcgcgctgatgattgcgctgttggacgtgtcgtcgaatatggcgatgcagccgtttaagatgatggtcggcgatatggtcaacgaggagcagaaaagctacgcctacgggattcaaagtttcttagcgaatacgggcgcggtcgtggcggcgattctgccgtttgtgttcgcgtatatcggtttggcgaacaccgccgagaaaggcgttgtgccacaaaccgtggtcgtagcattctatgtgggcgcggcattactgattattaccagtgcgttcacaatcttcaaagtcaaagaatacgacccggaaacctatgcccgttaccacggcatcgatgtcgccgcgaatcaggaaaaagccaactggttcgaacttttaaaaacggcacctaaagcgttttggacggttactctggtacagtttttctgctggttcgccttccaatatatgtggacttactcggcaggcgcgattgcggaaaacgtctggcacaccactgatgcgtcttccgtaggttatcaggaggcgggcaactggtacggcgttttggcggcggtgcagtcggttgcggcggtgatttgttcgtttgtattggcgaaagtgccgaataaataccataaggcgggttatttcggctgtttggctttgggcgcgctcggctttttctccgttttcttcatcggcaaccaatacgcgctggtgttgtcttataccttaatcggcatcgcttgggcgggcattatcacttatccgctgacgattgtgaccaacgccttgtcgggcaagcatatgggcacttacttgggcctgtttaacggctctatctgtatgccgcaaatcgtcgcttcgctgttgagtttcgtgcttttcccgatgatgggcggcttgcaggccactatgttcttggtagggggcgtcgtcctgctgctgggcgcgttttccgtgttcctgattaaagaaacacacggcggggtttga

SEQ ID NO: 38946 - DNA, 1815 bp, Neisseria meningitidis
atgcccgctgaaacgcccgtatccggtgcgcgccccgccgccaaactgccgatttacatcctgccctgcttcctttggataggcatcgtcccctttaccttcgcgctcaggcagcaaccgtcgcccgacttttaccacgatgctgcagccgcagccggcctgattgtcctgttgttcctcacggcaggaaaaaagctgtttgatgtcaaaatcccacccatcagcttccttctgtttgcaatggcggcgttttggtatcttcaggcacgcctgatgaacctgatttaccccggtatgaacgacatcgtctcttggattttcatcttgctcgccgtcagcgcgtgggcctgccggagcttggtcgcacactacggacaagaacgcatcgttaccctgtttgcctggtcactgcttatcggctccctgcttcaatcctgtatcgtcgtcatccagtttgccggctgggaagacacccctctgtttcaaaacatcatcgtttacagcgggcaaggcgtaatcggacacatcgggcagcgcaacaacctcggacactacctcatgtggggcatactcgcctccgcctacctcaacggacaacgaaaaatccccgccgccctcggcgtaatctgcctgattatgcagaccgccgttttaggtttggtcaattcgcgcaccatcttgacctacatagccgccatcgccctcatccttcccttctggtatttccgttcggacaaatccaacaggcggacgatgctcggcatagccgcagccgtattccttaccgcgctgttccaattttccatgaacaccattctggaaacctttaccggcatccgctacgaaactgccgtcgaacgcgttgccaacggcggtttcacagacttgccgcgccaaatcgaatggaataaagcccttgccgccttccagtccgccccgatattcgggcacggctggaacagttttgcccaacaaaccttcctcatcaatgccgaacagcacaacatacacgacaacctcctcagcaacttgttcacccattcccacaacatcgtcctccaactccttgcagagatgggaatcagcggcacgcttctggttgccgcaaccctgctgacgggcattgccgggctgctgaaacaccccctgacccccgcatcgcttttcctgatctgcacgcttgccgtcagtatgtgccacagtatgctcgaatatcctttgtggtatgtctatttcctcatccccttcggactgatgctcttcctgtcccccgcagaggcttcagacggcatcgccttcaaaaaagccgccaatctcggcatactgaccgcctccgccgccatattcgcaggattgctgcacttggactggacatacacccggctggttaacgccttttcccccgccactgacgacagtgccaaaaccctcaaccggaaaatcaacgagttgcgctatatttccgcaaacagtccgatgctgtccttttatgccgacttctccctcgtaaacttcgccctgccggaataccccgaaacccagacttgggcggaagaagcaaccctcaaagcactaaaataccgcccctactccgccacctaccgcatcgccctctacctgatgcggcaaggcaaagttgcagaagcaaaacaatggatgcgggcgacacagtcctattacccctacctgatgccccgatacgccgacgaaatccgcaaactgcccgtatgggcaccgctgctacccgaactgctcaaagactgcaaagccttcgccgccgcgcccggtcatccggaagcaaaaccctgcaaatga

SEQ ID NO: 38947 - DNA, 738 bp, Neisseria meningitidis
atgctgctgatacccgccatcgatttgaaagaaggacgctgcgtccgcctgagacaagggctgatggaagaggcgaccgtcttttccgattcgcccgccgaaaccgcgctgcactggttcaaacaaggcgcgcgccgcctgcatctggtagatttgaacggcgcgtttgccggtgttccgcaaaacctgcccgccatcaaagacatccttgccgccgtcgccaaagacatccccgtacagctcggcggcggcatacgcgatttgaaaaccatcggacaatatttggatttgggcttaaacgacgtgattatcggcacggcggcggtcaaaaaccccgacttcgtgcgcgaggcgtgcaaagccttccccggcaggattattgtcgggctggatgccaaagacggtatggccgccatcgacggctgggcaaccgtaaccgggcatcatgtaattgatttggcaaaacgctttgaagacgacggcgtcaacagcatcatctacaccgacatcgggcgcgacggtatgatgagcggcgtgaacatcgacgcgacggtcaaactcgcccaagccgtccgcattcccgtcatcgcctccggcggactgaccggcttggacgacatccgcgccctgtgtaccgccgaaaaacatggcgtagcaggcgcgattaccggccgcgcgatttacgagggcagcatcgattttgcccaagcgcagcaactggcaaattccctcgactaa

SEQ ID NO: 38948 - DNA, 1578 bp, Neisseria meningitidis; identical to SEQ ID NO: 38145

SEQ ID NO: 38949 - DNA, 1329 bp, Neisseria meningitidis
atgaaaaaagtatttatccgtaccttcggctgccagatgaacgaatacgacagcgacaaaatgctcgccgtcctcgccgaagaacacggcggcatcgaacaggttacccaagccgacgaagccgacatcatcttgttcaacacctgctccgtgcgcgaaaaagcacaggaaaaagtgttctccgatttggggcgcgtgcgtccgctcaaagaaaaaaaccccggcctcatcatcggcgttgccggctgcgtcgcctcgcaagaaggcgaaaacatcatcaaacgcgcgccttatgttgacgtggtcttcggcccgcaaacgctgcaccgcctgcccaaaatgattgtggacaaagaaaccagcgggctgtcgcaagtcgatatttccttccccgaaatcgaaaaattcgaccacctgccgcccgcccgcgtcgaaggcggcgcggcatttgtatcgattatggaaggctgttccaaatactgctcattctgcgtcgtcccctacacgcgcggcgaagaattctcccgcccgctcaacgacgtattgacagaaatcgccaaccttgcccagcaaggcgtgaaagaaatcaacctcttgggacaaaacgtcaacgcctatcgcggcgaaatggacgacggcgaaatctgcgacttcgccaccctgctgcgcatcgtccacgaaatccccggcatcgaacgtatgcgcttcaccaccagccacccgcgcgagtttaccgactcgattatcgagtgctaccgcgacctgcccaaattggtttcccacctgcacctgccgattcaaagcggttccgaccgcgtattgagcgcgatgaaacgcggctacaccgctttggaatacaaatccatcatccgcaaactgcgtgccatccgtcctgatttatgcctgagcagcgatttcatcgtcggcttccccggcgagaccgaacgcgagttcgagcaaaccttgaaactggtgaaagacattgccttcgacttgagcttcgtgtttatttacagtccgcgccccggcacgcctgccgccaacctgcacgacgacacgccgcacgaagaaaaagtgcgccgcctcgaagccttgaacgaagtcatcgaagccgaaaccgcgcgcatcaaccaaaccatgatcggcacggttcaacgctgcctggtcgaaggcatctccaaaaaagaccccgaccaactgcaagcccgtaccgccaacaaccgcgtcgtcaacttcaccggcacgcccgacatgattaaccaaatgatcgatttggaaatcaccgaggcctacaccttctccctgcgcggcaaaattgtcgaagcctaa

SEQ ID NO: 38950 - DNA, 2178 bp, Neisseria meningitidis
atgacacgcttcaaatattccctgctgtttgccgccctgttgcccgtgtacgcgcaggccgatgtttctgtttcagacgaccccaaaccgcaggaaagcactgaattgccgaccatcaccgttaccgccgaccgcaccgcgagttccaacgacggctacactgtttccggcacgcacaccccgctcgggctgcccatgaccctgcgcgaaatcccgcagagcgtcagcgtcatcacatcgcaacaaatgcgcgaccaaaacatcaaaacgctcgaccgcgccctgttgcaggcgaccggcaccagccgccagatttacggctccgaccgcgcgggctacaactacctgttcgcgcgcggcagccgcatcgccaactaccaaatcaacggcatccccgttgccgacgcgctggccgatacgggcaatgccaacaccgccgcctatgagcgcgtagaagtcgtgcgcggcgtggcggggctgctggacggcacgggcgagccttccgccaccgtcaatctggtgcgcaaacgcccgacccgcaagccattgtttgaagtccgcgccgaagcgggcaaccgcaaacatttcgggctggacgcggacgtatcgggcagcctgaacaccgaaggcacgctgcgcggccgcctggtttccaccttcggacgcggcgactcgtggcggcagcgcgaacgcagccgcgatgccgaactctacggcattttggaatacgacatcgcaccgcaaacccgcgtccacgcaggcatggactaccagcaggcgaaagaaaccgccgacgcgccgctcagctacgccgtgtacgacagccaaggttatgccaccgccttcggcccgaaagacaaccccgccacaaattgggcgaacagccgccaccgtgcgctcaacctgtttgccggcatcgaacaccgcttcaaccaagactggaaactcaaagccgaatacgactacacccgcagccgcttccgccagccctacggcgtagcaggcgtgctttccatcgaccacaacaccgccgccaccgacctgattcccggttattggcacgccgacccgcgcacccacagcgccagcgtgtcattgatcggcaaataccgcctgttcggccgcgaacacgatttaatcgcgggtatcaacggttacaaatacgccagcaacaaatacggcgaacgcagcatcatccccaacgccattcccaacgcctacgaattttcccgcacgggcgcctatccgcagcctgcatcgtttgcccaaaccatcccgcaatacggcaccaggcggcaaatcggcggctatctcgccacccgtttccgcgccgccgacaacctttcgttgatactcggcggcagatacagccgttaccgcaccggcagctacgacagccgcacacaaggcatgacctatgtgtccgccaaccgtttcaccccctacacaggcatcgtgttcgacctgaccggcaacctgtcgctttacggctcgtacagcagcctgttcgtcccgcaatcgcaaaaagacgaacacggcagctacctgaaacccgtaaccggcaacaatctggaagccggcatcaaaggcgaatggcttgaaggccgtctgaacgcatccgccgccgtgtaccgcgcccgtaaaaacaacctcgccaccgcagcaggacgcgacctgagcggcaacacctactaccgcgccgccaaccaagccaaaacccacggctgggaaatcgaagtcggcggccgcatcactcccgaatggcagatacaggcaggttacagccaaagcaaaacccgcgaccaagacggcagccgcctgaaccccgacagcgtacccgaacgcagcttcaaactcttcactgcctaccactttgcccccgaagcccccagcggctggaccatcggcgcaggcgtgcgctggcagagcgaaacccacaccgaccctgccacgctccgcatccccaaccccgccgccaaagcccgcgccgccgacaacagccgccaaaaagcctacgccgtcgccgacatcatggcgcgttaccgcttcaatccgcgcgccgaactgtcgctgaacgtggacaacctgttcaacaaacactaccgcacccagcctgaccgccacagttacggcgcactgcggacagtgaacgcggcgtttacctatcggtttaaataa

SEQ ID NO: 38951 - DNA, 519 bp, Neisseria meningitidis
atgactacgcattttgtcgttatgggcgtatgcggctgcggcaagaccaccgccgcgctgtccctgcagaaacacctcggtcaatgtccctatgccgaaggcgacgagttccacacccaagccaaccgcgacaagatgggcgcgggtattccgctgaccgatgaagaccgctatccgtggttgggcaatctgcgcgactggatgacgcaacaggcgcaaaacggtgcgaaccacaccatcgtaacctgttccgccctcaaacgcggctaccgcgacattctgcgcggagccgaaggcaaagctgccttcatccacctcagtccgccgcaagacatcaacctcgagcgcatgatgtcgcgcaaaggacattacatgaaagcagggatgctcgattcgcaactggaaatcctcgaggaactgggcgaaggcgaatacggggtcaaaatcgccaaccccggcacgcccgaagcggtcgaagccgatattctgaactgggttgcctcggaaaacctgctttga

SEQ ID NO: 38952 - DNA, 777 bp, Neisseria meningitidis
atggcagcattcaatacccaaaaagtattgtccgtacaccactggacagacgcatattttacctttacctgcacccgcgacgaatcgttgcgctttgaaaacggacagttcgttatggtcggattgatggtggacggcaagccgctgatgcgtgcatacagcgtcgcctccgccaactgggaagaacacctcgaatttttcagcattaaagtccaagacggcccgctgaccagccgcctgcaacacctcaaagtcggcgacgacgtgttaatcagcaaaaaaccgaccggaaccctggttgccggcgacctgaatccgggcaaacacctttacttgttgagcaccggtaccggcatcgctcctttcttgagcatcaccaaagaccccgaaatttacgagcaatttgaaaaaatcatcctcgtacacggcgtgcgctacaaaaaagatttggcgtactacgaccgctttaccaaagaattgcccgaacacgaatacctcggtgacttggttaaagaaaaactgatttactacccgattgtttcgcgcgaagaattcgaacaccacggtcgcctaaccgacctgatggtgagcggcaaactgtttgaagacatcggcctgcccaaaatcaacccgcaagacgaccgcgccatgctgtgcggcagccccgcgatgctgaaagatacctgcaaagttttggacgatttcggactgaccgtctctccgaaaacaggcgtacgcggcgattacctgattgagcgtgcgtttgtagatcaataa

SEQ ID NO: 38953 - DNA, 603 bp, Neisseria meningitidis
atgactgatgtgcttcagacggtattttatattatgttatttccgagaattatcgcagcatcagcgcaacgtaagttaagcgtttatttgaaaaaaggcggtttggtcgcttatccgaccgaatcttgttatggcttggggtgtcttccgacattagccaaagcactcggtaagttggcgcatttgaaaaaaagaccgcaacacaagggtatgattgtcatcgggaatcaatttgagcaattgcagcctttacttcaaatgccgtctgaaaatctgcaggatatgcttagaaaagaatggcccgcccctaaaacgttcctattatccgccaaatcctgtgtcttacctgagttgcgcgggaaacagcgcagcaagttggcggtcagggttcccgcccatgtaggtgcgcgccgcttgtgtcaggctttgcaaacgcctttggtctcgacttcgtgcaaccgcgcaggcaaacgcgcgtgtcggacggagagggaagtcagaaggcaattcggacgcgatgtgtggattgttggtgggagaatcggcaggcagaaatcgccgagtcagattattgacggggaaacaggtaaacgtttgcgttag

SEQ ID NO: 38954 - DNA, 1986 bp, Neisseria meningitidis
atggctaaaaacaaccaatacagcgaatccagcatcaccgtcctcaaaggtttggaaccggtcaaagaacgtcccggtatgtacacccgcaccgacagcccgacccatatctgccaagaagtcatcgacaacgcggcggacgaggcgttgggcggtttcgctacggcaatcgacgtgcaaattcatgaagacggttcgctttccgtacgcgacaacggccgcggtattcccgtcggtctgcaccctgaagaaggcgtacccgtagtcgaactcgtgttcacccgtctgcacgcgggcggcaagttcaacaaaaaagacggcggcagcgcgtatgccttttcaggcggcctgcacggcgtgggcgtatccgtgaccaacgccctttccacccgccttgaggtaacggtcaaacgcgaaggcaaaatccaccgcatcgtgtttgccggcggcgacgtggtcgaaccgttggcacaagtgggcaaatgcgccgtcaaagacagcggcaccgaagtgcgcgtctggccggacggcaaatattttgaaagcccgaattacagcatccccgaactcgaacgcctgctgcgcgccaaagccgtgctgctgccgggcgtgcgcgtttccctgacccgtccggtcaaaggcgaagacgaagcgcacacccaaacctggcattaccccgacggtctgaaaagctatctgaccgacctgattgccgacgcgcaggaagccgtgcctatcttctcttgcgaaaactacatttcagacggccacaacggcgatttcagcatcggcgaaggcgccgcgtttgccctgacctggctggaagaaagctcgtgcgccaacgaaagctacgtcaacctcatccccaccccgctgggcggcacgcacgaagcgggcttgaaacaagccgtgttcaacgccgtcagcaacttcatcaatctgcacaaccttttaccacgcggcgtgaaagtgcaaagcgacgacgtgttcggcaaaaccgcctttgtcctctctgcccgtgtcctcgacccgcagtttcaaggtcagaccaaagacaaactgaccaaccgcgacgcgctgaaactcgttgctaccgtatcgggcgaccctttggaattgtggctgaaccaaaacgtggacttcggcaaaaaaatcgccgaactcgccatccgtcaggcacaggcgcggatgcgttcggttaaaaagattgaaaagaaaaaaggcagcggcgtcgccgtcctgcccggtaagctgaccgactgcgaaagcgaagacatccgcgaaaacgaactcttcctcgtcgaaggcgattccgccggcggctccgccaaactcgcccgcgacaaagccacccaagccatcctgcccctgcgcggcaaagtgctcaacagctttgaagtccaccccgaccagctcttcggcaacgccgaaatccacgacatttcagttgccatcggcgtcgatccgcacggcatcaacgaccatcccgatttaagcggcctgcgttacggcaaaatcgccatcctgtccgatgccgacgtggacggctcgcatattcaagttttgctgctgaccctgttctaccgccacttcccgaaactggtcgctgacggacacatctacgtcgcccagccgccgctgttccgcgtagatgtcaacgcacaaggtaaaagcaaacccgcccgcaaattctacgccctcgaccaaaacgaacttgacggcattttagagcggctgcaaaaagaaggcgttaaagaaactgcttattccatcagccgtttcaaaggtttgggtgagatgaacccagaccagctcaaagatactaccatgcaccccgacacccgccgcctgttgcaggtacaaatccccgaaggcgcggatgacgagacgcgcgacatcttcgtcaaactgatgggcaaaggcgaagccgccgcccgccgtgcctggatggagcgcgaaggcgatacggcggaactcgatatttga

SEQ ID NO: 38955 - DNA, 897 bp, Neisseria meningitidis
ttgaatccgacgaatgatttgaaagcgtggcaacagagggcgcaggcacagacagagctgctgctggaacgctttttgccgtctgaaaacgaaatcccgcacacgctgcacgaagcgatgcgctatgcggctttggacggcggcaagcgtctgcgtccgatgctggttctggcagcttcggaattaggcgaagccgtgcatgaagcagtagaacaggcaatggcggcaatcgaaatgatccacgtctattctttggttcacgacgatatgccggcgatggacaacgacagcctgcgccggggcaaaccgacctgccacatcaaatatggcgaagcaaacgcactgctgaccggcgatgctttgcaaacccaagccttcgacgtgttaagtcgtccgacagaactgcccgccgcacgccagttggcaatgttgtcggtgttggcgaaagcgggcggcagcaggggtatggcgggcggtcaggcaatcgatttggcgaatgtcggcaaacaaatggttcaagccgatttggaacagatgcacagcctgaaaacgggtgcgctaatccgtgcggcggttttattgggggcgacggcgtgtcctgatctgtcagatgcggaactttccgtattggacgcttacgcggcaaaactggggctggcgttccaagtcattgacgatgtgttggattgtgaagcggacacggcgactttgggcaaaacggcgggcaaagacgcagacaacgacaagccgacttatgtgaaactgatgggcttggaagcggcgcgctcatacgcacacaaactggttgccgaagcggtcgcgctgctcgaacccttcggcgacaaagccctgcgcctgcggcagttggcagaatttgcagtcgcccgcaaatattaa

SEQ ID NO: 38956 - DNA, 552 bp, Neisseria meningitidis; identical to SEQ ID NO: 37494

SEQ ID NO: 38957 - DNA, 384 bp, Neisseria meningitidis
atgttccgtactatgcttggcggaaaaatccaccgcgccaccgttaccgaagccgatttgaactacgtcggcagtattaccgtcgatcaagacctgttagacgcagcaggcatctaccccaacgaaaaagtcgccatcgtcaacaacaacaacggcgaacgttttgaaacctataccatttcaggcaaacgcggcagcggcgtggtctgcctgaacggggcggcggccaggctggtacagaaaggcgatatcgtcatcatcatgtcttacgtccaactctccgaacccgaaatcgccgcacacgaacccaaagtcgtcttggtagacggaaacaacaaaatccgcgacatcatctcctacgagccgccgcacaccgtgctgtaa

SEQ ID NO: 38958 - DNA, 1059 bp, Neisseria meningitidis
atgcgtcctttgaacgtgcagatcaggttgggcaaccttaggcacaattatcagattttaaaggaaatgcacggaggcaagctgttggcggtagtgaaggccgacgcatacggacacggtgcggtcagatgtgctttcgcgctggcagacttggcagacggctttgccgtggcgacaatcgatgaaggaatcaggctgcgggagagcggcattacccatccgattgtccttttggaaggcgtatttgaagcatcagagtacgaagcggtcgaacaatactcgctttggccggcagtcggaaaccaatggcagcttgaggctttgctgatccgccattggaaaaaacccgtcaaagtctggttgaaaatggattcggggatgcaccgtaccggttttttccctcatgattacgcttcggcatatgcggcattgaaacagtcggaatatgtggacagtattgtcaaattctcgcatttctcctgtgcggacgaacccgaaagcggtatgacggaaatacagatggaagcattcgatttgggtacggaagggctggaaggcgaagaaagccttgccaattcggcggctattttgaatgttcccgaagcacgcagggattgggggcgcgcgggcttggcgttatacggcatttccccgttcggaggcagcgatgacaggctgaaacccgtgatgaggctttcaacccgtatttttggcgaacgcgttttacagccgcactcccctatcggttatggcgcaacattttataccagcaaatctacgcgcgtcggtctgattgcctgcggttatgcggacggttatccgcgccgcgccccaagcaattcccccgtcgctgtcgacggcaaattgacccgggtcatcggcagggtctctatggatatgatgaccatcgagctggacgcttcgcaagaaggtttgggacacgaggtcgaactgtggggcgatacggtcaacatcaatactgttgccgaagcggccggaaccatcccttacgaattgatgtgcaatatcaaacgtgcaaaattcacttatatcgagtaa

SEQ ID NO: 38959 - DNA, 1092 bp, Neisseria meningitidis
atgaacgcccaaaccctgattgccaacgttgccgaattcgtcaaaaccaagctcaaacccatagtggacgacatcgaccgcaaaggatactaccccgaagcatttatgcgcgaactcggcgcaatcggtggattcggcgcagtcggtacagaagccgaaggcggcaacggcttgggtttggcaacgcaaatcgccgtattgcgcgaaatcggcaaagaatgcggcgcaacctctttcagtgcgtggtgtcaggcggcttgcgcgtggtatctgcaccaaacgcccaaccgggccgtcaaagacaaataccttgccgacatcctgcaaggcaaagtattggcgggtacgggcatgtccaataccgtcaaacaccttgccgacatcgaaaaacacaacctccaagccgagcgcgtggagggcggctacacagtcaacggcgcgctgccgtgggtgtccaacatcggcgaagaccacatttgggcgaataccgcccaaatcggcggcggctacgtcatgttcatcacaggcggacaatgggaaggcgtaagcctgcaaaactgccccgaattttgcgccctcgaaggcacgcgcaccttcagcctgaacttcaaagacgtatttatccccgacgaagacatcatcgccgcgcccgaacagtttgccgactacatccaaagcatcaaagcaggctttatcctcctgcaaatcggcatcggcgcgggcgtgatagacggcagcctcggcatcatccgcctcgccaacgtcgtcaacgccgaagtcaaccgctatctcgacgacggctacgacagcctcaaaacaaggctggacggcgcgtgggcagaaaccgaacggctcgccggattggcttggagcggcacgcccgacaaccttaccaccctcaagctgcgcgaagccgccgccgtactgacacttgccgccgcccaatccgccgccctgcattccggcgcaaaaggctacctgatgcggagtcccgcccaaaggcgcgtccgcgaagcaatgtttgtcgccatcgtaactcccgcgatcaaacacctccgcaaagaaatagcggcaatcgaagccgcaaaataa

SEQ ID NO: 38960 - DNA, 1047 bp, Neisseria meningitidis
atgattccggccacctacaccctgtcccaaatcaccgcgcggctcggcggcgaatggcgcggcgaggacatttccgttaccgccgtgcgcccgctcgcagacgcgcaggcggaacacatcagcttccttgccaatccgaaatacaaagccgaagtccacgacagcagcgcgggcgcggtcatcgtttccgccaaagcggcagacagatttgaagggcgcaacctgattgtcgccgacgacccctatctctatttcgccaaagtcgcccgcctgttttcacccgtcgtcaaagcgcgcggcggcatccatccgaccgccgtcgtcgaaccgagtgccaccgttcccgcaagctgcgaaatcggcgcgaacgtctacatcggcgcaaacaccgtgctcggcgaaggctgccgcatcttggcaaacgccgtcgtccaacacgattgcaaactgggcgacgaagtcgtcctgcatcccaacgccgtcgtttattacggctgtacactgggcagacgcgtcgaaatccacagcggcgcggtcatcggcgcggacggtttcggactcgcttttgccggcgattcatggtttaaaatcccgcaaaccggcgcggtaacgctgggcgacgacgtggaaatcggctcgaacaccaacatcgaccgcggcgcgatgagcgacaccaccgtcggcaacggcaccaaaatcgacaaccaagtccaaatcggacacaactgcaaaatcggttcgcacaccgtcatcgccgccaaaaccggcatctcaggcagcgtaaccataggcagctactgcatcatcggcggcggcgtcggtacggtcggacacatcgaaatcgccgacaaaaccaccatcggcggcggcacgtccgtcacccacagcattaccgaaagcggcaaacacctcgccggcatcttcccgatgtccacccataaagaatgggcgcgcaacgctgtttacatccaccgcttaagcgaaatgaacaaacggctcaaaacactagagcagcagctttcagataccggtcaagacagcaaataa

SEQ ID NO: 38961 - DNA, 168 bp, Neisseria meningitidis; identical to SEQ ID NO: 38073

SEQ ID NO: 38962 - DNA, 198 bp, Neisseria meningitidis; identical to SEQ ID NO: 36305

SEQ ID NO: 38963 - DNA, 828 bp, Neisseria meningitidis
atgcaaaaccacgttatcagcttagcttccgccgcagaacgcagggcgcacattgccgataccttcggcaggcacggcatcccgtttcagtttttcgacgcactgatgccgtctgaaaggctggaacaggcaatggcggaactcgtacccggtttgtcggcgcacccctatttgagcggagtggaaaaagcctgctttatgagccacgccgtattgtggaaacaggcattggacgaaggtctgccgtatatcgccgtatttgaggacgacgttttactcggcgaaggcgcggagaaattccttgccgaagacgcttggctgcaagaacgctttgaccccgattccgcctttatcgtccgcttggaaacgatgtttatgcacgtcctgacctcgccctccggtgtggcggactactgcgggcgcgcctttccgctgttggaaagcgaacactgggggacggcgggctatatcatttcccgaaaagcgatgcggtttttcctggacaggtttgccgccctgccgcccgaagggctgcaccccgtcgatctgatgatgttcagcgattttttcgacagggaaggagtgccggtttgccagctcaatcccgccttgtgcgcccaagagctgcattatgccaagtttcacgaccaaaacagcgcattgggcagcctgatcgaacacgaccgcctcctgaaccgcaaacagcaaaggcgcgattcccccgccaacacattcaaacaccgcctgatccgcgccttgaccaaaatcagcagggaaagggaaaaacgccggcaaaggcgcgaacagttcattgtgcctttccaataa

SEQ ID NO: 38964 - DNA, 639 bp, Neisseria meningitidis
atgtccaaactgaccccccgcgaaattttgaccgccggcgcagttgtgccggtaatggcgattgacgacttaagcaccgccatcgatttgtcccacgcccttgtcgaaggcggcatccctaccctcgaaatcaccctgcgcacccctgtcggcctcgacgccatccgcctgattgccaaagaagtgcccaacgccatcgtcggcgcgggtacggtaaccaatcccgaacagctcaaagccgtcgaagacgcaggcgcggttttcgccatcagcccggggctgcacgaatccctcgccaaagccggccacaacagcggcatccccctgattcccggtgttgccaccccgggcgaagtccaactggctttagaacacggcatcgacaccctcaaactcttccctgccgaagtcgttggcggcaaagccatgctcaaagccctgtacggtccttacgccgatgttcgcttctgcccgacaggcggcatcagcctcgccaccgcgcccgagtacttggcactgcccaacgtcctgtgcgtcggcggctcttggctgacaccgaaagaagccgtgaaaaacaaagactgggacaccatcacccgcctcgccaaagaagcggcggcgttgaaacccaaagcctga

SEQ ID NO: 38965 - DNA, 1005 bp, Neisseria meningitidis
atgagcaccttcttccggcaaaccgcccaagccatgattgccaagcacatcgactgcttcccactattgaagttggaccaggtaattgattggcagccgatcgaacaatacctgaaccgtcaaagaacccgttacctcagagaccaccgcggccgtcctgcctacccgctgttgtccatgttcaaagccgtcctgctcggacaatggcacagcctctccgttcccgaactcgaacacagcctcatcacccgcatcgacttcaacctgttttgccgtttcgacgaactgagcatccccgattacagcaccttatgccgttaccgcaactggctggcgcaagacgacaccctgtccgaattgctggaactgattaaccgccaactgaccgaaaaaggcctaaaaatagagaaagcatccgccgtcgttggcgccaccattattcaaaccgccggcagcaaacagcgccaggccatagaagtcgatgaagaaggacaagtcagcggccaaaccacaccgagtaaggacagcgatgcccgttggataaagaaaaacggcctctacaaactcggttacaaacaacatacccgtaccgatgcggaaggctatatcgagaaactgcacattacccccgccaatgcccatgagtgcaaacacctgccgccgttgttggaaggggtacctagaggtacgaccgtctatgccgacaaaggctacgacagtgcggaaaaccggcaacatctggaagaacatcagttgcaggacggcattatgcgcaaagcctgccgcaaccgtccgctgacggaagcgcaaaccaaacgtaaccgatatttgtcgaaaacccgttatgtggtcgaacagagcttcggtacgctgcaccgcaaattccgctatgcgcgggcagcctatttcggactgattaaagtgagtgcgcaaagccatctgaaggcgatgtgtttgaacctgttgaaagccgccaacaggctaagtgcgcccgctgccgcctaa

SEQ ID NO: 38966 - DNA, 702 bp, Neisseria meningitidis
atgtctttgaaaacagtagccgttatcggcgcaatggaacaagaaatcgagcttttgcgcgagatgatggaaaatgtcaaagccgtctctttcggcaagtttgccgcctatgaaggcgaattagcgggaaaacgcatggtgcttgcattgagcggcatcggcaaggtcaacgcggcggttgcaacggcttggattatccgtgaattcgcaccggactgcgttatcaacaccggcagcgcgggcggcttgggcaagggtttgaaagtcggcgatgtcgtggtcggcacagaaatcgcgcaccacgatgtcgatgtaaccgcattcggctatgtttggggacaagtgccgcaactgcccgccgtatttgtttcagacggcctcttggtcggcaaagcaaaacaggcggcggaagtgtttgaaggcgcggcggtagaacaaggcctgattgtcagcggcgaccgcttcgtccacagcagcgaaggcgtggcggaaatccgcaagcacttccccaaagtcaaagcagtggaaatggaagcggcggcgattgcccaaacctgtcatcagttggaaacgcctttcgtcatcatccgcgcggtttccgattcggcggacgaaaaggcagacatcagctttgacgaatttttgaaaacggcggcggcaagttctgcaaaaatggtggcagaaatcgtcaaatctttataa

SEQ ID NO: 38967 - DNA, 1002 bp, Neisseria meningitidis
atgaaacggaaaatttggctgctgccgctgctggcggtttcggcatacctgcaggcgcagacggaagtcaggctggcggtgcataagtcgttcagcctgcccaaagggctgattgcgcgcttcgagcgggcaaacgatgcgaaggtgtcgattattcaggcgggcggcgcgaacgaaatgctcaacaaactgattttgagccgcgccaacccgatcgccgacgcggtgtacggcttggacaacgccaatatcggcaaggcgcgggaaatgggcattttggcggcggcgcaacccgaatccgcccccgtcgcggtcgggctgccttcggctttggcggtcgattacggctatgtgtccatcaattacgacaaaaaatggtttgaaggcaaaaagcttcctctgccgcaaaccctgcaggatttgacccgccccgaatataaaaacctattggtcgtgccgtctcccgccacgtcgtccccggggctgggcttcctgatggcgaacatcagcggtctgggcgaagaaggcgcgttcaaatggtgggtacagatgcggcagaacggcgtgaaggtcgccaaaggctggagcgaggcgtattacaccgacttttcgcacaacggcggcgcgtatccgctggtggtcggttatgccgccagcccggcggcggaagtgtatttttccaaaggcaaatacagcgagccgccgacgggcaacctgtttttaaaaggcggcgtattccgccaggtcgaaggcgcggcagtcttgaagggcgcgaaacagccgaagctggcggcaaaactggtgcaatggctgcaaagtcgggaagtgcagcaggcggttccgtccgaaatgtgggtttaccccgccgtcaaaaacacgcgcctgcccgacgtgttccgcttcgcccaagccccgacgcacaccaccgcccccgcgcagcgcgatattgatgcgaaccagcgcggatgggtttcccgttggattagaacggttttgaaataa

SEQ ID NO: 38968 - DNA, 336 bp, Neisseria meningitidis
atgtttaaagattggaaagaacataccgcattggttaaaaaatcgttcggcgagctgggtaaggcgcatcctaaaatgctgcaggcctacggcgcattggaacaggccgccgccgccgaagcacttgatgccaaaacgcgcgaactgattgccatcgccgttgccattaccactcgttgcgagagctgcatcagcgttcacgccgccgctgccgccaaagccggtgcgaccgacagcgaaatcgcaggcgcattggcaaccgccatcgccctgaatgccggtgccgcttacacttatgccctgcgtgcattggaagcggttgaaacgcaaaaataa

SEQ ID NO: 38969 - DNA, 894 bp, Neisseria meningitidis
atggtaacgttttcaaaaatcagaccgcttttggcaatcgccgccgccgcgttgcttgccgcctgcggcacggcgggaaataatgctgcccgcaagccagtgcaaaccgccaaacccgccgcagtggtcggtttggcactcggtggcggcgcatctaaaggatttgcccatgtaggtattattaaggttttgaaagaaaacggtattcctgtgaaggtggttaccggcacatcggcaggttcgattgtcggcagcctttttgcatcgggtatgtcgcccgaccgcctcgaattggaagccgaaattttaggcaaaaccgatttagtcgatttaaccttgtccaccagtggttttatcaaaggcgaaaagctgcaaaattacatcaaccgaaaagtcggcggcaggcggattcagcagtttcccatcaaatttgccgctgttgctactgattttgaaaccggcaaggccgtcgctttcaatcaagggaatgccgggcaggctgtgcgcgcttccgccgccattcccaatgtgttccaacccgttatcatcggcaggcatacatatgttgacggcggtctgtcgcagcccgtgcctgtcagtgccgcccggcggcagggggcgaatttcgtgattgccgtcgatatttccgcccgtccgggcaaaaacatcagccaaggtttcttctcttatctcgatcagacgctgaacgtaatgagcgtttccgcgttgcaaaatgagttggggcaggcggatgtggttatcaaaccgcaggttttggatttgggtgcagtcggcggattcgatcagaaaaaacgcgccattcggttgggcgaggaggcagcgcgtgccgcattgcctgaaatcaaacgcaaactggcggcataccgttattga

SEQ ID NO: 38970 - DNA, 1887 bp, Neisseria meningitidis
atgatttaccccaaaacctacgacgttatcgtcgtcggcggcggacacgcaggcacggaagccgcgctcgccgccgcccgtatgggcgcgcagacgcttttgctcacacacaatatcgaaacgctcggacaaatgtcgtgcaacccctctatcggcggcatcggcaaagggcatttggtacgcgaactcgacgcgctcggcggcgcgatggcgttggccaccgacaaatcaggcatccagttccgccgcctaaacgccagcaaaggcgcggcagtgcgagccacgcgcgcgcaggccgaccgtatcctgtacaaagccaccatccgcgaaatgttggaaaaccaagaaaacctcgaccttttccaacaagccgtcgaagacgtaacgctcgacggcgaacgcatcagcggcgtggttaccgcgatgggcgtggagtttaaagcacgcgccgtcgtgctaactgctggcacgtttttgtccggcaaaatccacatcggtttggaaaactacgaaggcggccgcgctggcgaccccgccgccaaatcgctgggcggccgtttgcgcgaattgaacctgccgcaaggccgtctgaaaaccggcacgccgccgcgcatcgacggacgcacgattgacttttcccaactgaccgaacagcccggcgacacacccgttcccgtcatgtccgtgcgcggcagtgccgaaatgcacccgcaccaagtgtcctgctggattacgcataccaacacgcaaacccacgacatcatccgctcaggcttcgaccgcagcccgatgtttaccggcaaaatcgaaggcgtgggcccgcgttattgtccgtctatcgaagacaaaatcaaccgcttcgccgacaaagacagccaccagattttcctcgaacccgaaggtctgaccacgcacgaatactaccccaacggtatctccaccagcctgccgttcgacattcaaatcgcgctcgtccgcagtatgaaaggtttggaaaacgcccatatcctgcgccccggttacgccatcgaatacgactacttcgatccgcgcaacctcaaagccagccttgaaaccaaaaccattgagggactgtttttcgccgggcaaatcaacggcacgacaggctacgaagaagccgccgcgcaaggcctgctcgcaggcgcgaacgccgtgcaatacgtccgcggacaagatccgctcctgctgcgccgcgaacaagcctatctcggcgtattggtggacgacctcatcaccaaaggcgtgaacgaaccctaccgaatgttcaccagccgtgccgaataccgattgcaactcagggaagacaacgccgatatgcgcctgaccgaagacggctacaaaatcggcttggtgggtgaagcgcaatggcgcatgttcaacgaaaaacgcgaagccatcgagcgcgaaatccaacgtttgaaaacaacgtggtacacgccgcaaaaactcgccgaagacgaacaaatccgcgtattcggacaaaaactcaaccgcgaagccaacctgcacgacctcctgcgccgcccgaacctcgactacaccgcgctgatgacgctcgaaggcgcgatgccgtctgaacgcctctccgccgaagtggtcgaacaagtcgaaatccaagtcaaataccaaggctatatcgaccgccaaaacgaagaaatcgacagccgccgcgacatcgaaaccttaaaactgcccgacggcatcgattacggcaaagtcaaaggcttgtcggcagaagtgcagcaaaagctcaaccagcacaaacctgaaaccgtcgggcaggcaagccgcatttccggcgtaacgcctgcggcagtggcattgctgatggtgcatttgaagcgcgggtttaaagacgcgaaataa

SEQ ID NO: 38971 - DNA, 1455 bp, Neisseria meningitidis
atgactacgcaaaccatcaaatttcacatgaagccggaaactttcaagcaaaacgccgcaatttcccttcaagacaagcctttgcgtaaaagcctgcgtaccgcgatggatatgctgatgaccaaacgcaaagctgttttgaccgacgaagaagagctgcaaagcttgcgcgatttgtgcgaacacgtccgtcagcgctcattgtctaaattgcctgccctgctggagcagctggaagaaaacctaactaagctgggcgtgaaagtgcactgggcagaaaccccgaccgaagcctgccaaattatccacgacatcatcacagccaaaaacggcaagctgatggtcaaaggtaaatccatggtcagcgaggaaatcgagctgaaccattatcttgaagcaaaaggcattaaagcggtggaaagcgacttgggcgagttcatcgtccaaatggcaggtgaaaaaccgacccatatcgtgatgcccgcaatccataaaaccaaagaacaggttagcgaactgttccaccaaaacctcggcacaccgcttacagacgacgtggaccaactgaccggcttcgcccgcaaagccctgcgcgatatttacagcactgccgatgtcggcttgagcggcgtaaacttcgccgttgccgaaacgggtacgctgtgtctggtcgaaaacgaaggcaacggtcgcttgagtaccaccgttccacccgtgcatattgctattaccggcattgaaaaagtggtggcgaaattgtccgacatcccacccttgtacagtctgctgccgcgctccgccatcggtcaaaacatcacaacctatttcaatatgattaccggcccgcgccgcagtgaagaattagacggtccgcaagaaatgcacttggttctgctcgacaacggccgcagccaggcttatgccgaagaccaaatgcgccgcaccctgcaatgtatccgttgcggcgcgtgtatgaaccattgcccggtttatacccgcatcggcggcgcggcatacggcacaacctatcccggcccgattggcgagattatttcccctcacctgttgggtctggatgccacccgcgatctgccaaccgcctgtaccatgtgcggcgcgtgcgtggaagtttgtccggtacgcatcccgattaccgaacaaatgcagcgtttgcgcgttgaagcgcaacgttcgccgaccgaaaccgtgccgcaccccatccgagggcaaggcgcatcgcataccttcggcgaacaaatggcgtggcgcacattcaacggtattttcagcggcagcaaaacctaccgcgccttcggttgggcagccaccaagttccgcaacctgaccccgcgcaaacagttgggttggacgcaaaaccgcgtgccgatgaaaccggcgaagaaaaccctgcacgaactgatggcagaaaaaatgcgccaaaaagaacaggcataa

SEQ ID NO: 38972 - DNA, 567 bp, Neisseria meningitidis
atgagcatcaagtccgacaaatggatacgccgaatgagcgaagaattcggcatgatcgaccctttcgagccgaaccaaatcaaagaagccgacggcaaacgcatcatctcctacggtacgtccagctacggctacgacatccgctgcgcaaacgaatttaaaatcttcaccaacatcaacagcaccatcgtcgatcccaaaaacttcgacccgaaaaacttcgttaccgttgaagacgactgctgcatcatcccgcccaattccttcgcactggcgcgcacggtcgaatatttccgcatcccgcgcaacgtcctgaccgtctgcttgggcaaatccacctacgcccgctgcggcattatcgtcaacgttaccccgttcgaaccggaatgggaaggctacgttaccctcgaattttccaacaccacccccctgcccgccaaaatctacgcaggcgaaggtgtggcgcaagtcctcttcttcgagagcgacgaaatctgcgaaacctcatacaaagaccgcaacggcaaatatatggggcaaaccggcgttaccctgcccaaagcctga

SEQ ID NO: 38973 - DNA, 615 bp, Neisseria meningitidis
  misc_feature 600, 601, 602, 603, 604: 'n' is a, c, g or t
atgagctacacgcaactgacccaaggcgaacgataccacatccaatacctgtcccgccactgcaccgtcaccgaaatcgccaaacagcttaaccgccacaaaagcaccatcagccgcgaaatcagacggcaccgcacccaagggcagcaatacagcgccgaaaaagcccagcggcaaagccggactatcaaacagcgtaagcgacaaccctataagctcgattcgcagctgattcagcacatcgacacccttatccgccgcaaactcagtcccgaacaagtatgcgcctacctgtgcaaacaccaccggatcacgctccaccacagcaccatttaccgctaccttcgccaagacaaaagcaacggcagcacgttgtggcaacatctcagaatatgcagcaaaccctaccgcaaacgctacggcagcacatggaccagaggcaaagtccccaaccgtgtcggcatagaaaaccgacccgctatcgtcgaccagaaatcccgtatcggcgattgggaagccgacaccattgtcggcaaaggacagaaaagcgcattattgaccttggtcgaacgcgttacccgctacaccatcatctgcaannnnncacacacttaa

SEQ ID NO: 38974 - DNA, 2286 bp, Neisseria meningitidis
atgaataccaaactgacaaaaatcatttccggtctctttgtcgcaaccgccgcctttcagacagcatcggcaggaaacattacagacatcaaagtttcctccctgcccaacaaacagaaaatcgtcaaagtcagctttgacaaagagattgtcaacccgaccggcttcgtaacctcctcaccggcccgcatcgccttggactttgaacaaaccggcatttccatggatcaacaggtactcgaatatgccgatcctctgttgagcaaaatcagtgccgcacaaaacagcagccgtgcgcgtctggttctgaatctgaacaaaccgggccaatacaataccgaagtacgcgggaacaaagtttggatattcattaacgaatcggacgataccgtgtccgcccccgcacgccccgccgtaaaagccgcgcctgccgcaccggcaaaacaacaggctgccgcaccgtctaccaagtccgcagtatccgtatccaaaccctttaccccggcaaaacaacaggctgccgcaccgtttaccgagtccgtagtatccgtatccgcaccgttcagcccggcaaaacaacaggcggcggcatcagcaaaacaacagacggcagcaccagcaaaacaacaggcggcagcaccagcaaaacaaaccaatatcgatttccgcaaagacggcaaaaatgccggcattatcgaattggctgcattgggctttgccgggcagcccgacatcagccaacagcacgaccacatcatcgttacgctgaaaaaccataccctgccgaccacgctccaacgcagtttggatgtggcagactttaaaacaccggttcaaaaggttacgctgaaacgcctcaataacgacacccagctgattatcacaacagccggcaactgggaactcgtcaacaaatccgccgcgcccggatactttaccttccaagtcctgccgaaaaaacaaaacctcgagtcaggcggcgtgaacaatgcgcccaaaaccttcacaggccggaaaatctcccttgacttccaagatgtcgaaatccgcaccatcctgcagattttggcaaaagaatccgggatgaacattgttgccagcgactccgtcaacggcaaaatgaccctctccctcaaagacgtaccttgggatcaggctttggatttggttatgcaggcacgcaacctcgatatgcgccaacaagggaacatcgtcaacatcgcgccccgcgacgagctgcttgccaaagacaaagccttcttacaggcggaaaaagacattgccgatctgggcgcgctgtattcacaaaacttccaattgaaatacaaaaatgtggaagaattccgcagcatcctgcgtttggacaatgccgacacaaccggaaaccgcaatacgcttgtcagcggcaggggcagcgtgctgatcgatcccgccaccaataccctgattgttaccgatacccgcagcgtcatcgaaaaattccgcaaactgattgacgaattggacgtacccgcgcaacaagtgatgattgaggcgcgtatcgtcgaagcggcagacggcttctcgcgcgatttgggcgttaaattcggcgcgacaggcaagaaaaagctgaaaaatgatacaagcgcattcggctggggggtaaactccggcttcggcggcgacgataaatggggggccgaaaccaaaatcaacctgccgattaccgctgccgcaaacagcatttcgctggtgcgcgcgatttcctccggtgccttgaatttggaattgtccgcatccgaatcgctttcaaaaaccaaaacgcttgccaatccgcgcgtgctgacccaaaaccgcaaagaggccaaaatcgaatccggttacgaaattcctttcaccgtaacctcaatcgcgaacggcggcagcagcacgaacacggaactcaaaaaagccgtcttggggctgaccgttacgccgaacatcacgcccgacggccaaatcattatgaccgtcaaaatcaacaaggactcgcctgcgcaatgtgcctccggtaatcagacgatcctgtgtatttcgaccaaaaacctgaatacgcaggctatggttgaaaacggcggcacattgattgtcggcggtatttatgaagaagacaacggcaatacgctgaccaaagtccccctgttgggcgacatccccgttatcggcaacctctttaaaacacgcgggaaaaaaaccgaccgccgcgaactgctgattttcattaccccgaggattatgggtacggccggcaacagcctgcgctattga

SEQ ID NO: 38975 - DNA, 1293 bp, Neisseria meningitidis
atggctgtcttcccactttcggcaaaacatcggaaatacgcgctgcgtgcgcttgccgtttcgattattttggtgtcggcggcatacattgcttcgacagagaggacggagcgcgtcagaccgcagcgcgtggaacaaaatctgccgccgctgtcttggggcggcagcggcgttcagacggcatattgggtgcaggaggcggtgcagccgggcgactcgctggcggacgtgctggcgcgttcgggtatggcgcgggacgagattgcccgaatcacggaaaaatatggcggcgaagccgatttgcggcatttgcgtgccgaccagtcggttcatgttttggtcggcggcgacggcggcgcgcgcgaagtgcagttttttaccgacgaagacggcgagcgcaatctggtcgctttggaaaagaaaggcggcatatggcggcggtcggcttctgaggcggatatgaaggttttgccgacgctgcgttcggtcgtggtcaaaacgtcggcgcgcggttcgctggcgcgggcggaagtgcccgtcgaaatccgcgaatccttaagcgggattttcgccggccgcttcagccttgacggtttgaaggaaggcgatgccgtgcgcctgatgtacgacagcctgtatttccacgggcagcaggtggcggcgggcgatattttggcggctgaagtcgttaagggcggcacaaggcatcaggcgttctattaccgttcggacaaggaaggcggagggggcggcaattattatgatgaagacggcaaggtgttgcaggaaaaaggcggcttcaacatcgagccgctggtctatacgcgcatttcttcgccgttcggctaccgtatgcaccccatcctgcacacatggcggctgcacacgggcatcgattatgccgcaccgcagggaacgccggtcagggcttccgccgacggcgtgattacctttaaaggccggaagggcggatacggcaacgcggtgatgatacgccacgccaacggtgtggaaacgctgtacgcgcacttgagcgcgttttcgcaggcacaaggcaatgtgcgcggcggcgaggtcatcggttttgtcggttcgacagggcgttcgaccgggccgcacctgcattacgaggcacgcatcaacgggcagcccgtcaatcctgtttcggtcgcattgccgacacccgaattgacgcaggcggacaaggcggcgtttgccgcgcagaaacagaaggcggacgcgctgcttgcgcgcttgcgcggcataccggttaccgtgtcgcaatcggattga

SEQ ID NO: 38976 - DNA, 585 bp, Neisseria meningitidis
atgcccaaatcaccgccacccaagccgacaccgttcccatcgccggcaaaaatagaagtcgatgaaaaaggacaaatcaacggccaaaccacaccgagtaaggacagcgatgcccgttggataaagaaaaacggcctctacaaactcggttacaaacaacatacccgtaccgatgcagaaggctatatcgagaaactgcacattacccccgccaatgcccatgagtgcaaacacctgtcgccgttgttggaaggactgcccaaaggtacgaccgtctatgccgacaaaggctatgacagtgcggaaaaccggcaacatctggaagaacatcagttgcaggacggcattatgcgcaaagcctgccgcaaccgtccgctgtcggaagcgcaaaccaaacgcaaccgatatttatcgaagacccgttatgtggtcgaacaaagctttggtacgctgcaccgtaaattccgctatgcccgggcagcctatttcggactgattaaagtgagtgcgcaaagccacctgaaggcgatgtgtttgaacctgttgaaagccgccaacaggctaagtgcgcccgctgccgcctaa

SEQ ID NO: 38977 - DNA, 483 bp, Neisseria meningitidis
atgaacctgctgacactgttacgccccgccaccgtgcaagactgcaaagacatcttcaaagtccacctgcactccgtccaatacacctgcatcctcagctacaacgaacacgccctaaaagtatgggaaggcttgttaaacacagaaagctacctgccgaccatttccgatcccgacaaagcactttgggttgccgaatacaaaggcaacatacagggatttttccaaatcgactgccaagaagcacaactcgatgcactttacgtccaccccctgttccacaacctcggactgggcactgccctgcttcatcaggcggaaaccatcgcccacaaatccggtttgagctttctgaaactctacgcatcgctcaactccgtcccgttttaccttctcaaccgctacgaatcgctcggttcggcagtattgcagcttgaccccagcatcaaaatcaaatgcgaactgatgcggaaacacctctga

SEQ ID NO: 38978 - DNA, 1293 bp, Neisseria meningitidis
atgcagttctcagcattcggcgaaaaattcacgcaacacagcggcatcctccaactgatggacgacctcggcgacgcgctcaaaagcgacaagcccgtcaacatgctcggcggcggcaacccggcgcgcattccggaaatcgatcaggcgttcgccgacatattctccaaactggcggcagaacacgccgtcgaaaacatcggcaactactccaatccccaaggcgatgccgtgctgattgacgcgctgaccgccttcctcaaccgcgaatacagctggaatctgaccgccgacaatatcgcgctgaccaacggttcgcaaaacgcgtttttctatcttttcaacctcttcggcggcaaattcaagctttcagacggcacatccgcagaaaaagccattttgttgccgctcgcgcccgaatacatcggctatgccgacgtgcatgtcgaagggcagcacttcgtttccgtcaagcccaaaatcgaaaacgtcgaacacgaaggcgaagcaggcttcttcaaataccgcgtggactttgacgcactggaaaacctgcccgaactcaaagcgggcaaaatcggcgcgatttgctgttcgcgcccgaccaacccgaccggcaatgtgttgaccgacggcgaaatggcgcgtttggacgctttggcgcgtgaacacgggattccgctgattatcgacaacgcctacggaatgccgttccccaacatcatttacagcgacgtaacgctgaattggcatgaaaacatcatcctctgcttcagcctttccaaagtcggcctgccgggcgttcgcaccggcatcatcgtcgccgcgccggaagtggtcaaagccgtcagcagcctgaacgcgattgtgaaccttgcccccacgcgcttcggcgcggccatcgccgccccgctactggaaagcggcgagatgaaacggcttgccgaccaagtcatccggccgttttaccgcaatcaggcgcaaaccgccgtctcgctgctcaagcgcgagctgggcgcgtacccgatgaaaatccacaaacccgaaggcgcgattttcctgtggctctggtttgaaaacctgcccgtttcttcgcaaaccctgtacgaaatgctcaaagccgaaggtacgctgattattccgggcgaacatttcttcgtcggcatcgacacgcaggattacccgcacgcgggcgagtgcatccgcatgagcatcgcgcaggacgctcaaacgctggaaaaaggcattgccgccatcggcaaaaccgtccgaaaactgtacgacaacgtttaa

SEQ ID NO: 38979 - DNA, 570 bp, Neisseria meningitidis
atggcggcaggcaaacataccaaacacagcaaccgggtacgcattatcggcgggcaatgccggggcaggaaattaagtttcacatccgccgacggactgcgtccgacacccgacagcgtgcgtgaaaagctgtttaactggctgggacaggatttgacgggtaaaacggttttggatctcttcggaggcagcggcgcactcggtatagaagccgcttcgcgcaacgccaaacgcgtgctgatttcggataacaaccgccaaaccgtgcagaccttgcagaaaaacagtcgcgaactgggtttggggcaggtgcaaatcgtcttttcagacggcatcgcatatttgaagaccgtatccgaacagtttgatgttgtctttctcgacccgccgtttgcatggcaggactggcaaatcctgtttgatgccttgaagccgtgcctgaacccccgagcattcgtctatctcgaggcgggtacgctgccggatattcccgattggctgacggaatatagagaagggaaatcggggcagagtacattcgaattaagggttttccaagtggctgaataa

SEQ ID NO: 38980 - DNA, 837 bp, Neisseria meningitidis
atgttagcgctcaaaacgcccgacgtactgcccggcttcaaactcagccttggtctgaccgtattgtgcctgtcgctgcttgtggtcttgccgtttgcgatgatggcggcgaaggcggcggaaatcggctggagcggattttggaacacgattaccgaacccaatgtcttggcggccgtctggctgagtttgcggatgtcgttttatgcgatgctgaccaatgtcgtgttcggcacgctggtggcgtgggtattggtgcgttatgaattcccgggcaagggtctggcgaacgcgctggtcgatttgccgtttgcgctgccgacggcggttacgggtatcgcgttggcgaccctgtatgcgcccaacggttggataggccgttttttcgagcctttgggcatcaaaatcgcgtttacgcccgtcggcatttggattgcgctggtcgtcgtcagcctgccctttatcgtccgcgccgtgcagccggtgttggaggaattatcgggcgaatatgaggaagcggcggcgactttgggcgcaaaccgctttacgacgttccgccgcgtgctgctgccggaaatcacgccggcactcttgaccggctcgggaatgatgttcgcgcgggcaacgggggaatacggctcggtgatttttatcgcgggcaatattccgatggtttctgaaatcctgccgctgattattacgggcaagctggaacagttcgacgtgcagggcgcgtcggcggtggcgttgtttatgctgctggtttcgtttgtgattctgtttgcgctgaacgtgatgcagtgggcgttgggcaggcgttcgggcgcgaagggttga

SEQ ID NO: 38981 - DNA, 627 bp, Neisseria meningitidis
atgacgcaagaacgtttacccgaatttttcgaccgcgccccgacgctgaccgtacaagacccgcttgccgcattcctcggcgcggccgaaaacggcatcctcacttaccgctacgccgatgccgtgcgcctgtgcggacattcctgcccgaccgtcgcgggcgcgtacctgatggttatcaaaggtctgaaagccctttacggagaagagctgcccgaacgcggcggcatcgaagccgccatgcagggagcgcgcgacgaaggcacggtcggcgtaaccgcgtccgtcgtccaacttctcaccggcgcagcccccgaaaccggcttcggaggcatcggaatgcagggacgcttcgcccgccgcaacctcttatcctttggtgtaggcgaaatcaacggcacactgaccctgcgccgcaaagacaacggcaaaaccgtcgccgtcggcctcaacgccgccctgcaacccttcgcacccgaaatgcgcgacatcatgcccaaagccgtcagcggcagcgcaagcgcagaagaactcgaacgcttcggacaactctggcaggcacgcgttaaagcatttttaaccgaatcggcggacgacccgcagttcgtcatcgtccgcgaagtgtga

SEQ ID NO: 38982 - DNA, 588 bp, Neisseria meningitidis
ttgaatattaaactgaaaaccttgttattgcccttcgccacgctggcattgtgcaccaacgcttttgccgccccgcccagcgacgcgtcgttggcgcgttggctggatacgcagaattttgaccgggatatagaaaaaaatatgattgagggctttcatgccggatttaaaccgtatgcggacaaagcccttgccgaaatgccggaagcgaaaaaagatcaggcggcaaaagcctttaaccgctatcgtgagaatgttttgaaagatttgattacgcccgaagtgaaacaggctgtccgcaatactttattgaagaatgcccgtgagatatacacgcaagaagaaattgacggcatgattgccttttacggttcgcctgtcggtcagtccgtcgttgccaaaaatccgcgcttaatcaagaaatcgatgagtgaaatagcagtatcttggactgcattgtcagggaaaatcgcgcgacatcatctgcccgcgtttacggaagagttgcggcgcatcatctgcggcggtaaaaatcccgatgcgggctgtaaacaagccggacaggttgggaaaaggcatcagaaataa

SEQ ID NO: 38983 - DNA, 1671 bp, Neisseria meningitidis
atgaaaaaaatctggttagacagctacgagaagggcgtcagtgccgaaatcgacatcacgcaatacaattccgtcagcgacgtattccgccaaagcgtggaaaaatttgccgaccaacctgcttttcaaaacatgggtaagacgctgacttatgccgaaaccggcaaactggcaacagattttgcttcttatctgcaaaacgtccttaaattgcctcgaggagagcgcgtggcaataatgttgcccaatgtactgcaatatccggttgcccttttcggcattttgcaggcaggtttggtagcggtgaacaccaatccgctctataccccgcgcgagctggagcatcagttgaaagacagcggcgcgaccgccatcatcgttttggaaaatttcgccaacacgctggagctggtgctgccgcgcacgcagatcaaacacgtcatcgtcgcctctgtcggcgaaatgttcgggctgcttaaaggttcgctgatcaatttcatcatccggaaaatcaagaaaatggtgcccgaataccgtattcgggaaaccatttcctttcagacggcattgaaagaaggggcgaagcacgttttccaacctgtcgcattaaaccgcgaagataccgcgctgttgcaatacacgggcggcacgacaggtgttgccaaaggggcggtgctgagtcacggcaacatctgcgccaatatgcttcaggcaaaagaatggattaaaaaccagttgcgcgagggcaaagaaaccgttatcgccgccctgccgctgtatcatatttttgccttaaccgtgaatctgatgatttttgccaatgccggctcgaaaatcatcctgattaccaacccgcgcgatatgaaaggctttatcggagaactgaaaaaacagcgggttaatgtatttatcggcgtgaacacgctgtttaacgcgatggttaaccgtcctgattttgccgaagtcgatttttcaggattgcggctgactttgggcggcggtatggcgacccaaaaagccgttgccgaaaaatggaaaaaaatcaccggcacgcccatcgtcgaagcctacggtctgaccgaagccagccccggcgtgtgctgcaaccccttaaacatcgaatcatacagcggcagcatcggtttgcccgtctcgtccaccgaagtcgaactgcgcgacgcaaacggcaaagaagtccccgtcgggcagccgggcgaattgtgggtaaaaggccctcaagtgatgcaaggctactggaaccgccccgaagaaaccgccaaagccatagacgcgcgcggcttcttggaaaccggcgatattgccgtcatggacgaaaaaggctggttgaagctggtcgatcgtaagaaagacctcgtcgttgtttccggattcaatgtttatccgaacgaaatcgaggaagtcatcgcgcatcacggcaaagtcatggaagtcgcctgtatcggcgttcccgacgaaaaaaccggcgaggcactcaaagtattcgtcgtcaaaaaagacccgtcattgaccaaagaagaacttatcgccttttgccgcaccgaattaaccgcatataaagtaccgaaaaatatcgaattccgcgacgagttgcccaagtccaacgtcggcaaaatcctgcgccgcgagttgcggcaaagtaccgggaaataa

SEQ ID NO: 38984 - DNA, 4179 bp, Neisseria meningitidis
atgagctattcgtttaccgagaaaaaacgtatccgtaagagttttgcaaagcgggaaaatgttttggaagttcctttcttgctagcaacccaaattgattcttatgcgaagtttttgcagctggaaaatgcttttgacaaacgtaccgatgacggtctgcaggcagcatttaattctattttcccgattgtgagccataacggttatgcgcgattggagtttgtgcattacacattgggcgagcctttgttcgatattcccgaatgtcagttgcgcggaatcacttatgcagcccccttgcgcgcgcgtatccgtttggtgattttggataaggaagcatctaaaccgacggtaaaagaagttcgtgaaaacgaagtgtatatgggcgaaattccgttgatgaccccgagcggttcttttgtgattaacggcacagagcgtgtgattgtctcccagttgcaccgttcgcccggcgtattcttcgagcatgacaaaggtaagacgcactcttccggcaaattgttattctccgcccgcatcattccctaccgtggttcatggttggattttgaatttgatccgaaagatttgctgtatttccgtatcgaccgccgccgtaaaatgccggtaacgattttgttgaaggctttgggctacaacaatgagcaaatcttggatattttctacgacaaagaaacgttctatttgtcttcaaacggtgttcaaaccgatttggtcgcaggccgtctgaaaggcgaaactgccaaggtcgatatcttggataaagaaggcaatgtattggttgccaaaggtaagcgtattactgcgaaaaatatccgtgatattaccaatgcaggcctgacccgtttggatgtagaaccggaaagcctgctgggcaaagcattggctgccgatctgattgattcggaaaccggcgaggtattggcttctgccaatgatgaaattacagaagagttgttggccaaatttgatatcaacggcgtaaaagaaattacgaccctttacatcaatgagttggatcagggtgcttatatctccaataccttgcgtacggatgagactgccggccggcaggcggctcgtgttgcgatttaccgtatgatgcgtccgggcgaaccgcccactgaagaggcggtcgagcaattgtttaaccgcttgttcttcagtgaagacagctacgatttgtcccgcgtaggccgtatgaaatttaatacgcgcacatacgaacaaaaactgtccgaagcccaacaaaactcttggtacggccgcctgctgaacgaaacgtttgccggtgctgccgacaaaggcggttatgtcctgagcgtcgaagatattgtcgcctcgattgcgactttggtcgagttgcgtaacggccatggcgaagtggacgatatcgatcacttgggcaaccgccgagtacgttcggtaggcgagctgactgaaaaccaattccgcagcggtttggcccgtgtggaacgtgctgtaaaagaacgtttgaatcaggcggaatcagaaaacttgatgccgcacgatttgattaatgcaaaacctgtttctgccgctattaaagaattcttcggctccagccaattgagtcagtttatggatcagaccaaccccttgtctgaagtaacccataaacgccgcgtatctgcattgggtccgggcggtttgacccgcgaacgtgccggcttcgaggtacgggacgtgcatccgacccactacggccgcgtatgtccgattgaaacgcctgaaggtccgaacatcggtttgatcaactcattgtccgtttatgcgcgcaccaatgattacggtttcttggaaacgccttaccgccgcgttatcgacggcaaagtaaccgaggaaatcgattacttgtctgccatcgaagaaggccgctatgtgattgcacaggcgaatgccgatttggattcagatggcaatctgattggcgatttggttacctgtcgtgaaaaaggcgaaaccattatggcaacgcccgaccgcgtccaatatatggacgtggcaaccggccaggtggtatccgttgcggcatccctgattccgttcttggaacatgatgacgcgaaccgcgcattgatgggtgccaacatgcaacgtcaggcagtgccttgcttgcgtcctgaaaaaccgatggtcggtaccggtatcgagcgttccgttgccgttgactctgctactgcaatcgttgcccgccgaggcggcgtggtcgagtatgtcgatgccaaccgtgttgtgattcgtgtccatgacgacgaagcgactgccggcgaagtgggtgtcgatatttacaacttggttaaatttacccgttccaaccagtctaccaatatcaatcagcgtcctgccgtcaaagccggcgatgttttgcaacgcggcgatttggtggccgatggcgcgtccaccgatttgggcgaattggctttgggtcaaaatatgaccatcgccttcatgccgtggaacggttacaactacgaagactcgattctgatttccgaaaaagtggctgcggatgatcgttacacttcgattcacattgaggaattgaatgtcgttgcccgcgataccaagctgggtgcggaagacattacccgcgatattccgaacttgtccgagcgtatgcaaaaccgcttggacgaatccggtatcgtttacatcggtgcagaagtagaagccggcgatgtgttggtaggcaaagtaacgcctaaaggcgaaacccaactgacgccggaagaaaaactgttgcgcgccatcttcggcgaaaaagcgtctgacgtaaaagatacttcactgcgtatgcctaccggtatgagcggtacggttatcgacgttcaagtcttcactcgtgaaggtattcaacgcgacaaacgcgcccaatccattatcgattccgagttgaaacgctaccgtttggatttgaacgaccaattgcgtattttcgacaacgacgcattcgaccgtatcgaacgtatgattgtgggtcaaaaagccaatggtggtccgatgaagctggctaaaggcagcgaaattactaccgaatatttggcgggtctgccgagcaggcacgattggttcgatatccgtctgaccgatgaagatttggccaagcagttggaactgattaaagtgagcctgcaacaaaaacgcgaagaagcggacgagttatacgaaatcaagaagaaaaaactgacccaaggcgacgaattgcaacccggcgtacaaaaaatggtgaaagtttttatcgccatcaaacgccgtctgcaagccggcgacaaaatggcgggccgccacggtaacaaaggcgtggtatcgcgcattctgccagtggaagacatgccttacatggcggacggccgtccggtagacatcgtactgaacccattgggcgtaccttcccgtatgaacatcggtcagattttggaagttcacttgggttgggcagcaaaaggtatcggcgagcgtatcgaccgtatgctgaaagagcaacgcaaagcaggcgagttgcgcgagttcttgaacagactctacaacggcagcggtaagaaagaagatttggacagcctgacagatgaagaaatcatcgaattggcttccaacctgcgtaaaggtgcatctttcgcttctcctgtattcgacggtgcgaaagagtctgaaatccgcgaaatgttgaacttggcttacccaagcgaagatcctgaggttgagaaactgggcttcaacgacagtaaaactcaaatcacgctgtatgacggccgttcaggcgaagcatttgatcgcaaggttacagtcggtgtgatgcactatctgaaactgcaccacttggttgacgaaaaaatgcacgcccgttctaccggtccatacagtctggttacccaacagcctttgggcggtaaagctcagttcggtggccaacgtttcggtgagatggaggtttgggcattggaagcatacggtgcggcatacacgctgcaagagatgctgactgtgaagtctgatgacgtgaacggccgtaccaaaatgtacgagaacatcgtcaaaggcgaacacaaaatcgatgccggtatgcccgagtccttcaacgtattggttaaagagattcgttcactgggcttggatatcgatttggaacgctactaa

SEQ ID NO: 38985 - DNA, 1368 bp, Neisseria meningitidis
atgcctgaccttcataccgaattttcccgactcctgccggcagatgaaattgccgaactttctccgacgcttttaaaagaccagcgcaaccgctttacgtctgcaccagacatcattttgcagccgcgcagcgttgaaagcgtgcaaaccattatgcgtttttgttacgaacaccgtattccggttacgccgcaaggcggcaataccggtttgtgcggcgcggcagtatcggaaaacggcgtattgctgaacctttccaaactcaaccgcatccgcagcatcaatttgtcagacaactgcataaccgtcgaagcaggttccgtactccaaaccgtccaacaggcagccgaagcctcaaacaggctgtttccactcagtctcgccagcgaaggctcgtgccaaatcggcggcaacatcgcctgcaatgccggaggtttgaacgtattgcgttacggcacgatgcgcgacctggttatcggtttggaagtcgtcctccccaacggcgaacgggtttcccatctccatcccctgcataaaaacaccaccggctacgacctgcgccatctgtttatcggcagcgaaggcacactgggcatcatcactgccgccacactcaagctttttgcccgtccctcggacaaggcaacggcatgggtcggcatacccgacatcgaatccgccgtccgcctgctgaccgaaacccaagctcactttgccgaacgcctatgcagttttgagctgatcggccgttttgccgccgagttgtcttccgaattcagcaaattccccctgccgacacattcagaatggcatattttacttgagttgaccgactcattacccgacagcaatcttgatgatcggcttgtcgaatttctttataaaaaaggatttaccgacagcgtattggcacaaagcgaacaagaacgtatccatatgtgggcattgcgcgaaaacatctccgcatcgcaacgcaaactgggcaccagcatcaaacacgatattgccattcctatcggacgcgttgccgactttgtccgccggtgcgccaaagatttggaacagaattttaaaggcatacaaatcgtctgcttcggacatcttggcgacggcagcctgcactacaatactttcctgcccgaaatcctcagcaatgaagtctatcgttacgaaaacgacatcaacgacgcagtttatcgcaacgttcttgcctgcaacggcacgattgccgccgaacacggcataggtatcatcaaaaaacagtggctggacaaagtacgcacgcctgccgaaatcgccctgatgaaaagcatcaaacaacaccttgatccatataacattatgaatccgggcaaactgcttccgtaa

SEQ ID NO: 38986 - DNA, 282 bp, Neisseria meningitidis
atgattcacgaagaaatctccgccatgcctatgggctatgaaaccttgatcggcgatatgggcagcgcactgtcaggcggacaaaaacaacgcatcgtattggcgcgggccttatattgcgaaccgaaaatcctatttttagatgcagcgaccagccatttggatattgccaatgaaaaagcagtcaatgcaaacttgaatggcttgtctatcataaaaattatggcggcacacagaaaggaaacggtggaatcagcagataggaaaatgtctttaggataa

SEQ ID NO: 38987 - DNA, 1341 bp, Neisseria meningitidis
atgaacaaacaacccctttccctcgccgtcgtcgggcataccaacaccggcaaaacctcgctcctgcgtacccttttgcgcgacagcggtttcggcgaagtcagaaacgccccatcgaccacgcgtcatgtcgaagaagccgccatcagcgacggcgcagacacgctggttttcctgtacgacacgcccggactcgaagacgcgggcggcgtgctggaatggctggaaaaccatacggacaatcgttcagacggcatcgaacggctgcaacagtttctcggcagccacggcgcgcaccatgatttcaatcaggaagccaaagtcttacggcaagtcttgcaaagcgatatggcaatgtacgtcatcgacgcgcgcgaacccgttctcgacaaatatcgggatgaattgattatcctttcatggtgcgccaaaccggttatgcccgtgttcaactttaccggcggacagcctcccgaatcgtggacaaccatgctggcgaggagaaacctgcacgttttcgcagggttcgacaccgtcgcctttgattttgaaggcgaactacgcctgtgggaaaacctcgccaccatgttgcccgaacgcagcacacttgaccgcctgacagccatgcgccggcgcgaatggcagcggctggacggcgaagcgcgccgcgaaatcgccgatttcctgctcgatgccgccgccttcaggcaggaagtggacgaaaacgaggataccgccaccgtgctgcaaaccatgcaggcggaaatacgccaactcgaacggcagatgcagcagcggctgtttgccctctaccgtttctaccacagcgaaatcgacggcggcgactggatgccgcaagccttccgccaagacccgttcgacagcgaattgctcaaacaatacggcatccgcaccggcacgggtgcggcaaccggcgcgctcatcggcttggggctggacatcgccacactcggcggctcgctcggattgggtacggcaatcggcggctttttgggcggcatcctgcccaatacccgcaccatttccgacaaactctccggccgccaaaccttgcacaccgaccctgaaaccttgaccctgctcgccgcccgcgccctcgatttgctccacgtcctgcaaacgcgcggacacgcggcacagtcggatatcgagctgcacagccgcaaagccccgtgggacgccgccagactcccgcccgaactcaacaaagcccgcagtcattggaaatggtcgtcgctcaatacgcaccgccccgaaaccagccgtaccgaacgcagggaatatgcggagaagcttgggatacgtttagcgggcaaataa

SEQ ID NO: 38988 - DNA, 948 bp, Neisseria meningitidis
atgaccgacatcacaccgtttgccaaccgcttgggcaaaaacatcaaacaccttatgaaatgggcgaaacgcaacggcatcgaagcctggcgcatttacgaccgcgacatcccccaattcccctttgccgccgatgtttacggcgatcgaatccaccttcaggaatacgataccggctggctgatgcggcccgaagaatacgaagcgtggcttgccgaagtcttggaagccgtcgccttcgttaccggttttgcgcccgaacaaatccgcctcaaacgccgcgaacgccaaaaaggtttgcagcaatacgaaaaaaccggcaaggcgggcgacgatttcgtcatcaccgaaaacggccgcaagttttgggtcaaccttgataagtatttggatacggggctttttttggatcatcgaaacacgcgcaaaaaagtcggcgaaacggcggcgggcaaacgttttttaaacctgttttcctacaccggcagcttcactgtctatgccgccaccggcggcgcggcatccagcgaaactgtcgatttgtctaacacttatctcgattgggcgagacgcaattttgaattgaacggcatcgatacggaacggcataaaatcgtccgcgccgacgtgttccaatatcttcagacggcatatggggaaggcaggcggttcgacctcattgtgatggacccgcccagtttttccaacagcaagaaaatgtccgacatcctcgacatccagcgcgaccacaaaaagctgattgacggcgcggtgaagctgctcgcttcagacggcattttgtacttttccaacaacctgcgcagcttcgtcttagacgacttggtatcggaacaatacgccgtcaaagacatttccaaacaatccgttcccgaagatttccgcaacaaaaaaatccataggtgctgggaaatccgccacaaatcttaa

SEQ ID NO: 38989 - DNA, 750 bp, Neisseria meningitidis
atggtattgcgcagggattttctgacttggtgtaatgaaacattgcagacagcgttgtttaaagattacgcccctaacggtttgcaggttgaagggagggaatatatcgggaaaatcgttacgtcggtaacggcaagcagggcagcgattgattttgctgtggagcagaaggcagatttgcttttggtacatcacggtatgttctggaaaaacgagttgccgaccgttactggttggaaaaaagaacggattgccgcactgttacggcacgacatcaatatggcaggctaccatctgcccctggatgcacatcccacactgggcaacaatgcccaactcgccgacagattgggttttgcgacagaaaaacggttcggcgaacaaaacctgctcaactcgggcagcctgaaacaagccaagacactcggcgcattggcggcgcatattgaaacagttttgcaacgtaagcctgtcgtcatcggcaaacccgaacgcgaaatccgacgggttgcatggtgcagcggcggggcgcaggggttttttcagacggcaatagacgaaggtgtcgatctgtatttgacgggggaaatttccgaagcccaataccaccttgccaatgaaacgggtacggctttcatttcggcagggcatcacgcgacggaacgttacggcgtacgcgcgctggcagaatcggcggcagaggttttcgggttggaattgtgccattttgacgaaaacaatccggcttga

SEQ ID NO: 38990 - DNA, 864 bp, Neisseria meningitidis
atgaataacgctttcgcattacccgccatccaaagcggcaacggcagcctcgaacaatacatccacaccgtcaacagcatcccgatgctgtcccaggaagaagaaacccgcctcgccgaacgccggataaagggcgacctcaacgccgccaaacaactcatcctgtcccacctgcgcgtcgtcgtttccatcgcgcgcggctatgacggctacgggctgaatcaggcagacctgattcaggaaggcaatatcggactgatgaaggcggtcaaacgctacgagcccggtagaggcgcgcgtctgttttcatttgccgtacactggattaaagccgaaatccacgagtttattttgagaaactggcgtttggttcgcgttgccaccaccaaaccgcaacgcaagctgtttttcaatttacgcagtatgcgtaaaaacctcaacgccctgtctcccaaagaggcacaagacatcgccgacgatttgggtgtcaaactttccgaagttctggaaatggaacagcgcatgacgggacacgacatcgccatcatggcagacaacagcgacgacgaggacagtttcgcccccatcgactggcttgccgaccacgattccgaaccgagccggcaactatcgaaacaggcgcattacgccctgcaaacagaaggtttacaaaacgctttggcgcaactggatgacaggagccgccgtattgtggaaagccgctggcttcaagacgacggcgggctgacgctgcaccagcttgccgccgaatacggcgtatctgccgaacgcatccgccaaatcgaagcaaaagccatgcagaaactgcgtggtttcctgaccgaagaagccgaagcggtttga

SEQ ID NO: 38991 - DNA, 618 bp, Neisseria meningitidis; identical to SEQ ID NO: 38509

SEQ ID NO: 38992 - DNA, 891 bp, Neisseria meningitidis
atgtttcccgtttttcatctttcaggcgagagccgccgccggatgcttcagacggcattgcgttttccccatgttttcaaagcccgtgcggaagattcgcacaaagggactttcggcacgctcgccgtagtcggtggatcggcagggatgagcggcgcgcccgtattggcggcatcggcggcaatgtatctcggctgcggcaaagtgtgggtgggtttcaatcaggatacgctaccttttgccgttattgccggttttcccgagattatgctggatacggcggacagtttggccaaacgtcaagatataaacgcctgggttgtcggttgtggattgggtacaggtagggcggcggtcggaacgcttgccggaattttgacggaacacacggacaagcccgtccttttggatgcggacgcgctgaacatattatcaaccgatgccgaaacccgaaatctggcacgcgggtgtaaaaatctgattttaacgccacaccccgccgaagccgcgcgcctgcttggaacgacggttgcacaggttcaggcggatcggacggcggcagtgaggaagataggggcaattttcggcgcaaccgtggttttaaaggggcacaaaacattggttgccgcgtccgatacggaaatctatgtcaacgaaagtggcaacgcgggattggcaacggcgggcagtggcgacgtattgggcggcatcatcggcagtctgctcgcacagggcgtgccggtttttgaagccgcctgcgcgggcgcgtggctgcacggcgcggcggcggatgtcataaaagaatcggcaggcattgcggcggggctgttggctggcgaaatcgccccggcggcaaggtggctgcgcaaccggataactgaaagtatgtaa

SEQ ID NO: 38993 - DNA, 183 bp, Neisseria meningitidis
atggaaaaaaaattcttagacatcctcgtctgccccgttaccaaaggcaggctggaatatcatcaggacaaacaggaattgtggagccgtcaggcgaagcttgcctatccgattaaagacggcattccctatatgctggaaaacgaagcgcgagcgttgagcgaagaggaactcaaagcatga

SEQ ID NO: 38994 - DNA, 489 bp, Neisseria meningitidis
atgaccgccttgctcgtcatcctcgccctcgccctgatagccgccggtacggcgggcatcgtttaccccgccctgcccggattggcattgatgtttgccggaacctggctgctcgcctactccggcggctaccaaatctacggcgcgggcgttttgtggacggtcggactcatcagccttgccggcatactggcggactatgtggcaggcatatgggggacaaaatataccggagcgggcaagctcgccgttcgcggcgcattggccggcagcatcatcggcatatttttctcccttcccggactaatactcggtccctttatcggcgcggcggcaggcgaactgatcgatcggcgcaatatgcttcaggcaggtaaagcgggcttgggtacgctgttggggcttatcgtcggtacgacattcaaaatcggctgcgccgtatccatcttgtttatcctgttggtgaaatacatcgcctacctgttttaa

SEQ ID NO: 38995 - DNA, 1407 bp, Neisseria meningitidis
gtggaatttagcacaaaaaccgaaatcttgcaggaacagcaggcaggcgcacagttatttgtctgcaccgaagaggcgcaattaaaccatccgaccgcccttgcccttttgtcttcgcttgaagaaggtcaaaattttgccgacacaaaaatcccgacaggcaacggtttgcaggctgttgccgtatgctgtctgaaaagcaccggccgcgccgcattgaacaaggccgccgccgaagccgccaaatgggcgcaaaatcaggaaacggtcaatgtggacatccatgccttcgatgaagcgcaagccgccgccgtagccgaagcgtttgcgattgcgttcggcaacgccgcctaccgtttcgaccgctacaaaaaagaagccaagcccgccaaatttgaaaccgccgtgttccacagcgcacacgaagccgtcgttaaagaagccttgcgcgtcgccgaagcgcaagtttacggacaaagcctctgccgcgacttgggcaacgccgcgcccaacgaatgcacgcccgaatttttagcgcgcaccgccaaagccgaagccgaaaaactgggcgcgcacgccaaaatcatcgaaaaagactacatcaaagaaaacatgggttcgttttggtcggtcgccaaaggcagtgtcgaagatccctatttggtcgaactgagctatttcggtgcggcggacaaagaagccgcgcctgtggtattggtcggcaaaggcattaccttcgacaccggcggcatttccctcaaacccggcctgaacatggacgaaatgaagtttgatatgtgcggcgcggcaaccgtcatcagcaccttctgcgccgccgtcaaactgcaactgccgattaacctgattgccgtcgtcgccacttgtgaaaatatgccttctggcgcggcaaacaaaccgggcgatgtcgtgaaaagtatgaaaggtctgaccatcgaagtgttgaacaccgatgccgaaggccgtctgattttgtgcgacgcgctcacttacgccgaacagttcaaacccaaagccgtcatcgacgtcgccaccctgaccggcgcgtgtattgtcgccttggggcacgatgtcagcggcgtgatgggcaacaatcaagatttggtcgacagcctgcttgccgcttcctacaacgtggacgacaaagcgtggcaactgccgctctttgaaacctacaaagaccagctcaaatccaactttgccgacatccccaatatcggcacgcccggcgcgggcacgattaccgccgcaacattcctgtcttacttcaccgaaggctacccgtgggcgcaccttgacatcgcgggtacggcgtggaaatccggagcggaaaaaggtgcgaccggccgtcccgttcccttgctgctgaactatctgcggaatctttaa

SEQ ID NO: 38996 - DNA, 2262 bp, Neisseria meningitidis
atgttacaaatcgaaatcgacggcaaacaagtatctgtggagcagggcgcgacggtgattgaagccgcgcacaagctcggtacttatattccgcatttctgttaccacaaaaaactttccatcgccgccaactgccgtatgtgtctggtgaacgtagaaaaagccccaaaacccctgcctgcctgtgccacgccggttacagacggcatgattgtgcgtacgcattcggcaaaagcccgagaggcgcaggaaggcgtgatggagttcctgctcatcaaccatccgcttgattgtccgacctgcgaccaaggcggggaatgccagttgcaggatttggcggtgggctacggaaaaaccaccagccgctacaccgaagaaaaacgttccgtcgtcggcaaagacatggggcctttggtttccgccgaggaaatgagccgctgtatccactgcacccgctgcgttcgtttcactgaagaaatcgccggtttgcaagaaattgcgatggtgaatcgcggcgaacactccgaaatcatgccctttatcggcaaaacggtggaaaccgagctgtcgggcaacgtcatcgatttgtgtcctgtcggcgcattgaccagcaaaccgttccgcttcaacgcgcgtacttgggaattgaaccgccgcaaatccgtttccgcccatgacgctttgggcagcaacctgattatacaaaccaaagaccataccgtccgccgcgtgttgccgctggaaaacgaagcgattaacgaatgttggctgtctgaccgcgaccgtttcgcctacgaaggcctgtatcacgaaagccgtctgaaaaacccgaaaatcaaacagggcggcgagtggatggacgtggattggaaaaccgcgttggaatatgtccgcagcgcgattgaatgtatcgccaaagacggcaaccaaaaccaagtcggcatttgggccaatccgatgaatacggttgaagagctgtatctggccaaaaagcttgccaatggtttgggtgttaaaaactttgccacccgtttgcgccaacaagacaaacgtctttcagacgaccttaaaggtgcacaatggttgggacaaagcattgaatctttggctgacaacgatgccgtattggtagtcggtgcgaacttgcgcaaagaacagccgctcctgaccgcccgcctgcgccgcgccgccaaagaccgtatggccttgagcgtattggccggcagcaaggaagagttgttgatgccgcttctctctcaagaagccgcacatcccgacgagtgggcaggccgtctgaaaaacctgtctgccaatgcggaacacgccgttaccgccagcctgaaaaatgctgaaaaagcagcggtgattttgggcgcggaagtgcaaaaccatcctgattacgccgccatttatgctgccgcgcaagagctggcagccgcgaccggcgcagtgctgggcattttgccgcaagctgccaacagcgttggtgcggatgtcttaaatgtaaactctggtgagagcgttgccgaaatggcaaatgcgccgaaacaggcagtcttgctgctcaacgtcgagcctgaaatcgatacggttgacggtgcaaaagctgtagccgcattgaaacaggcgaaaagcgtgatggcatttacgccgtttgtcagtgaaacgctgctggacgtgtgcgacgtattgttgccgattgcgccgtttaccgaaacatcaggcagcttcatcaatatggaaggccgtctgcaatctttccacggcgtggtacaaggcttcggcgactcgcgtccgatgtggaaagtgttgcgcgtattgggcaatctgtttgacctgaaaggttttgaataccacgataccgctgcgattttgaaagacgcgctggatgcagaaagcctgtcgtccaaactggacaaccgcagtacatggacaggggagggcgttcagacggcatcagaccgcctcgtccgtgtcggcggcgtcggtatttatcacaccgatgccatcgtacgccgttccgcaccgttgcaagaaaccagccatgccgccgtgcctgccgcgcgtgtaaatccgaacacattggcacgcttgggcctgcaagacggacaaaccgctgtcgccaaacaaaacggcgcaagcgtatcggttgctgtcaaagccgatgccggtttgcctgaaaacgtgatgcatctgccgctgcataccgaaaatgccgcgctgggtgcgttgatggacactattgaactggcgggagcttga

SEQ ID NO: 38997 - DNA, 687 bp, Neisseria meningitidis
atgaaaacgattaatcctgaaaccaccgtcatcgtcttcgacttggacgataccctgtattcggaatacgaatacaagctctccggtatccgttcggtcatcgataccgttgccgcactgtatcccgattggaattcagacaacctatggcgcaacatcgaccccgacggcaaagattggctggacaaattgtgccgccactgtggttttaatgaatcggaaaaacaggttcttttgtggcaataccggctgcaccgcccgacgctgactccgtatgctccgccggatttcctgtccgaactgaccgcgcccttcgccgcacgcgcgctgattaccgacggcagaagcctgacccaacgcctgaagctggaagccttgggtctgtcttccctgtttgacgacatcctcatctctgaagcctgctcttcggaaaagcccgacagcaaacgcttccgccatcttcaagacaaatatgccgacaaggcaggctgcttcatctatatcggcgacaacatttccaaagactttatcgcgccgaacactttgggctggataaccataggattgcttccctccggacagaacatccaccgccaccagcctgaaagttttaacacagaatatcatcccgacttttgggttaactcctttcaagatttagttcctataattgattcaaatacttaa

SEQ ID NO: 38998 - DNA, 861 bp, Neisseria meningitidis
atggcaaaagtaaaaggcggattggggcgcggcttggattcgctgctcgccaacggcgcggacaacagcagcggcgaccgattgaccacggttgcggttaaagatatccggcccggccgctatcaggcgcgtgttcaaatcgatgacgaagccttgcaggaactggcagattcgattaaggcgcaaggcgtgatacagcccgtcatcgtgcgcgaacacggactgtcccgatacgaactgattgcgggggagcggcgttggcgtgccgcacagattgccggcctgaccgaaatccccgccgttatcaaaaccatcagcgacgaaaccgcattggcaatgggtttgatcgaaaacctccagcgcgaaaacctcaaccccatcgaagaagcacaaggcttgaaacgccttgccgacgagttcgggctgacccacgaaaccatcgcccaggccgtcggcaaaagccgaagcgcgatttccaacagcctgcgccttttaagcctgcccggacccgtgcaggaaatgctttaccaacgccgcctcgaaatgggacacgcccgcgcattgctgacactgcccgtcgtcgaacagctcgagttggcgcaaaaggccgtcaaaaacggctggtcggtgcgcgaagtcgagcgccgcagccaagccgcctttcaaaacaaacgtcccgagcccaaaaagactgccgccgccgacatcggccgcctgaatgatttgctgactgaaaaactgggtgtcaacgccgaaatcaaaaccgccaaccataaaaaaggcaaaatcatcctgcatttcgacacgcccgaaaccttcgaccatatcttgaagcaattgggcatagattaccgaccttaa

SEQ ID NO: 38999 - DNA, 1290 bp, Neisseria meningitidis
atgaaaaaactcaacacccaatcgcccgatttccaagccggactcaaagccctgctggcttttgaaaccgcgcaaaaccccgaaaccgaacgcatcgtcgccgacatttgcgccgacgtgcaaaagcgcggcgatgcggctttgattgaatacaccaacaaattcgatcagacaaacgctaaaagcatcgatgatttaatactcacgcaagccgatttgaacgcggcgttcgagcgcattccgaacgacgttcagacggcattgcagaccgccgcccgccgtgtcgaaagctaccaccaacgccaaaaaatggaatcgtggagctacaccgatgaagacggcacgctgttgggacaacagattaccccgcttgaccgcgtcggcatttacgtccccggcggcaaggcggcatatccgagttccgtcatcatgaacgccatgcccgcccacgtcgcaggcgtgaaagaaatcatcatggtcgtgccgacaccgaaaggcgaacgcaacgacatcgtgcttgccgccgcatacgtcgccggcgtaaccaaagtcttcaccgtcggcggcgcgcaggcggttgccgccctcgcctacggcacggaaaccatcccccaagtcgataaaatcaccggtccgggcaacgccttcgtcgccgccgccaaacgccgcgtgttcggcgtggtcggcatcgacatggtggcggggccgtctgaaatcctggtcatcgccgacggcacgacacctgccgattgggtggcgatggatttgttcagccaggccgaacacgacgaaattgcccaagccatcctcatcggcacgtcgcaagcgtatctcgacgaagtagaagccgctatggaccgcctgatcgaaactatgccgcgccgcgacatcatcgaagcctcgctcggcaacaggggcgcgatgatactcgccaaagacttggacgaagcctgcgaaatcgccaactacatttcccccgaacacttggaactgtcagtcgaaaatccgcaggaatgggcgaaaaaaatccgccacgccggtgcgattttcatgggacgctacaccggcgaaagcctcggcgactactgcgccggtccaaaccatgtattgcccaccagccgaaccgcccgcttttcctcgcctttggggacatatgatttccaaaaacgctccagcctgattcaggtttcggaacagggcgcgcaaaaattaggcgaaaccgccagcgtgctggcacacggcgaaagcctgaccgcccacgcccgcgcggcagagttccgtatgaaataa

SEQ ID NO: 39000 - DNA, 438 bp, Neisseria meningitidis
gtggggatgatggggttcgaaaaagttgaacatttattgccggataccgtgttggacattgtggatgtcatcggactggcagcgacggaacagctggtcaaggcgattggcggggcgcggtttaaatttggtaagggcaaggtggacaccgagcgtttggcaattttggtcgaagccatcggcgaagtgaaaacacatgagctgttgcaggtatatggtggcgaggaattgtatgtcccacggtgcggcaaggcgttaatacagttgagaaaccataggttttatcaggagtttgtcaaattgcgcgatattgataaggagagcgggcttatggcgatgacgaagctatgccctaaatacggcatctcttcacgaacgggatatacgattatcaatgaaatgagccgacctgcggcacagcaggcagctttattttag

SEQ ID NO: 39001 - DNA, 237 bp, Neisseria meningitidis; identical to SEQ ID NO: 37424

SEQ ID NO: 39002 - DNA, 909 bp, Neisseria meningitidis; identical to SEQ ID NO: 37968

SEQ ID NO: 39003 - DNA, 774 bp, Neisseria meningitidis
atgagtgcgaacatccttgccatcgccaatcagaagggcggtgtgggcaaaacgacgacgacggtaaatttggcggcttcgctggcatcgcgcggcaaacgcgtgctggtggtcgatttggatccgcagggcaatgcgacgacgggcagcggtatcgacaaggcgggtttgcagtccggcgtttatcaggtcttattgggcgatgcggacgtgaaatcggcggcggtacgcggcaaagagggcggatacgctgtgttgggtgcgaaccgcgcacttgccggcgcggaaatcgaactggtgcaggaaatcgcccgggaagtgcgtttgaaaaacgcactcaaggcagtggcggaagattacgactttatcctgatcgactgtccgccttcgctgacgctgttgacgcttaacgggctggtggcagccggcggcgtgattgtgccgatgttgtgcgaatattacgcgctggaagggatttccgatttgattgcgaccgtgcgcaaaatccgtcaggcggtcaatcccgatttggacatcacgggcatcgtgcgtacgatgtacgacagccgcagcaggctggttgccgaagtcagcgaacagttgcgcagccatttcggggatttgctgtttgaaaccgtcatcccgcgcaatatccgccttgcggaagcgccgagccacggtatgccggtgatggcttatgatgcgcaggcaaagggtaccaaggcgtatcttgccttggcggacgagctggcggcgagggtgtcggggaaatag

SEQ ID NO: 39004 - DNA, 471 bp, Neisseria meningitidis
ttgaacatcaccgttttggcagtcggcaccaaaatgccgcgctgggttgatgaggccgtcgccgaatacgccaaacgcttcggacgcgacgtcgcctacgcactcaaagaaatcaaacccgaaaaacgcggcgcgggcgtgaatgccgcccaaggtatggcggcggaagaaaaacgcatccttgaagccattccgcaaggcgcgttcctcgtcgttcttgacgaacgcggcaaagcaccgacctccgtcgagctggcggaacacctcaaaagttggcagcaaaacggcgaacacgtctgcttcgtcatcggcggcgcggacggcatgaccgaccgcctcaaacaacaagcccgcatgatgatgcgcctgtccagcctcaccctgccgcacggcatggtgcgcgtctttctgaccgagcagctctaccgcgccgtttccatcctgcacaaccatccctatcatcgggaataa

SEQ ID NO: 39005 - DNA, 1071 bp, Neisseria meningitidis
atgaacctgatttcacgttacatcatccgtcaaatggcggttatggcggtttacgcgctccttgccttcctcgctttgtacagcttttttgaaatcctgtacgaaaccggcaacctcggcaaaggcagttacggcatatgggaaatgctgggctacaccgccctcaaaatgcccgcccgcgcctacgaactgatgcccctcgccgtccttatcggcggactggtctctctcagccagcttgccgccggcagcgaactgaccgtcatcaaagccagcggcatgagcaccaaaaagctgctgttgattctgtcgcagttcggttttatttttgctattgccaccgtcgcgctcggcgaatgggttgcgcccacactgagccaaaaagccgaaaacatcaaagccgccgccattaacggcaaaatcagcaccggcaataccggcatttggctcaaagaaaaaaacagcattatcaatgtgcgcgaaatgttgcccgaccataccctgctgggcattaaaatctgggcccgcaacgataaaaacgaactggcagaggcagtggaagccgattccgccgttttgaacagcgacggcagttggcagttgaaaaacatccgccgcagcacgcttggcgaagacaaagtcgaggtctctattgcggctgaagaaaactggccgatttccgtcaaacgcaacctgatggacgtattgctcgtcaaacccgaccaaatgtccgtcggcgaactgaccacctacatccgccacctccaaaacaacagccaaaacacccgaatctacgccatcgcatggtggcgcaaattggtttaccccgccgcagcctgggtgatggcgctcgtcgcctttgcctttaccccgcaaaccacccgccacggcaatatgggcttaaaactcttcggcggcatctgtctcggattgctgttccaccttgccggacggttcttcgggtttaccagccaactctacggcatcccgcccttcctcgccggcgcactacctaccatagccttcgccttgctcgctgtttggctgatacgcaaacaggaaaaacgttga

SEQ ID NO: 39006 - DNA, 585 bp, Neisseria meningitidis
atgcacatactgaccgccggcgtggacgaggcagggcgcgggcctttagtcggcagcgtgtttgccgccgccgtcatccttccggaaatattcgacctgcccggactgaccgactccaaaaaactcagcgagaaaaaacgcgacgcgcttgccgaaatgataaaaaatcaggcggttgcgtggcacgtcgccgccgccgggcccgaagaaatcgccagcctcaacatcctgcacgccaccatgctcgcgatgaaacgcgccgttgacggtttggctgtgcgtcccgaaaaaatattcatcgacggcaaccgcattcccgaacatttgaacatccctgccgaagccgtcgtcaaaggcgacagcaaaatcatcgaaatctccgccgcatccgttttggcaaagaccgcacgcgatgcagaaatgtacgcactggcgcaacgccatccccaatacggtttcgacaaacacaaaggttatggcacgaagcagcatctggaagccctcaaacaatacggcgtgctgcccgaacaccgccgcgacttcgcccccgtcagaaacctgctcgcgcagcagacgctgttttaa

SEQ ID NO: 39007 - DNA, 363 bp, Neisseria meningitidis
atggcttcaagcaacgtaaacaaagaaatcaaagacaaaaaactctccctgtgggccaagcgtcaagacggttcggtaaaatggttctgcggacagccggttacgcgcaacgacaccgccaaagacgacaccgtcgccgccgacaccgacaccgccaagaagatcgacaccaagcacctgccgtcaacctgccgcgatgattcatctaccggttgcatagaaacaccacgcgccgacttcaaacacttccaaaaaatcagccgttaccgagtattgcccgaatcacggcacatggccgaaaaacttcgtcattcccgcgcaggcgggaatctaggtctgtcggcacggaaacttatcgggtaa

SEQ ID NO: 39008 - DNA, 939 bp, Neisseria meningitidis
atgctcaaattgaacaaggtctgcaaacgcttcggcggcaaaaccgtcgccgacagcatctgcctgactgtcgggcgcggcaaaatacttgccgttttgggacggtctggctgcggaaaatccaccctgctgaatatgattgcggggattgtccgtccggacggcggagaaatatggctgaacggggaaaacattacccgtatgccgcccgaaaaacgccgtatttcgctgatgtttcaagattacgcgctgtttccccatatgagtgcgctggaaaatgcggcattcggtttgaaaatgcaaaaaatgccgaaagccgaagccgaacgccttgctatggcggcacttgccgaagtcgggctggaaaatgaagcgcaccgtaagcctgaaaaactttccggaggcgagaaacaacggttggcactggcgcgcgctttggttgtccgcccttccctgctgttgctggacgaatcgttttccagtttggacacgcatttgcgcgaccggctgcgccgcatgactgccgaacgtatccgaaacggcggcatccctgccgttttggtgacgcattcgcccgaagaggcctgcacggcggcggacgaaatcgccgtgatgcatggagggaggattctacaatacggcacacccgaaacattggtcaaaacaccgtcctgcgtgcaggtcgcccgactgatggggctgcccaataccaacgatgaccgccatattccgcaacatgcggtgcgtttcgaccaagacggcatggagtgccgcgtattatcccgtacctgtttgcccgaatcgttcagcctgtccgtcctccatccggaacacggcatcctgtggctgaacctcgatatgccgcacgccggtgaaatatcgggaaacgatacggtacgcatccatatcgaagacagggaaatcgtccgcttccgttga

SEQ ID NO: 39009 - DNA, 1563 bp, Neisseria meningitidis
atggcaaaacaatcaaatgccgcgccgaaaaagcgcggtttttttgcgcgtttgttcggcaggcgggaagccgtcccgaaaacagcccgccgcaactttgcaggggcgcgtccggtcgggtcgctggcttcgtggcagccgcaaaactggtcggcggacgctttggcgcggtcagaccttgaccgcctgcgcactcgcgcccgcagccttgcacgcgacaacgactacatgcgcaagtttttgaatatggtcgaaagcaacgttatcgggcgcgacggttttgccctgcaaatgcgtgttttgctggataacgccgacaagcccgatgccttggcgaacaaggccattgaagcagcgttttcccgctgggcgcggcgcggcgtgtgcgacgttaccggccagatgtcttttaccgacctgcaacggctgctgattcgcagcgtggcgcgggacggcgaagtgctgattcgtcatatttcagggtttgacaatgattacggctatgcgttgcaggtgctggatattgaccgtttggatacgggatacaacgttccgcagcaaaacgggcgtaacgccgtgcgcatgggtgttgagttaaacagctattcccgtcctgtagcgtactggttgcggacggcacatccgggcgaatcatacggacagacgaatacgggcaatttacgcgaacgggtgccggcagagcaaatcagccatattttcctgcatgaccgcccagagcagcggcgcggctttccgtgggtggcttcggccatcatcggcctgcaaaacctgtcgggctatcaggaagcggccattatcgctgcccgtgtcggtgcatcgaaaatgggctttttcaaacagacggaagacgccgacaacttcatgccgccgattgacgggcaagaggtcgataacgggcgcggcagcatcgatttaatcgattcggtcgagccgggtacgtttcacgaactgccgcagggttacgactttacgccgtttgatccggattacccgcacgccaattacgacgcattcgtcaaagccagcctgcgcggtatcgccagcggtttgaacgtggcttatcacagcttggcgaacgaccttgagggcgtgaacttttccagtatccgcagcgggacgctggaggaacgcgacacatggatgacgttgcaaaactggtttgccgacgcgttcttgtatgacgtattcgatcgctggattgaggcggcgttgctaatgggcgcaatcaagatgccgtccggcaaatcgctgcctgccggcaagctggacaagttcaaggcctgcaactggcaggggcgccgctggtcgtgggttgacccgctgaaagatattaatgcgcataaagaggcggtggcgctggcagtcaaatcccgccgcgatatttgcgcggaaatgggtttggattttgaagatgttattacccaaatcgaacaggaaaaccagatgttggcaggaaaaggaatcattgccgacgtaaaaccggccgcatcggcggcagaaccggaatcggaggataacccgaatgaagaaaatgaagcctga

SEQ ID NO: 39010 - DNA, 867 bp, Neisseria meningitidis
atggcaggtgaaaccattaccgctgccgactacatcaagcaccacttgcagagcttgaccagtttgtcggatgttactcagggtcagggactgaaaaacattgctgatttttcgtttattaaccttgatgccgtcttttttgccgtcctgttgggcgtaatcggcagcttcctgttgtggcgcggtgcgaaaaaagcaacggcaggcgttcccggacgtttccaggctgccgtggaaatcttgtttgagtttgtggacgatatgtgtaagagcatcattcacaacgaaaagtctagaaaagccgtcgcgccgttgggtctgacgctgtttgtctggatttttctgatgaacgcgatggatatgctgccggtcgatttgctgccgatggtatggcagggcattaccggcaaccatcacgccctgctgcgcgtcgtaccgactgccgatttgaacaccactttggcactcgctgtcggcgtgttgctgatttgtatctattacaacatcaaaatcaaaggattgggtggctggtttcacgagttgttcagcgcgccgttcggtgcaaaactcgcacctgcgaactttctgttgaatttggtcgagtttctttctaaaaccgtatcccacggtatgcggttgttcggcaatatgtatgcaggcgagttggtattcttgttgatagccttgcttggcggtgcttgggcggcttccggcagcgtcgaagtcatggatccgattctgtttgtattccacattattgccggtttggcatgggcgattttccatattttggtgattaccctgcaggcgtttattttcatggcgttggcgttcgtctatatcggacaggcacatgatgcgcactga

SEQ ID NO: 39011 - DNA, 2298 bp, Neisseria meningitidis
atgcaaccgcacgctccacataccgattccaatacgctgatgctcggccgatacgccgaacgcgcctatctcgaatacgccatgagcgtggtcaaaggccgcgcgctgcctgaagtttcagacggccaaaagcccgttcagcggcgcattttgtttgcgatgcgcgatatgggtttgacggcgggggcgaagccggtgaaatcggcacgcgtggtcggtgagattttgggtaaataccatccgcacggcgacagttccgcctatgaggcgatggtgcggatggcgcaggattttaccttgcgctatcccttaatcgacggcatcggcaacttcggttcgcgcgacggcgacggtgcggcggcgatgcgttacaccgaagcgcggctcacgccgattgcggaattgctgttgtccgaaatcaatcagggaacggtggatttcgtgccgaactacgacggcgcgtttgacgagccgctgcacctgcccgcccgcctgcctatggtcttgctcaacggcgcgtcaggcatcgcggtgggcatggcgaccgagattccgtcgcacaatttgaacgaagtgacgcaggcggcgattgcgctgttgaaaaagccgacgctggaaaccgccgacctgatgcaatatattcctgcgcccgattttgccggcggcggtcaaatcatcacgccggcggacgaattgcgccggatttatgaaaccggcaagggcagcgtgcgcgtgcgtgcgcgttatgaaatcgaaaaattggcgcgcggacaatggcgcgtcatcgtaaccgagctaccgccgaacgccaattcctccaaaatccttgccgaaatcgaagagcagaccaacccgaaaccgaaagcgggcaaaaagcagctcaaccaagaccagctcaataccaaaaagctgatgctggatttaatcgaccgcgtgcgcgacgagtccgacggcgaacatcccgtgcgactggtgttcgaaccgaaatccagccgcatcgataccgataccttcatcaacacgctgatggcgcaaacttcgctggaaggcaatgtgtccatgaacttggtgatgatggggctggacaaccgccccgcgcagaaaaacctgaaaacgattttgcaggaatggctggatttccgcaccgtaaccgtaacacgccgtctgaaattccgtttgaaccaagtggaaaaacggctgcacatcctcgaaggccgtctgaaagtctttctgcacatcgacgaagtgattaaagtcatccgcgaatcagatgacccgaaagccgatttgatggcggcgttcgggctgaccgaaatccaggccgaagacattttggaaatccgcctgcgccagttggcgcgtttggaaggtttcaaactcgaaaaagaattgaacgagttgcgcgaggaacaaggccgtctgaatatccttttgagcgacgaaaacgaaaaacgcaagctgattatcaaagaaatacaggcggatatgaaacaatacggcgacgcgcgacgcacgctggtggaagaagccggacgcgccgtgttgacgcagaccactgccgacgaacccatcacgctgattctgtcggaaaaaggctggatacgcagccgcgccggacacaaccttgatttgagccaaaccacgttcaaagaaggtgaccgcctcaaacaaacccttgaaggccgcaccgttttacctgtcgtcatcttggattcatcgggcagaacctacacgctcgatgccgccgaaatccccggcggacgcggcgacggcgtgccggtttcatccttaatcgagctgcaaaacggtgcgaaacccgttgcgatgttgacaggattgccggaacaacattatttattatcaagcagcggcggctacggcttcatcgccaaactgggcgatatggtcgggcgcgtgaaagcgggcaaagtggtgatgaccgcagacagcggcgaaaccgttttgccgccggttgccgtctatgcctcctcgttcatcaaccccgactgcaaaatcattgccgccaccaatcaaaaccgcgccctcgccttccccatcggcgaattgaaaattatggcgaaaggcaaagggctgcaaatcatcggattaaacgccggcgaatcgatgacgcataccgccgtttcttccgagccggaaatcctgattgaaagcgaaggcaggcgcggcgcagcgcacaaagaccgcatccccatctccctgcttgaggcaaaacgcggcaaaaaaggcaaactattacccatatcgggcagcctgaaacagctttcttccccgaaataa

SEQ ID NO: 39012 - DNA, 171 bp, Neisseria meningitidis
atgacgaaaaaggaaaaagatgccgtatatggcattacctatatacggaatcaagagttttacgatattccgattactagggagaaggcgttaaaagccttaaaaaaacatcctgaaatttatcagaagtttcggcatttctttccgtttgtagaactgcccccgctttaa

SEQ ID NO: 39013 - DNA, 963 bp, Neisseria meningitidis
atgcaagcacggctgctgatacctattcttttttcagtttttattttatccgcctgcgggacactgacaggtattccatcgcatggcggaggtaaacgctttgcggtcgaacaagaacttgtggccgcttctgccagagctgccgttaaagacatggatttacaggcattacacggacgaaaagttgcattgtacattgcaactatgggcgaccaaggttcaggcagtttgacagggggtcgctactccattgatgcactgattcgtggcgaatacataaacagccctgccgtccgtaccgattacacctatccacgttacgaaaccaccgctgaaacaacatcaggcggtttgacaggtttaaccacttctttatctacacttaatgcccctgcacgctctcgcacccaatcagacggtagcggaagtaaaagcagtctgggcttaaatattggcgggatgggggattatcgaaatgaaaccttgacgactaacccgcgcgacactgcctttctttcccacttggtacagaccgtatttttcctgcgcggcatagacgttgtttctcctgccaatgccgatacagatgtgtttattaacatcgacgtattcggaacgatacgcaacagaaccgaaatgcacctatacaatgccgaaacactgaaagcccaaacaaaactggaatatttcgcagtagacagaaccaataaaaaattgctcatcaaaccaaaaaccaatgcgtttgaagctgcctataaagaaaattacgcattgtggatggggccgtataaagtaagcaaaggaattaaaccgacggaaggattaatggtcgatttctccgatatccgaccatacggcaatcatacgggtaactccgccccatccgtagaggctgataacagtcatgaggggtatggatacagcgatgaagcagtgcgacaacatagacaagggcaaccttga

SEQ ID NO: 39014 - DNA, 2427 bp, Neisseria meningitidis
atgtcggcacaaaccgatccgggctactttttcatgcccaaccacattatcctgataggcgcgagcgaacgtccgtacagcctgggcgaacgcgtactcagcaacctgctgagtacgccctttcaaggaaaaatcacccccgtaaacccgcgccaccacaccatagccgggcttcccgcctacaccagcctcaacaaaatccccggcaatgcagacctgattattgccgttaccctacccgacagttacgacaccctcttcaaaacctgccgcaaaaagcagctccgacacatcatcctcatacaggactgggacagcctgtctgccgcagaactgcacaccgccgaaactgccatccgcaaacaccacggcaacggactcaacatcaccgcctgcaccaccgcaggcatccaactgccctcactcggacttaacatcagtacccaagacggatacgccgcaggccataccgccatactgaccggcaatgccgccgtcagccgccaaatcgacaacatcctgaacaaactccgtcaaggcacatcccgccacatcagcctgcatcccggcatcagccccatcacatccgccgattggctcaaccgcttcggacacagcctgcacaccaaaaccgccgtcctacaccacaaccctgaagagaatcagcgcaaactgttcagcgcaatccgccaatttacccgccatacgccgctgattctccacatcacctgccgcacgacagaaaccgaccgtgccgtactgcactgcctcgcccgacactgcaacttcctcatcagtttcaacgccgacgacctcgaagccgcactgcgcgcccaactgtccgaccttccacccctgtcccgactcgacatcctgtccgacacgcctgccgaatggctgaacgcgcacgcgccaaaaaccctcgccctccactttcccaaccttccccaccacatccgcaacggacacctgaccggcacacccacaccctcaatctgccacgacatcgcctcacgtcagcttgcccgccccgacacccaagccgtcctgaccatcctcagcccctccggacacgaggattacaaaaaaacagcacgcgcccttatccgcctgtccgaacagagcgccaaacccctgctcgtcagcagccccttttcagacggcataacacatttcgacacccccactcaggcaatccgcaccctttcctaccgcaacaccgccgccgccctgaaacaggcacagctcgacattgcaccgccgcagccatgccgtctgaaaacaccgcaaccccaaaacatcaaaaaagccctcgaagccgccgaccccgccctaatcgccgaagccctgcacctccccccctaccggcacaccacccataacgccgtccaattccaattcggcagccactccctctatggcgacatcctgaccgcacgctgcaacggacaaaccactgccgtactcccgccgtttaccacgctcgacagccgccaccttgcccgctttgccgaactcgacggcacacaaaccctcgaccagttcctgcacacactgaccatcattcccgaataccgccaacacattctcggcatcaccctcaacctaaacggcggacaatacagcagcgatttcatcttaaagacacccgaaacacacgacacgcccaaacgcaagaacacaggcaaagccgcccaaaccctcgaacatgccgccgcaaaaatgcagagtgccgccgcatacctgaaacacaaaaacccgacagccgccgaatttctccgccacacaagcgaagccgccgcagaactgctcggcagcaaaaccgaaaccggagcagccgtacccaacgtacttgccccctatcccgcagcataccccaaaacactgtccctaagaaacaacacgaccgttaccattacccccattttgcccgaagacgcagaagccaaacagcagttcgtccgcagcctcggtcccgaagcacggtacacacgcttcatgacccacaccaacgaactgcccgcagccacgttggcacgcctgtgcaaccccgattaccactgtgaagccgcatggacggcaaaggatgccgacagcaacatcgtcgccgtcgtccgccacagccgcctgaaccgcaacgaatgcgaattcggcatcacactggcggaacatatgcgcggcagcggactggcacagaaaatgatggaactcatcatccaaaccgccgcacagcaaggctaccggactatgagtgccgacattctcaaaaccaatacccccatgatcaaacttgctgaaaaatcaggatttaccctcaaggaatcggacaccgaaaaaaacctgtaccgcgcatatctgaaccttgcggcagacaaaacaacagaaaaaacaaataaaaacttgcgcaccgaccacaaaataacctaa

SEQ ID NO: 39015 - DNA, 1488 bp, Neisseria meningitidis
atgctaaagaaaataaaaaaagctctttttcagcctaaaaagttttttcaagattcaatgtggttgacaacatctccattttatcttacccccccacgtaacaatttatttgtcatatctaatttaggtcagcttaaccaagtccaaagcctaattaaaatacaaaaattaaccaataatttactagtaattttatatacttctaaaaacttaaaaatgcctaagttagttcatcaatcagctaacaagaatctatttgaatctatttatctatttgagcttcctagaagccctaataatataactcctaaaaaattactttatatttatagaagttacaaaaaaatccttaatattatacagcctgctcatctctatatgctgtcttttacaggccactactcctatctgattagtattgcaaaaaaaaagaatattacgactcatttaattgatgaagggactggaacatatgctcctttattagaatcattttcatatcatccaacaaaattagaacgttatttgattggaaataatcttaatattaaaggatatatagatcattttgacatattgcatgtcccctttcctgaatatgctaaaaaaatatttaatgcaaaaaaatataaccggttttttgcgcatgctggaggaataagcattaataataacattgcaaacttacagaaaaaatatcaaatatctaaaaatgactatatttttgttagtcaacgctaccccatttcagatgatttgtattataagagtatagtagaaatcttaaacagcataagtttacaaattaaaggaaagatatttattaaactacacccaaaagagatgggcaacaactatgtaatgtctttatttctaaatatggtagaaataaaccctcggctggtagttattaatgaacctccttttctaattgagcccctaatatacttaacaaatcctaaaggaattataggcctggcctctagttctttaatttatacaccattactctcaccctcaacccaatgtctttctattggagagttaattattaacttaattcaaaaatattcaatggtggaaaacactgaaatgatccaagaacacttagagattattaagaaatttaattttattaatatactaaatgatttaaatggggtaataagtaaccctctctttaaaacagaagaaacatttgaaacacttcttaaatctgcagaattcgcatataaatctaaaaactactttcaggctattttttactggcaacttgccagcaaaaacaatattaccttattagggcataaagcattatggtactacaatgcactttataatgtaaaacaaatttataagatggaatattcagatattttttatatcgataatatctccgtagactttcatagtaaagataaattgacatgggaaaaaattaaacattattactattccgccgacaatagaattggtagagatagataa

SEQ ID NO: 39016 - DNA, 891 bp, Neisseria meningitidis
gtgtctgaaattcatcaaatttattgggaggaatcgggcaatcccgacggtgtgccggttatttttttacatggcgggccgggcgcgggggcttcgcctgaatgtcggggttttttcaatcccgatgtgttccgcatcgtcatcatcgaccagcgcggttgcggacgttcgcgcccgtatgcttgtgcggaagacaatacgacttgggatttggtggcggatattgaaaaagtccgtgaaatgctgggtatcaggaaatggctggtgttcggcggttcgtggggcagcactttgtcgctggcttatgcccaaacccatcctgaacgggtaaagggattggtattgcgcgggatatttttgtgcaggccgtctgaaacggcgtggctgaacgaggcgggcggtgtgagccggatttatccggaacaatggcaaaaatttgtcgcgccgattgctgaaaatcggcggaaccggctgattgaggcgtatcacggattgctgtttcatcaagatgaagaagtgtgcctgtctgccgcaaaggcttgggcggattgggaaagctatctgatccgtttcgagccggaggaagtggatgaagatgcttatgcctcactggcaatcgcgcgtttggaaaaccattattttgtcaacggcggctggttgcagggcgatagggcgattttgaacaatatcggcaaaatacggcatatcccgaccattatcgtgcaggggcggtatgatttgtgtacgccgatgcagagtgcgtgggcgctgtcgaaagcctttcccgaagcggaattgagggtggttcaggcagggcatcgtgcgttcgatccgcctttggtggatgcgttggttcaggcagttgaggatattttgccccatttgttgtaa

SEQ ID NO: 39017 - DNA, 1344 bp, Neisseria meningitidis
atgagccaaaaccatactattttacaaaacctccccgtcggtcagaaagtcggcatcgccttctccggcggacttgatacctccgccgcgctgttgtggatgaaactcaaaggcgcactgccttatgcctacactgccaacctcggtcagcccgatgaagacgactacaacgccattcccaaaaaagcgatggaatacggtgcggaaaacgcccgcttaatcgactgccgcgcgcagttggcacacgaaggcatcgccgccatccaatgcggcgcgttccacgtttccaccggcggcatcgcctatttcaacaccacgcctctgggccgcgccgtaaccggcacgatgcttgtttccgcaatgaaagaagacgacgtaaacatctggggcgacggcagcacctacaaaggcaacgacatcgagcgtttctaccgctacggtttgctcaccaatcccgcgctgaaaatctacaaaccctggctcgaccagcaatttatcgacgaactcggcggccgtcacgaaatgagcgaatttctgattgccaacggcttcaactacaaaatgtcggttgaaaaagcctactccaccgattccaatatgctcggcgcgacccacgaagccaaagacttggaatttttgaactcgggcatcaaaatcgtcaaacccattatgggcgttgccttttgggacgaaaacgttgaagtcagccccgaagaagtcagcgtgcgctttgaagaaggcgtgccggttgcactgaacggcaaagaatacgccgaccccgtcgaactcttcctcgaagccaaccgcatcggcggccgccacggcttgggtatgagcgaccaaatcgaaaaccgcatcatcgaagccaaatcgcgcggcatctacgaagccccgggtatggcgttgttccacatcgcctacgaacgcttggtgaccggcatccacaacgaagacaccatcgaacaataccgcatcaacggcctgcgcctcggccgtttgctctaccaaggccgctggttcgacagccaagccttgatgttgcgcgaaaccgcccaacgctgggtcgccaaagccgttaccggcgaagttaccctcgaactgcggcgcggcaacgactactcgattctgaacaccgaatcgcccaacctgacctaccaacccgaacgcctgagtatggaaaaagtcgaaggtgcggcgtttaccccgctcgaccgcatcggacagctcacgatgcgcaacctcgacatcaccgacacccgcgccaaactgggcatctactcgcaaagcggtttgctgtcgctgggcgaaggctcggtattaccgcagttgggcaataagaaataa

SEQ ID NO: 39018 - DNA, 126 bp, Neisseria meningitidis
atggtgtttggtccgtcgggttcagacggcatttccgaccctatgccgtctgaaggggggcgtgttccgaagaatcgggcgcgcgccgcaggtgttgtcaaaatcggtctgtacgggggtgtatag

SEQ ID NO: 39019 - DNA, 981 bp, Neisseria meningitidis
  misc_feature 958, 959, 960, 961, 962: 'n' is a, c, g or t
atgaaacactttccatccaaagtactgaccacagccatccttgccactttctgtagcggcgcactggcagccacaaacgacgacgatgttaaaaaagctgccactgtggccattgctgctgcctacaacaatggccaagaaatcaacggtttcaaagctggagagaccatctacgacattgatgaagacggcacaattaccaaaaaagacgcaactgcagccgatgttgaagccgacgactttaaaggtctgggtctgaaaaaagtcgtgactaacctgaccaaaaccgtcaatgaaaacaaacaaaacgtcgatgccaaagtaaaagctgcagaatctgaaatagaaaagttaacaaccaagttagcagacactgatgccgctctggatgcaaccaccaacgccttgaataaattgggagaaaatataacgacatttgctgaagagactaagacaaatatcgtaaaaattgatgaaaaattagaagccgtggctgataccgtcgacaagcatgccgaagcattcaacgatatcgccgattcattggatgaaaccaacactaaggcagacgaagccgtcaaaaccgccaatgaagccaaacagacggccgaagaaaccaaacaaaacgtcgatgccaaagtaaaagctgcagaaactgcagcaggcaaagccgaagctgccgctggcacagctaatactgcagccgacaaggccgaagctgtcgctgcaaaagttaccgacatcaaagctgatatcgctacgaacaaagataatattgctaaaaaagcaaacagtgccgacgtgtacaccagagaagagtctgacagcaaatttgtcagaattgatggtctgaacgctactaccgaaaaattggacacacgcttggcttctgccgaaaaatccattaccgaacacggtacgcgcctgaacggtttggatagaacagtgtcagacctgnnnnncacacacttaattaattaa

SEQ ID NO: 39020 - DNA, 1719 bp, Neisseria meningitidis
atgaacctacatcaaaccgtcgaacacgaagccgccgccgcctttgccgccgcaggcatcgccgacagtcccgttgttttgcagccgaccaaaaatgccgaacacggcgatttccaaatcaacggcgtgatgggtgcggcgaaaaaagccaaacaaaacccgcgcgaactggcgcaaaaggtcgccgacgcattggcaggcaacgccgtcatcgaaagcgcggaagtcgccggtcccggttttatcaacctgcgcctgcgccccgaatttctcgcgcaaaacattcagacggccttgaacgacgcacgtttcggcgtggcaaaaaccgacaaaccgcaaaccgtcgttatcgactattcttcgcccaatctggcgaaggaaatgcacgtcggccacctgcgttccagcatcatcggcgacagcatttcgcgcgtgttagaatttatgggcaataccgttatccgtcaaaaccacgtcggcgactggggtacgcagtttggcatgttggtcgcttatttggtcgagcagcaaaaagacaatgccgcgttcgagttggcggatttggagcagttttaccgcgccgccaaagtgcgctttgacgaagaccctgcctttgccgacaccgcacgcgaatacgttgtgaagctgcaaggcggcgatgaaaccgttttggcattgtggaaacagtttgtcgatatttcgctctcgcacgcccaagccgtttacgacacgctgggcttgaagctgcgccctgaagacgtggcaggcgaatcgaaatacaacgacgatttgcaagccgtggtcgatgatttggttcaaaaaggcttggcggtcgaagacgacggcgcgaaagtcgtgttcttggacgagtttaaaaacaaagaaggcgaacccgccgcatttatcgtgcaaaaacaaggcggcggcttcctttatgcttccaccgatttggcgtgtctgcgctaccgtgtcggcacgcttcatgccgaccgcctgctgtacgtcgtcgaccaccgccaagccctgcactttgagcaactctttaccacttcacgcaaagccggctatctgccggaaagcgtcggcgcggcatttgtcggcttcggcacgatgatgggcaaagacggcaaaccgttcaaaacacgcagcggcgacaccgtgaaactggtcgatctgctgaccgaagccgtcgaacgcgccaccgctttggtgaaagaaaaaaatcccgaattgggtgcggacgaagccgctaaaatcggcaaaaccgtcggcatcggctcaatcaaatacgccgatttgagcaaaaaccgcaccagcgattatgtgttcgactgggacgccatgctctcgtttgaaggcaacaccgccccctatctgcaatacgcctacacccgcgtgcaaagcgtgttccgcaaagcaggcgaatgggatgcaaatgcgccaaccgttttgaccgaaccgctggaaaaacagcttgccgccgagctgctgaaatttgaagacgtactgcaaagcgtggcggacacggcgtatccgcactacctcgccgcctacctctatcaaattgcgaccctgttcagccgcttctacgaagcctgtccgatactcaaagccgaaagcgcaagccgcaacagccgcctgcaactggcgaagctgaccggcgacacgctgaaacaaggcttggatttgctgggcatcgatgtgttggacgtaatgtaa

SEQ ID NO: 39021 - DNA, 1233 bp, Neisseria meningitidis
atgggcttgaaacattttctggaaaaaatcgaaccgcacttcctgccgggcggcaaacatgaaaaatggtatgccctctacgaagcggcggcgacgattttctacacatccggtgcggtaacgcgcaaagcggcacacgtccgcgacgcgctcgactccaagcgcatgatgattttggtgtggctggctttgttccccgccatgttttacggcatgtacaacgtcggcgcacaggcattcggtgccttaacgcccgatttgctgcaacaaagcatcgccaacgactggcattacacccttgccgacgctttgggcatcaatatgtcgtctgaagcgggcgtgttgggcaaaatgctgttcggcgcgatttacttcctgccgatttacgcgaccgtatttgccgtcggcggtttctgggaagtcttgttcgccaccgtacgcaaacacgaaatcaacgaaggtttctttgttacctcgattctgtttgccttaatcgttccgcccacgctgccgctgtggcaggcggctttgggtatttctttcggcgttgtggttgcgaaagaagtattcggcggtacgggtaaaaactttatgaaccctgcgctggcaggccgcgccttcctgttcttcgcctaccccgccaacttgagcggcgatgcggtttggacggcggttgacggctattccggcgcaaccgcgctggcgcaatgggcggcacacggtgcagacggcctgaaaaacgccgtaaccggtcaaaccatcacttggatggacgcgtttatcggcaaactgcccggctccatcggcgaagtctccactttggcactcttaatcggcggcgcgtttatcgtgtttgcccgcatcgcttcttggcgcattattgccggcgtgatgatcggtatgattgcgatgtcttcgctgttcaacttcatcggttcggacaccaacgctatgtttgccatgccttggtactggcatttggtcgtcggcggcttcgccatcggtatgctgtttatggcgaccgaccctgtttccgcttcctttaccaatgtcggcaaatggtggtacggcgcgctgatcggcgtgatgtgcgtgttgatccgcgtggtcaatccggcttaccccgaaggtatgatgttggcgattctgtttgccaacctgtttgccccgattttcgactatttcgtcgcacaagcgaacatcaaacgcagaaaggcgcgcagcaatggctaa

SEQ ID NO: 39022 - DNA, 759 bp, Neisseria meningitidis
atgaatccaaaaactccccccgaccatacagaagatgccgtgcgcctctccaaacgcatggcgcaactggggctttgttcgcgccgcgaagccgacggctatatcgaacagggctgggtaacggtcaacggcaaaaccgccgtactcggtcagaaagttttaccggcagaccgtatcgaactaaacaagaaagcccacgaacagcaggcggcacgtattaccatcctgctgaacaaacccgtcggctatgtcagcgcacaagcggaaaaaggctataaatccgccgccgaactgattacccccgaaaaccactgggaagacgacaccagccgcatccgtttcgatccgaaacacaaaatcggtcttgcccccgccggcaggctcgatatcgattcagtaggattgctggtattgacgcaagacggccgtatcgccaagcagcttatcggcgaaaacagcggcagtgaaaaagaatatttagtgcgcgtgcgcggcaaattggacgaaaaaggacttgccttactaaatcacggattgagtttggacggtgagaaactgcgtcccgccaaagtagaatggcaaaacgaagaccaactgcgtttcgtattgaaacaaggtaaaaagcggcaaatccgccgtatgtgcgaactggtcggactgcgcgtcgtcgggctgaaacgcatccgcatgggcaaggtcaaactcggcaggctgccgcccggcaaatggcgttatctcgcccccggcgaatcgttttaa

SEQ ID NO: 39023 - DNA, 612 bp, Neisseria meningitidis
atgattacgacttataaaaccattacttcctcgacgcaggctgagtttaaagataaaggcagccgttttattgcatttacctatccgattcggacattggctgatgtgaaaaaatacctcgatctgttaaaggaagagcatcataaagcacgacactggtgctatgcctatcgtttgggtgtggatggtgtgcaatttcgtgccaacgatgatggagagccatcaggaagtgctggacgaccaattttgggacagattgattcggtgggtattaccgacgttttggttgtggtcgtccgctatttcggtggtactttgttaggtgttccaggtctgatacatgcgtacaaagaggcgacggctcaagcgttggcagttgcagaagtagttgaaaagaatattgaaaaaactgtttggctgaaatgtgaatatccgtttttgaatgaagcgatacgcattgccaaacaatatcaggcggatatattggagcgggatttgcagttggattgccgattgacggtcagtttgtcgttggtaaattatgaggcctgtgttgcggcttggaagaatactcggcagattgaagtaaatacggaaaagccttttgaatga

SEQ ID NO: 39024 - DNA, 189 bp, Neisseria meningitidis; identical to SEQ ID NO: 38827

SEQ ID NO: 39025 - DNA, 840 bp, Neisseria meningitidis
atgctggtcgcttttttaattatgttgcgcgagggtatcgaagccgcgctcattgtcggcatcgttgccggttttctgaaacagtccggacattccaaactgatgcctaaggtctggttcggggtcgtccttgcttctttgatgtgtttggggctggggtacggcatccattcggcaacgggcgagattccccagaagcagcaggagttcgtcgtcggcattatcggtttggttgctgtcgcgatgctgacttatatgattttatggatgaaaaaggcggcgcgttcgatgaagcagcagcttcaggattctgtacaggcggctttgaaccgtggcagcggtcaaggatgggccttggtcggtatggcgtttcttgccgtggcgcgcgaaggtctggagagcgtttttttcctgcttgccgtattcaaacagagcccgacgtggcatatgccggccggtgcggtagcgggggttttggctgccgccgtgattggcgcgttgatttatcagggtgggatgcgcctgaatctggcgaagtttttccgttggacgggggcgtttttgattgccgttgccgccggcctgcttgccggctcgctgcgcgcgctgcatgaggcaggtatttggaacgcgcttcaggacattgtgttcgactcatcaaaatatttgcacgaagacagcccgttgggcgtgctgctcggcggatttttcggctataccgaccatccgacgcagggcgaagccttggtttggctgctgtaccttattcccgtcatgacttggtttttgtgcggcagcaggccgtctgaaactttaacccgtaaagaggagctgaaatga

SEQ ID NO: 39026 - DNA, 660 bp, Neisseria meningitidis
ttgtgtgcgtcctgtttgaatgttaacaaaatcgttataatcgcaacattctaccgcaatcctgaaaggccgtctgaaatgaggaacgaggaaaaacgcgccctgcgccgcgaattgcgcgggcggcgttcgcaaatggggcgggacgtgcgggcggcggcaacggtaaaaatcaaccacctgctcaaacgttatattaaaaaagggcggaaaatcggcgtgtattggccgatgggcaaggaattgcgtttggacggctttgtccgcgcggcgcaaaaacgcggtgcggaactctacctgccttatatcgaaccgcgttcgcggcggatgtggtttacgccgtatcctgaaagtggaatggaacgggagcgcatacggggcagggcgaagttgaacgtgccgcagtttgcagggcgcaaaatccgcgtgcacggtttgtcggtattgctcgtcccgcttgtcggcatagaccgcgaaggctaccgcttggggcaggcaggcggctattacgatgcgacgcttgcagcgatgaaataccgtttgcaggcaaaaaccgtgggcgtgggctttgcctgccaactggtcggcacgctgccgcgcgaggcgcacgacctgccgctggacggttttgtgtcggaggcggggatattgtgtttttag

SEQ ID NO: 39027 - DNA, 2286 bp, Neisseria meningitidis
ttgacactctatgccgtagaagagctcaactacgacaaactagacagtcataagaaacgcaaatttctcggcattacttatgataaggtacatgatacctctacccaacagatgcaaactgccttaccaagccgtgtagtggctgaatcagctaatctgcaatcaggttgggataccaagttacaaggtacgcagtttgaaaccacgctgggcggcgcggtcatccgtgcaggcgtaggcgaccaggcacgggccgatgccaagattatcctcgaagggatcaaaagcagcatccacacagaaaccgtaagcagcagcaaatccgccctctggcaaaaacaggcaggacgcggcagcaacatcgaaaccctgcaactgccaagtttcaccggccccgttgcgcccgtactctctgctcccggcggctacatcgtcgacattccgaaaggcaatctgaaaaccgaaatcgaaaaactcgccaagcagcccgagtatgcctatctgaaacagctccaagtagcgaaaaacatcaactggaatcaggtgcagcttgcttacgacagatgggactacaaacaggagggcttaaccgaagcaggtgcggcgattatcgcactggccgttaccgtggtcacctcaggcgcaggaaccggagccgtattgggattaaacggtgcggccgccgccgcaaccgatgcagcattcgcctctttggccagccaggcttccgtatcgttcatcaacaacaaaggcgatgtcggcaaaaccctgaaagagctgggcagaagcagcacggtgaaaaatctggtggttgccgccgctaccgcaggcgtagccgacaaaatcggcgcttcggcactgaacaatgtcagcgataagcagtggatcaacaacctgaccgtcaacctagccaatgcgggcagtgccgcactgattaataccgctgtcaacggcggcagcctgaaagacaatctggaagcgaatatccttgcggctttggtcaataccgcgcatggagaagcagccagtaaaatcaaacagttggatcagcactacatagtccacaagattgcccatgccatagcgggctgtgcggcagcggcggcgaataagggtaagtgtcaggatggtgcgataggtgcggctgtgggcgagatagtcggggaggctttgacaaacggcaaaaatcctgacactttgacagctaaagaacgcgaacagattttggcatacagcaaactggttgccggtacggtaagcggtgtggtcggcggcgatgtaaatgcggcggcgaatgcggctgaggtagcggtgaaaaataatcagcttagcgacaaagagggtagagaatttgataacgaaatgactgcatgcgccaaacagaataatcctcaactgtgcagaaaaaatactgtaaaaaagtatcaaaatgttgctgataaaagacttgctgcttcgattgcaatatgtacggatatatcccgtagtactgaatgtagaacaatcagaaaacaacatttgatcgatagtagaagccttcattcatcttgggaagcaggtctaattggtaaagatgatgaatggtataaattattcagcaaatcttacacccaagcagatttggctttacagtcttatcatttgaatactgctgctaaatcttggcttcaatcgggcaatacaaagcctttatccgaatggatgtccgaccaaggttatacacttatttcaggagttaatcctagattcattccaataccaagagggtttgtaaaacaaaatacacctattactaatgtcaaatacccggaaggcatcagtttcgatacaaacctaaaaagacatctggcaaatgctgatggttttagtcaaaaacagggcattaaaggagcccataaccgcaccaattttatggcagaactaaattcacgaggaggacgcgtaaaatctgaaacccaaactgatattgaaggcattacccgaattaaatatgagattcctacactagacaggacaggtaaacctgatggtggatttaaggaaatttcaagtataaaaactgtttataatcctaaaaaattttctgatgataaaatacttcaaatggctcaaaatgctgcttcacaaggatattcaaaagcctctaaaattgctcaaaatgaaagaactaaatcaatatcggaaagaaaaaatgtcattcaattctcagaaacctttgacggaatcaaatttagatcatattttgatgtaaatacaggaagaattacaaacattcacccagaataa

SEQ ID NO: 39028 - DNA, 120 bp, Neisseria meningitidis
atgagtgataagccaattttattgagccctgcggcgaaaaaagaggctttggcacgggcggtaaaggaaatccgcgcgaaatatggcgataaggcgattgtgaaaggatgtgtgaaatga

SEQ ID NO: 39029 - DNA, 402 bp, Neisseria meningitidis
atgccgtctgaagccttcagacggcatcgtgcctatcgggagaataaattgcagtctttagtcagcgtattgatttgcgcctacaacgtagaaaaatatttcgcccaatcattagccgccgtcgtgaatcaaacttggcgcaacttggagattttgattgtcgatgacggctcgacggacggtacgcttgccattgctaaggattttcaaaagcgggacagccgtatcaaaatccttgcacacgaccgcctcctgaaccgcaaacagcaaaggcgcgattcccccgccaacacattcaaacaccgcctgatccgcgccttgaccaaaatcagcagggaaagggaaaaacgtcggcaaaggcgcgaacagttaatcggcaagatcattgtgcctttccaataa

SEQ ID NO: 39030 - DNA, 1902 bp, Neisseria meningitidis
atgactacgccaaaaaaaaccgccaaaacttccggcaacgaagcgcgcgaacttgccgacttgagcgaagacatcggtatccgcttcaaatatccgaactcggaacgcgtgtatctgcaaggcagccgcgacgacatccgcgtgcctttgcgtgaaatccgtcaggacgacacctatacggcgcaaggcgcggaagccaacccgccgattcccgtctatgacaccagcggcgtgtacggcgatccagcggcacacatcgacctgaaacaaggcctgccgcacatccgcaccgcatggctgaacgaacgcggcgataccgaaatcctgcccaagctctccagcgaatacggcatcgaacgcgcacacgatccgaaaaccgcccatctgcgcttcaaccaaatcacccgcccgcgccgcgcgaaaagcggtagcaacgtaacccagcttcactacgcgcgccaaggcattatcacgcccgaaatggagtttgtcgccatacgcgaacgtttaaaattagacgaattgtcccaaaaatcggaatacgccaaactcttgaaacaacacgcagggcaaagtttcggcgcgaacatcccaacccgtcccgaccaaatcacgcccgaattcgtgcgccaagaaatcgccgccggacgcgcgattatccccgccaacatcaaccaccccgaactcgaaccgatgattatcggccgcaacttccgcgtcaaaatcaacggcaatttgggcaactccgccgtaacctccagcctgaccgaagaagtcgaaaaaatggtgtggtcgctgcgttggggcgcggacacgattatggatttgtccaccggcgcgcacatccatgaaacgcgcgaatggattatccgcaacgcgcccgtccccatcggcaccgtgccgatttaccaagcgttggaaaaaaccggcggcatcgccgaagatttgacttgggatttgttccgcgacaccctcatcgaacaggcggagcaaggcgtggactatttcaccatacacgcgggcgtgttgctgcgttatgtgccgatgaccgccaaccgcctcaccggcatcgtctcgcgcggcggttcgattatggcgaaatggtgtttggcacatcatcgggaaaatttcctctacacgcatttcgacgaaatctgcgaaattatgaaagcgtatgacgtgtcgttcagcctcggcgacggcctgcgccccggctgcattgccgatgccaacgacgaatcccaattcgccgagctgcacaccttgggcgaattgaccgataaagcgtggaaacatgacgtacaagtcatgatcgaaggccccggccatgtgccgctgcaacgcgtcaaagaaaatatgaccgaagagctgcaacactgttttgaagcgccgttttacacactcggcccgctcgttaccgacatcgctcccggctacgaccacatcacctcgggcataggcgcggccaatatcggctggtacggcacggcgatgctttgttacgttaccccgaaagagcatttggggctgcccgacaaagaagacgtgcgcaccggcatcatcacctataaactcgccgcccacgccgccgatctcgccaaaggctggccgggcgcacaattacgtgacaacgccctgagcaaagcgcgtttcgagttccgctggcgcgaccaattccgcttaagcctcgaccctgaacgtgccgagagcttccacgacgaaaccctgcctgccgaaggcgcgaaaatcgcccacttctgctcaatgtgcggccccaaattctgctcgatgaaaatcacgcaggaagtgcgcgactacgccgacaagcaaaaagcccaacggcagggcatggaggaaaaagcggtcgagttcgtcaaaaaaggcgcgaagatttacagttga

SEQ ID NO: 39031 - DNA, 267 bp, Neisseria meningitidis
atgcaagttttgaagaaagttgattggaagatgtttgtggcacgctctttttggcagtgtgtgccggttggtttgacggcgggcgtgtggtgttttgtggcgggaatggcgttgcattcctgcgcgaaagaacccgaaccggttgcgaaagagccgacgaaggttgaggcgatggaaagacaggcggatttggaggtcaaggtatgggaagggcaatacgagtcaatgagcgtcgaggaaaaaatgaaagggattgtttatgagtga

SEQ ID NO: 39032 - DNA, 1344 bp, Neisseria meningitidis
atgattaaaatcaaaaaaggtctaaacctgcccatcgcgggcagaccggagcaagtcatttatgacggcccggccattaccgaagtcgcgttgcttggcgaagaatatgccggtatgcgcccctcgatgaaagtcaaggaaggcgatgccgtcaaaaaaggccaagtgctgtttgaagacaaaaagaatccgggcgtggtgtttaccgcgccggcttcaggcaaaatcgccgccatccatcgcggcgaaaagcgcgtacttcagtcggtcgtgattgccgttgaaggcaacgacgaaatcgaattcgaccgctacgcgcccgatgccttggcaaaattgagcggcaaagaagtgcgccgcaatctgattcaatccggtttgtggactgcgctgcgtacccgtccgttcagcaaaatccctgccgtcgatgccgagccgttcgccatcttcgtcaatgcgatggacaccaatccgctggcggcagaccctgtggttgtgatcaaagaagccgccgaggatttcagacgaggtttgctggtattgagccgtttgaccgagcgtaaaatccatgtgtgtaaagcagcaggcgcagacgtgccgtctgaaaacgccgccaacatcgaaacacatgaattcggcggcccgcatccggccggtttgagtggcacgcacattcatttcattgagccggtcggtgcaaacaaaaccgtttggaccatcaattatcaagatgtaattgccatcggacgtttgtttgcaacaggccgtctgaacaccgggcgcgtggttgccttgggtggttctcaagtcaacaaaccacgcctcttgcgtaccgttttgggtgcgaaagtatcgcaaattactgcgggcgaattggttgacgcagacaaccgcgtgatttccggttcggtattgaacggcgcgattgcacaaggcgcgcacgattatttgggacgctaccacaatcagatttccgttatcgaagaaggccgcagcaaagagctgctcggctgggttgcgccgcagccggacaaatactccatcacgcgtacaaccctcggccatttcctgaaaaacaaactcttcaagttcaacacagccgtcaacggcggcgaccgcgccatggtgccgattggtacttacgagcgcgtgatgcccttggatatcctgcccaccctgcttttgcgcgatttaatcgtcggcgataccgacagcgcgcaggcattgggttgcttggaattggacgaagaagacctcgctttgtgcagcttcgtctgcccgggcaaatacgaatacggcccgctgttgcgcaaagtgctggaaaccattgagaaggaaggctga

SEQ ID NO: 39033 - DNA, 1020 bp, Neisseria meningitidis; identical to SEQ ID NO: 38150

SEQ ID NO: 39034 - DNA, 600 bp, Neisseria meningitidis
atggcgttaaaaacatcaaacttggaacacgcaatgctggttcatcccgaagctatgagtgtcggcgcgcttgccgacaaaatccgcaaaatcgaaaactggccgcaaaaaggcatcttattccacgacatcacgcccgtcctgcaaagtgcggaatacttccgccttttagttgatttattggtttaccgctatatggatcagaaaatcgacatcgttgccggtttggacgcgcgcggcttcattatcggcgcggcactcgcctaccatctcaacgtcggttttgtccccatccgcaaaaaaggcaagctgccttttgaaaccgtatcgcaaagctacgcgctcgaatacggggaagctgcggtggaaatccacaccgatgccgtcaaacccggttcgcgcgtgctgctggtcgatgatttggttgccacgggcggcacaatgcttgccgggctggaactgatccgcaaactcggcggagaaattgtcgaagccgccgccattttggaatttaccgaccttcaaggcggcaagaatatccgtgcaagcggcgcgcccttatttaccctgcttcaaaacgaaggctgtatgaagggctga

SEQ ID NO: 39035 - DNA, 645 bp, Neisseria meningitidis
gtgcttgcctccgccatcgacttcatcctccatatcgaccaacacctgctcgcgctgtcggcgcaatacggtgtgtggatttatgcgattctgtttttgattgttttttgcgaaaccggcctgattgttacgcccttactgcccggcgattcgctgctgtttgccgccggcgggattgccgcgctgggcggtatggatattcatttgatggttgcattattaagccttgccgccatactcggcgacgcgctcaattttaccgtcggcaaatatttcggcggcaggctgttcgccaaccccgattctaaaatcttccgacgtgaatatctcgataaaacccaccgtttttacgaaaaacacggcggcaaaaccatcatcattgcccgttttatgcccatcgtccgcacctttgcccccttcgtcgccggtatggggaaaatgcactatgccaaatttatccgctacaacatcatcggtggcttgttgtgggttatcctgttttcttacgcgggctatttctttgccaacttccccgtcgtaaaaaacaatctgggcttggtgatgggcggcatcattattgtttccgtcctgccgggtgcggttgaaattgcccgcgccaaacttgcggtaaaatccaaacggtaa

SEQ ID NO: 39036 - DNA, 1977 bp, Neisseria meningitidis
atgcaccccatcgaaacccccgataagaccttccacgacggcgacggcgtgtccgaattgggcaccatcctgcccgcgtggtggctcaaccaagtgcaatccgagctgctggccgtgctgactgcggccggtatccagccggataagtcgcagcctaatcaattactggcagcactgaatagactggctgtagttaccaccggcaaccaagaaatcggcggccaaaaaacctttaccgcccaaacccaattccaaagcggcatccatttatccgccaaccagacgaactggaacggcggccacaaagcctacatcggcgcggatgccgacaacgcccacatcgtcttcggcgacgacaccctgcgcctgcacggcgcaaacaaccgcatttcctacaacaaccacgacatcttccacaaagccaacaaaccgcgttttgccgaagacatcgaaggcaaaccgaacacactgtccggatacggcatcggcaatttcaaagtcgaaacattccggggcgatttgaacaccctcaaaacagacggcatctattccctgtcgacggcggtcggcagctccaacctgcccgttgaaaacaccgcctgccatatccaagtcatcgccggcacgaaacacggctggtgcaggcagttgggttatcccgcctacacgtccgacgtgtacgaacgccaccaaacgagcagcgcaaacgacaactggtccgcatggaaaaaactcaattcggacggcatccccgtcggcgcgatcgtatcctttcccaaagccgtccgaaaccccgcaggctatctcaaagccaacggcacgacctttgcacaaaacaccttccccgacctctaccgcgccttgggcaacagcaaccgcctgcccgatttaagccgtaccgacatcggcatgaccgcgtggtttccgtccgaccaaatcccgaccggctggctggcgtttgacgacatccgcacgcgcgtaaccgaaaccgcttatcccgagctgtaccgtctgctgaccggaaaatacggcagcatccaaaacgtcccgcaggcggaagaccgctttatccgcaacgcgggcaacggcttggcagtcggaacgaagcaggaagacgaaatcaaacggcacgtccacaaagtattttcacactggacaaaccacacagacgcggcagccctcggttacgaagaccacaacgaaaggcagagaagcgcgctcgtatcgacttggacggacggcgatttaaacgacaacggctttttaaccccgcgcccggacagcaaaatggcgacaggcggcgacgaaaaccgccccaaagccctggttttaaaactgtgcatcaaagccgccgacaccttgggcgaagccgtgttttggataaagtcccacggcgaaaccatcaacgccggcgcgctggacgcgggcacgctggcgcaaaacctccaagacaaagcagaccgcgcccacacccacaccgccgcccaaatccaagggctggacgaaaaaatcagcaccgccgttgccgcgcaattcacacgccaaaccatcggcggcgtggatattgtcagattccccgacggcacaatgatacagaccggcagctacaggttcacacgaagcggcggccccatagaaaacgaagtcgtcttccccgtcgcctttgccgacggcaacgtcaaatgcttcgtatccgaacgccattcgggacgcgttaccggcgatcgaaggcaacacaactggctgtttatccgcgcaaaaaaccacgccgccgccattattaccaactggtacgaaggcagttgcgactggatggccatcggcaaagccgcctcgggaaacgccgccagctccccgatagtccccgaaatacctgaaaccaacgaagaaccgcaaagagagagtggaagaacatcaaccggaccccgaaaccgccgccgccgccgagacggcttgctcgaggcactgcaagactag

SEQ ID NO: 39037 - DNA, 552 bp, Neisseria meningitidis; identical to SEQ ID NO: 38599

SEQ ID NO: 39038 - DNA, 1149 bp, Neisseria meningitidis
atgaatactcctccttttgtctgttggattttttgcaaggtcatcgacaatttcggcgacatcggcgtttcgtggcggctcgcccgtgttttgcaccgcgaactcggttggcaggtgcatttgtggacggacgatgtgtccgccttgcgtgcgctttgccctgatttgcccgatgttccctgcgttcatcaggatattcatgtccgcacttggcattccgatgcggcagatattgataccgcgcctgttcccgatgtcgtcatcgaaacttttgcctgcgacctgcccgaaaatgtgctgcacattatccgccgacacaagccgctttggctgaattgggaatatttgagcgcggaggaaagcaatgaaaggctgcacctgatgccttcgccgcaggaaggtgttcaaaaatatttttggtttatgggtttcagcgaaaaaagcggcgggttgatacgcgaacgcgattactgcgaagccgtccgtttcgatagcgaagccctgcgtcagcggctgatgcttcccgaaaaaaacgcccccgaatggctgcttttcggctatcggagcgatgtttgggcaaagtggctggaaatgtggcgacaggcaggcagcccgatgacactgttgctggcggggacgcaaatcatcgacagcctcaaacaaagcggcgttattccgcaagatgccctgcaaaacgacggcgatgtttttcagacggcatccgtccgcctcgtcaaaatccctttcgtgccgcaacaggacttcgacaaactgctgcacctcgccgactgcgccgtgatacgcggcgaagacagtttcgtgcgcgcccagcttgccggcaaacccttcttttggcacatctacccgcaagacgagaatgtccatctcgacaaactccacgccttttgggataaggcacacggtttctacacgcccgaaaccgtgtcggcacaccgccgtctttcggacgacctcaacggcggaggggctttatccgccacgcaacgcctcgaatgttggcaaatcctgcaacaacatcaaaacggctggcggcaaggcgcggaggattggagccgttatcttttcgggcagccttccgcatccgaaaaactcgccgcctttgtttcaaagcatcaaaaaatacgctag

SEQ ID NO: 39039 - DNA, 504 bp, Neisseria meningitidis
atgcacgcgcttcatttttcggcttcggacaaggccgcgctttatcgggaggtgttgccgcagattgagtctgtggtggcggacgagacggattgggtggcgaatttggcgaacacggcggcggttttgaaggaggcgttcggttggttttgggtgggtttttatttggtcgatacgcgttcggacgaattggttttggcaccgtttcaggggcctttggcgtgtacgcggattccgttcggtcgcggggtgtgcggtcaggcttgggcgaagggcgggacggtggtcgtcggggatgtggacgcgcatcccgaccatattgcctgttcgtctttgtcgcgttcggagattgtcgtgccgctgttttcagacggccgctgtatcggcgtgttggacgcggacagcgaacatttggcgcagtttgatgagacagatgctttgtatttgggcgagctggcgaagattttggagaagcggtttgaggcttcgcgtcaggcggtttga

SEQ ID NO: 39040 - DNA, 1017 bp, Neisseria meningitidis
atgtatcggaaactcattgcgctgccgtttgccctgctgcttgccgcttgcggcagggaagaaccgcccaaggcattggaatgcgccaaccccgccgtgttgcaaggcatacgcggcaatattcaggaaacgctcacgcaggaagcgcgttctttcgcgcgcgaagacggcaggcagtttgtcgatgccgacaaaattatcgccgccgcctacggtttggcgttttctttggaacacgcttcggaaacgcaggaaggcgggcgcacgttctgtatcgccgatttgaacattaccgtgccgtctgaaacgcttgccgatgccaaggcaaacagccccctgctgtacggggaaaccgctttgtcggatattgtgcggcagaagacgggcggcaatgtcgagtttaaagacggcgtattgacggcagccgtccgcttcctacccgtcaaagacggtcagacggcatttgtcgacaacacggtcggtatggcggcgcaaacgctgtctgccgcgttgctgccttacggcgtgaagagcatcgtgatgatagacggcaaggcggtgaaaaaagaagacgcggtcaggattttgagcggaaaagcccgtgaagaagaaccgtccaaacccacgcccgaagacattttggagcacaatgccgccggcggcgatgcgggcgtaccccaagccgcagaaggcgcgcccgaaccggaaatcctgcatcctgacgacggcgagcgtgccgataccgttaccgtatcacggggagaagtggaagaggcgcgcgtacaaaaccagcgtgcggaatccgaaattaccaaactttggggaggactcgataccgacgtgcaaaaagagttggtcggcgaacaacgcaagtgggcgcaggaaaaaatcagcaactgccgacaagccgccgcgcaggcagaccggcaggaatacgccgaatacctcaaattgcagtgcgacacgcggatgacgcgcgaacggatacagtatcttcgcggctattccatcgattag

SEQ ID NO: 39041 - DNA, 900 bp, Neisseria meningitidis; identical to SEQ ID NO: 36345

SEQ ID NO: 39042 - DNA, 636 bp, Neisseria meningitidis
atgagtgaaaccgaaaatcaagcattgacatttgccaaacgcttgaaggcggataccacggcggttcacgacagcgtggataacctcgttatgtctgtccaaccgtttgtcagcaaagaaaactacatcaaatttttgaaactccaatccgttttccacaaggccgtcgaccacatctataaagatgccgaattaaacaaagccattcccgagctggaatacatggcgcgatacgatgccgtaacgcaagacttgaaagatttgggcgaagagccttacaaattcgacaaagaattgccatacgaaactggcaacaaagcaatcggctggctttattgcgccgaaggatccaatttgggcgcggcgtttttgttcaaacacgcccaaaaactcgattacaacggcgaacacggcgcgcgccacctcgctccgcatcccgacgggcgcggcaaacactggcgcgccttcgtcgagcatctgaacgcattgggcttaagccccgaagccgaagccgaagccatccaaggcgtgcgcgaagcctttgcattctacaaagtcgtgttgcgcgaaaccttcggcttggcagccgatgccgaagcaccggaaggaatgatgccgaagcaccggaaggaatga

SEQ ID NO: 39043 - DNA, 1131 bp, Neisseria meningitidis
atggccaaacatctgccactcgccgtcctgactgctttgctgcttgcagcgtgcggcggttcggacaaaccgcctgccgaaaaaccggcgccggcggaaaaccgaaacgtattgaaaatttacaactggtcggaatacgtcgatccggaaaccgttgccgattttgaaaagaaaaacggcatcaaggttacttatgatgtgtacgacagcgatgaaacgctggaaagcaaggtgctgaccggaaaatccggttacgacattgtcgcgccgtccaatgcgtttgtgggcaggcagattaaggcaggtgcgtatcagaaaatcgataaatcgctgattcccaattataaacacctcaatcccgaaatgatgaggctgatggacggggtcgatcccggccacgaatacgccgtgccgttttattgggggacaaataccttcgccatcaataccgaacgcgtgaaaaaggctttgggtacggacaagctgccggacaaccagtgggatttggtgttcgaccccgaatacacgtccaaactcaaacaatgcggtatcagttatttagacagcgcggcggaaatctatcctatggtgttgaactatttgggtaaaaacccgaacagcagcaatacggaagacatcagggaggcaaccgccctgctcaagaaaaaccgccccaatatcaaacgctttacttcgtccggctttatcgatgatttggcgcgcggcgatacctgcgtaacaatcggtttcggcggcgatttgaacatcgccaaacgccgtgccgaagaagcgggcggcaaggaaaaaatccgcgtgatgatgcccaaagagggcgtggggatttgggtggattctttcgtgattccgaaagatgcgaaaaacgtcgccaacgcgcacaaatacatcaacgacttcctcgacccggaagtgtcggcgaaaaacggcaatttcgttacttatgcgccttcgagcaagccggcgcgtgagctgatggaagacgaatttaaaaacgacaatacgattttcccaaccgaggaggatttgaaaaacagctttatcatggtgcctatccagccggcggcattgaagtttatggtgcgccagtggcaggatgtgaaggcggggaaataa

SEQ ID NO: 39044 - DNA, 285 bp, Neisseria meningitidis; identical to SEQ ID NO: 37122

SEQ ID NO: 39045 - DNA, 489 bp, Neisseria meningitidis
atgctcaaattaaccctaattgcggcgtgtgcggaaaacctgtgcatcggggcgggcaatgctatgccttggcacatccccgaagatttcgcatttttcaaagcctataccttgggcaaacccgtcattatggggcggaaaacgtgggaatccctgcccgtcaaacccctgcccggacggaggaacatcgtcatcagccggcaggcggattattgcgcggcaggcgcggaaacggcggcaagtttggaggcggcattggcattgtgcgcaggcgcggaagaagccgtcattatgggcggcgcgcagatatacggacaagcgatgccattggcgaccgatttgcggataaccgaagtggatttgtctgtggaaggagatgcatttttccccgcaatagaccggacgcattggaaagaagcagagcggacggaacgccgcgtcagcagcaaaggcacgagctatgcttttgtgcattatttgagatattga

SEQ ID NO: 39046 - DNA, 678 bp, Neisseria meningitidis
ttggtcaaaacggcagacggctacaaagccatcgcacatatccaaactggagagcacgtctttgccaaagatgaaaccagtggaaaaactggatacaaacccgttaccgcccgatacggcaatccctatcaagaaaccgtttacattgaaatttcagacggcatcggcaacagtcaaaccctgatttccaaccgcatccatccgttttattcggacggcaaatggattaaggcggaagatttaaaagcgggaagcaggctgtattccgaaagcggcaaaacccaaacagtccgcaacaccgttgtcaaaccaaaaccgctcaaagcgtacaatctgaccgttgccgattggcatacttactttgtcaagggcaatcgggcggaaacggaaggggtttgggttcataatgagtgtccgccaagaaaaacaccatctacccccatatatgggaatgattcagaagcatatgcagcagcaaaggaattgggatatagaaaaataaaagaaagaacgagaaatgatgctgctatttttaaaaaaggaaagagttatatatcacgcgatgtagattcacataatggaggtgcttggaaagaggcatcttcacccgaaaaactgaacagaaaagaaacaagaaacggtacatttgataaaaacctaaatcgtattggagattaa

SEQ ID NO: 39047 - DNA, 1521 bp, Neisseria meningitidis
atgcagctgatcgactattcacattcatttttctcggttgtgccaccctttttggcactggcacttgccatcattacccgccgcgtactgctgtctttaggcatcggtattctggtcggcgttgcctttttggtcggcggcaaccccgtcgacggtctgacacacctgaaagacatggtcgtcggcttggcttggtcagacggcgattggtcgctgggcaaaccaaaaatcctggttttcctgatacttttgggtatttttacttccctgctgacctactccggcagcaatcaggcgtttgccgactgggcaaaacggcacattaaaaaccggcgcggcgcgaaaatgctgaccgcctgcctcgtgttcgtaacctttatcgacgactatttccacagcctcgccgtcggtgcgattgcccgccccgttaccgacaagtttaaagtttcccgcgccaaactcgcctacatcctcgactccactgccgcgcctatgtgcgtgctgatgcctgtttcaagttggggcgcgtcgattatcgccacgcttgccggattgctcgttacctacaaaatcaccgaatacacgccgatggggacgtttgtcgccatgagcctgatgaactattacgcgctgtttgccctgattatggtgttcgtcgtcgcatggttttccttcgacatcggctcgatggcgcgtttcgaacaagccgcgttgaacgaagcccacgatgaaactgccgtttcagacggcagccggggcagggtttacgcattgattattcccgttttggccttaatcgcctcaacggtttccgccatgatctacaccggcgcgcaggcaagcgaaaccttcagcattttgggggcatttgaaaacacggacgtaaacacttcgctggtattcggcggcacttgcggcgtccttgccgtcgttctctgcacgctcggcacgattaaaaccgccgactatcccaaagccgtttggcagggtgcgaaatctatgttcggcgcaatcgccattttaatcctcgcttggctcatcagtacggttgtcggcgaaatgcacaccggcgattacctctccacactggttgcgggcaacatccatcccggcttcctgcccgtcatcctcttcctgctcgccagcgtgatggcgtttgccacaggcacaagctgggggacgttcggcattatgctgccgattgccgccgccatggcggtcaaagtcgatccctcactgattatcccgtgtatgtccgcagtaatggcgggggcggtatgcggcgaccactgttcgcccatctccgacacgaccatcctgtcgtccacaggcgcgcgctgcaaccacatcgaccacgttacctcgcaactgccttacgccttaaccgttgccgccgccgccgcatcgggctacctcgcattgggtctgacaaaatccgcgctgttgggctttggcacgacaggcattgtattggcggtgctgatttttctgttgaaagataaaaaacgcgccaacgcctga

SEQ ID NO: 39048 - DNA, 486 bp, Neisseria meningitidis
atggacgcgctgcacaccatcgcccgaaacctgacgaaaaaacgtcaaaccgtaagctgtgccgaatcctgcacgggtgggctgcttgccgccgtattcacaagcgttgcaggcagttcgcaatggttcgaccagagttttgtaacatacagcaacaaagccaaagaagaccgcttgggcgtgttgcccgaaaccctgctcgaacacggcgcggtcagccgccaaaccgtctatgagatggcgcgcggcgcgaaagccgtggcgcaggcggattacgccgtcggtatttccggcatcgccggaccgggcggcggcagcgaaagcaaacccgtcggcacggtttggttcgggtttgcctttccgggcggaagttgcgaagcaatgcgccgttttgacggcaaccgcgaatccgtccgcgcgcaggcggtcgccttcgcgttggaacggttggcggggctgattgaaaacggcggcgatgccgtctaa

SEQ ID NO: 39049 - DNA, 609 bp, Neisseria meningitidis
atgaaacccaaaccgcacaccgtccgcaccctgattgccgccattttcagccttgcccttagcggctgcgtcagcgcagtaatcggaagcgccgccgtcggcgcgaaatccgccgtcgaccgccgaaccaccggcgcgcaaaccgacgacaacgttatggcgttgcgtatcgaaaccaccgcccgctcctatctgcgccaaaacaaccaaaccaaaggctacacgccccaaatctccgttgtcggctacaaccgccacctgctgctgctcggacaagtcgccaccgaaggcgagaaacagttcgtcggtcagattgcacgttccgaacaggccgccgaaggcgtatacaactacattaccgtcgcctccctgccgcgcactgccggcgacatcgccggcgacacttggaacacatccaaagtccgcgccacgctgttgggcatcagccccgccacacaggcgcgcgtcaaaatcgttacctacggcaacgtaacctacgttatgggcatcctcacccccgaagaacaggcgcagattacccaaaaagtcagcaccaccgtcggcgtacaaaaagtcatcaccctctaccaaaactacgtccaacgctga

SEQ ID NO: 39050 - DNA, 252 bp, Neisseria meningitidis
  misc_feature 4, 5, 6, 7, 8: 'n' is a, c, g or t
gtgnnnnnagtcggcgcaaaccttgccgccgaagaacaagccggtgtggttgagtctgtaaaagccgcgtccgacgtgtacgcaccgattgcaggtgaagtcgttgccgtcaacgaagatttgccaagcgctccggaaactgccaacagcgatccttacggtgcaggctggttcttcaaactcaaaccggcaaacgttgccgattacgacgttctgctgactgccgaacaatacgcgggcgaagtggattaa

SEQ ID NO: 39051 - DNA, 807 bp, Neisseria meningitidis
atgaatatgaaaaaatggattgccgccgcccttgcctgttccgcgcttgcgctgtctgcctgcggcggtcagggtaaagatgccgccgcgcccgccgcaaatcccgacaaagtgtaccgcgtggcttccaacgccgagtttgccccctttgaatctttagactcgaaaggcaatgtcgaaggtttcgatgtggatttgatgaacgcgatggcgaaggcgggcaattttaaaatcgaattcaaacaccagccgtgggacagccttttccccgccttgaacaacggcgatgcggacgttgtgatgtcgggcgtaaccattaccgacgaccgcaaacagtctatggacttcagcgacccgtattttgaaatcacccaagtcgtcctcgttccgaaaggcaaaaaaatatcttcttccgacgatttgaaaaacatgaacaaagtcggcgtggtaaccggctacacgggcgatttctccgtatccaaactcttgggcaacgacaatccgaaaatcgcgcgctttgaaaacgttcccctgattatcaaagaactggaaaacggcggcttggattccgtggtcagcgacagcgcggtcatcgccaattatgtgaaaaacaatccgaccaaagggatggacttcgttaccctgcccgacttcaccaccgaacactacggcatcgcggtacgcaaaggcgacgaagcaaccgtcaaaatgctgaacgatgcgttggaaaaagtacgcgaaagcggcgaatacgacaagatttacgccaaatattttgcaaaagaagacggacaggccgcaaaataa

SEQ ID NO: 39052 - DNA, 660 bp, Neisseria meningitidis
atggacacttggcacgatgcactcggcggcgaaaaacagcagccgtattttcaggaaattttaaatgcagtcaggcaggaacgtttgtcgggacaaatcatctatccgccggcggcggatgtgttcaacgcattccgcctgacagcgttcgaccgggtcaaagccgtcattctcggacaagatccgtatcacggggcagggcaggcgcacggtttggcattttccgtccggcagggtatccgcataccgccgtctttactcaatatctacaaagaattggaaaccgacatcgaaggcttttccatacccgcgcacggctgcctgacagcgtgggcggagcagggcgtattacttctgaacacggttttgacggtgcgtgcaggacaggcgcattcgcacgcccttttaggctgggaacgctttaccgataccgtcatcaggcagcttgcgacacaccgcaagcaccttgtcttcatgttgtggggtgggtatgcacaacaaaaagggaggctgatagacagtcaaaatcatttgatattgaccgcaccgcatccgtctcctctgtcggcatatcgcggttttttcggctgccgccatttttcacaggcaaacagctatttgagccggcacggtatcgatccgataaactggaagctgtga

SEQ ID NO: 39053 - DNA, 1209 bp, Neisseria meningitidis
ttgttcgcaaagaaagaaaaacgctttatctttgaaggcaggcattccgcctccgacaaactggtcaacggcgaagtatccgcgtttaccgaagaagaggcgcacaaaaaactggcaaaacgcggcatccgcccgttgcagattacccgtgtgaaaacaagctccaagcgcaaaatcacacaagaagacatcaccgttttcacccgccagctgtccacgatgattaaagcgggcctgccgctgatgcaggcatttgaaatcgtggcgcgcggacacggcaacccgtctatgacggaaatgctgatggaaatccgaggcgaagtggaacagggcagctcgttgagccgcgcattctcaaaccacccaaaatatttcgaccgcttctactgcaatctggttgcggcgggcgaaacgggcggcgtattggaaagcctgctggacaaattggcaatttacaaagaaaaaacccaggccatccgcaaaaaggtaaaaaccgcactgacctatccggtatccgtcatcgccgtcgccatcggtttggtattcgtgatgatgattttcgtactgcccgcctttaaagaagtttacgccaatatgggcgcggagcttcccgcactgacccaaacagtgatggatatgtccgactttttcgtctcatacggctggatggtgctgatcgcactgggctttgccatatacggcttccttaaattgaaggcgcgttcgattaaaatccaacggcgtatggatgccatactgctgcgtatgccgattttcggagacattgtccgcaaagggacgattgcccgctggggcaggacgacggcgacgctgattgcggcaggcgtgcctttggtcgatgtattggactccactgccggcgcggcgggcaatttaatctatgaagaagccacccgggaaatccgtacgcgcgtcatccaaggtttgtctatgacttcggggatgcgtgcgacggaactgttccccaatatgatgttgcagatgtcttccatcggcgaggaatcgggttctttggacgatatgctcaacaaagccgccgaattttacgaagacgaggtggacaatgcggtcggcaggctgtccgctatgatggagccgatcattatcgtgattttaggcttggtcatcggcacgcttctggtcgccatgtatctgccgctgtttaatttgggcaacgtggtcgcctga

SEQ ID NO: 39054 - DNA, 1995 bp, Neisseria meningitidis
atgaaacgacattttatgcctgaaattttacaacaaacaaccttacatcgcttttttcgcgcaaacacgcaccatccgatcagcccgtccgttttgcagcaggctggcgatttgataagatggttatgtttttcagacggcatttcagatttccgtccatgccgtctgaagccgcaaaacccgattggaggaactgttatgaataccgtatcgaattacctgtccgcattgcgcgaagccatgaaggcgcaaggcttggatgcactcgtcatcccttccgccgacccccacctgtccgaatacctgcccgagcattggcaggcgcgccgcgaattatcgggctttaccggctcggtcggcacgtttgtcctgaccaccgatgaagcgggcgtatgggtggacagccgctattgggaacaagccgccaagcagcttgcgggcagcggcatcgaactgcaaaaaagcgggcaagtgccgccgtataacgaatggctcgcggcaaacctgcccgaaaacgccgccgtcggcatcccttccgatatggtctcgctcaccggcaaacgcactttggcgcaatccctgaccgccaaaaacatccgcatcgaacacccggacgatctgcttgaccaagtgtggacaagccgtcccgctatccccgccgaaaccgtgttcgtccacgaccccgcctacgtctccgaaaccgccgccgaaaaattcgcccgcgtgcgcgccgtgatggcggaaaaaggcgcggattaccacttggtttcctcgctcgacgacatcgcctggctgaccaacctgcgcggcagcgacgtgcctttcaatcccgttttcgtgtcctatctattgattggcaaagacaacgccgtcctgtttaccgaccgatgccgtctgaatgccgaagccgccgccgcgctgcaaaccgcaggcatcacggtcgagccttacgcccaagttgccgacaaactcgcgcaaatcggcggcgcgttgcttatcgaaccgaacaaaaccgccgtcagcacgcttgtgcgcctgcccgaaagcgtgcgccttatcgagggaatcaacccgtccacgctgttcaaatcctgcaaatccgaagccgacatcgcccgcatccgcgaagcgatggaacacgacggcgcggcgttgtgcggtttcttcgccgagtttgaagacatcatcggcaacggcggcagcctgaccgaaatcgacgtggacaccatgctttatcgccaccgcagcgtgcgcccaggcttcatttcattgagtttcgacaccatcgcaggcttcaacgccaacggcgcactgccgcattacagcgcgacacccgaaagccacagcaccatcagcggcaacgggcttttgctcatcgactccggcgcgcaatacaaaggcggcacgaccgacatcacccgcgtcgtccctgtcggcacacccaccgccgaacaaaaacgcgacaacaccctcgttctcaaagcccatatcgcgcttgccgaagccgtgttccccgaaaacatcccctcgccgctgattgatgcgatttgccgcaaacccctgtggcaggcgcaatgcgactacggccacggcaccggacacggcgtaggctatttcctcaacgtccacgaaggcccgcagcgcatcgccttcgccgcccccgccacgcccgaaaccgccatgaaaaaaggcatggttacctccatcgaacccggactctaccgcccgggaaaatggggcatccgcattgaaaaccttgccgccaaccaagccgtcgccgcccctcaagaaaccgaattcggcagcttcctctgttttgaaaccctgaccctctgccccatcgacacccgcctgatggacaccgccctcatgaccgacggcgaaatcgactgggtcaaccgctaccacgccgaagtccgccgccgcctcgagccgctgaccgaaggcgcggcaaaagcgtggctgatcaaacgcaccgaaccgctggcgcgttaa

SEQ ID NO: 39055 - DNA, 549 bp, Neisseria meningitidis
atgaacctctccaaccactttctcgtcgccatgcccgatatggaagacgcgtttttttcacaatcggtcgtctatatctgcaaacacgatgaagacggcgcactcggcatcgccatcaacaaaccctctccgattacgatggacatgattttttccgccaccggcaaaaacatccccatgcggatgcagcacgacagcgtgatgatgggcgggccggtgcaagtcgagcgaggttatgtcgtgcataccccgatcggcaactggcaaagcagtatcggcgtttcagacaatatcgcgctaacttcttcccgagacgtgattgaaaatatttcacgcgaaggtgcggttgacaaagccttgatcagcataggctattcaagctggggaaaaggccagctcgaacgcgaacttgccgacaatgcgtggctgactgttcccgccgacgaacacatcctgttcgacatcccctacgaacaccgttacgccgccgcattcgccaaactcggcatcgacccgctcgccctgttttcgggagccggccatgcataa

SEQ ID NO: 39056 - DNA, 1110 bp, Neisseria meningitidis
atgagcaactggaaacccgatattccctataacgatttaccacccctgccgccaaaacaggatattgaaagcaaaaccatcctgaaacgttgtatagccgcccgtgcatcccttgcccgtttaaagcaggcggcagaactgataccgaatcaagccatgctgattaacacccttcctgttatggaagcccgtgcaagttcggaaattgaaaacatcgtaaccacaacggataagctgtttcaatccctgcaaatggatacggaacggcaagaccctgccacgaaagaagccctgcaataccgcaccgccctgtttgcaggctatgaatcactgacgagccgccctttatgcacacaaaccgccatcatggtctgcaacgccatcaagcacccctacgaaatggccatccgcaaaacaggcggcacagccctaaaaggaggcaacagcggaaatgttgtctataccccgcccgaaggagaagaaaccatacgcggcaagctggcaaattgggagcggtttattcacgaaagcggcgatttagacccgcttatcatcatggcggcggcacattaccaatttgaagccatccatccgtttacggacggcaacgggcggacggggcgcatattgaacagcctgctattgattgaaaaagggcttttggatttgcctattttgtatttgagccgctacatcatcgaaaacagggcggactattaccgcctgcttttaggcgtaaccgaacggcaggattgggaaagctggataatctacatcttagacggcgtagccgacaccgccgattggacggtatcgaaaatagatgcgatacgccgcctgttcgagcagacacgtcaacacatacggacacacgcacaaggaatctacacgcacgaactggtaaatcttctgtttgagcagccatatacacgcattgccaacctagaagcggcagggatagccaaacggcagacggcctctaagtacctgaaagagcttttagacataggtgtactgcaagaaatcgtcatcggcagggacaaactattcattcatccgcgcctaatggaactattgcggggagagggcaacagctttacttcattctaa

SEQ ID NO: 39057 - DNA, 528 bp, Neisseria meningitidis
atgaaacagaaaatctggtacacctacgatgacatccaccgcgtcatcaaagcattggcagaaaaaatccggaacgccgacatcaaatacgatgccatgattgccatcggcggcggcggctttattccggcacgtatgctgcgctgttttctggaaattccgatttatgccgtaaccaccgcctattacgacagcgacaacgaaggacaggttaccgaagaagtcaaaaaagtccaatggctagaccccgtccccgaagccttacggggtaaaaacgtccttgttgtcgacgaagtggacgacagccgcgtaaccatggaattttgcctgacagagctgctcaaagaagacttcggcaccatcggcgtcgccgtactgcacgaaaaaatcaaagccaaagcaggtaaaatccccgaaggcattccctatttcagcggcatcaccgtagaagactggtggatcaactatccgtgggacgcactcgacatcgacgaacacaaccgccttgccgaggccggccgaggctga

SEQ ID NO: 39058 - DNA, 312 bp, Neisseria meningitidis
atggcaaaactcactttgaagcctgatgcaactttccgacataccgtaaaaatccctgttcccggtgcagaacctgcggacgtcgaatttgaatttaaggcgcgcggccgcaaggcaatgaaagaatttaccgaaaagcataaagacggctggacggcagataccgtcttagattgtgttcaaggctgggatttggaagaagcattcgaccggcagaatgtcgaaatcctgctggatagctatccgatggcggtgtttgccatcgtcaacggctatgttgaggaagtcttcaatgcccgcgagggaaactga

SEQ ID NO: 39059 - DNA, 2397 bp, Neisseria meningitidis
atgattaaaaagattttaacgacttgttttggtttggtttttgggttttgtgtatttggagtgggtttggttgccattgctattttggtaacgtatccgaaactgccgtctttggattctttgcagcattaccagcctaaaatgccgttgactatttattcggcggatggggaagtcatcggtatgtatggggagcagcggcgcgaatttacaaaaatcggcgatttcccagaggtgttgcggaatgcggttatcgccgccgaggataaacgcttttaccggcattggggggtggatgtttggggtgttgcccgcgctgccgtcggcaatgtcgtgtccggcagcgtgcagtcgggtgcgagtacgattacgcagcaggtggcgaaaaatttttatttgagcagtgaaaaaacgttcacacgcaaattcaatgaggtgttgcttgcctataaaatcgagcagtctttaagcaaagacaaaatcctcgagttgtatttcaatcagatttacctcggtcagcgcgcctatggttttgcatctgccgcgcaaatctatttcaataagaatgtccgagatttgactttggcggaagccgccatgcttgcgggactgcccaaggctccgtctgcctataatccgattgttaatccggaacgtgccaagttgcgccagaagtatattttgaacaatatgctcgaggagaagatgattaccgtgcaacagcgcgatcaggcgttgaatgaggaactgcattacgagcggtttgttcagaaaatcgatcagagtgctttatatgtggcggaaatggtgcgtcaggaactgtatgagaaatacggtgaagatgcctatacgcagggttttaaggtttataccacggtccgcgctgatcatcagaaggtggcaaccgaggcattgcgcaaggctctacggaatttcgatcgcggcagcagctaccgcggtgcggaaaactatatcgatttgagtaagagtgaagatgtcgaggagactgtcagccagtatctgtcgggactctataccgtcgataaaatggttcccgccgttgtgttggatgtgactaaaaagaaaaatgtcgtcatacagctgcccggcggcaggcgggttacgcttgacaggcgcgccttgggttttgcggcccgcgcggtcaataatgaaaaaatgggggaggaccgtatccgcaggggcgcggtcatccgtgtcaaaaacaacggcgggcgttgggcggtggttcaagagccgttgctgcagggggctttggtttcgctggatgcaaaaaccggagctgtgcgcgcgctggtcggcggttatgattttcacagcaaaacattcaatcgtgccgttcaggcaatgcggcagccgggttcgacctttaagccgtttgtctattcggcggcattatctaaggggatgaccgcgtccacagtggttaacgatgcgccgatttccctgccggggaaagggccgaacggttcggtttggacacctaaaaattcagacggcagatattccggctacattactttgagacaggctctgacggcttccaagaatatggtttccatccgtattttgatgtctatcggtgtcggttacgcgcaacagtatatccggcgtttcggcttcaggtcgtccgagctgccggcaagcctgtctatggctttaggtacgggcgagacaacgccgttgaaagtggcggaggcatatagcgtatttgcgaacggcggatatagggtttcttcgcacgtaatcgataagatttatgacagagacggcaggttgcgcgcccaaatgcaacctttggaggccgggcaaaatgcgcctcaggcaatcgatccgcgcaatgcctatattatgtataagattatgcaggatgtggtccgtgtcggtacggcaaggggggcagctgcgttgggaagaacggatattgccggtaaaacgggtacgaccaatgacaataaggatgcgtggtttgtcggttttaaccctgatgtggttactgccgtatatatcggcttcgacaaacctaagagtatggggcgtgtcggctacggcggtacgattgcggtgccggtttgggtggactatatgcgttttgcgttgaaaggaaagcagggcaaggggatgaaaatgcctgaaggtgtggtcagcagcaatggcgaatactatatgaaggaacgtatggtaaccgatccgggcttgacgctggacaacagcggtattgcgccgcaaccttcccgacgggcaaaagaagatgacgggggcgcggcagaaggcggacggcaggcggcggatgacgaagtccgccaagatatgcaggaaacgccggtgcttccgagtaatactggttccaaacagcagcagttggattctctgttttaa

SEQ ID NO: 39060 - DNA, 642 bp, Neisseria meningitidis
atgctgaaacccgaaaccatacacatatccggtcctgccggcattttagaaaccatccatatcccgtccgaacaagtaccggcacgcggtgttgccgtcatcaatcatcccaaccccctccagggcggaacaaacaccaacaaagttatccaaactgccgccaaagccttaagcaaactcggcttccactgctacctgcccaaccttcgcggcgtaggcggcagcgaaggcacacacgattacggacgcggcgaaacgcaagactgcctcgccgtcatcgactatgcccgtgcccaacatcccgaagcccccgaatttgccttatccggcttctccttcggcggttatgtcgccacatttgccgcacaagcgcgcatacccgatttattgctgctcatcggcgcggcagtctgccactataccggccgccccgagccgtccgccgttcccaatgttgccaaaacgctgatgatacacggcgcggaagacgaagtcgtcgaaatcgaaaaagccctgaaatgggcggaaccgcaagatttgcccgtcattaccatcgccggttccacgcatttctttcacggcaaactcatcgtcctgcgcgacaccatcctccgcttcgcgcccgtatgcctgaacggataa

SEQ ID NO: 39061 - DNA, 360 bp, Neisseria meningitidis
  misc_feature 4, 5, 6, 7, 8: 'n' is a, c, g or t
gtgnnnnncatcgccgccgcacccgtttacgccgcgcccgtacctgccgccgcgccggccgtaacgcctgccgccgcacccgttgcggcatccgcgcccgccgccgcacctgccgcccgcgatttgtccgacgcgcaaaaatcgcctatggtcggcacgttctaccgcgcacccggcccgaatgccgcgccttttgtcgaagtcggccaacaggttaaagccggcgacacgctgtgcatcatcgaagcgatgaagctgatgaacgaaatcgaagccgaaaaatccggcacggtcaaagaaattttggtcgaaaacggtacgcccgtcgaattcggcgaaccgctcttcatcatcggataa

SEQ ID NO: 39062 - DNA, 312 bp, Neisseria meningitidis
atggatccggcaaataccgatgaggcgttgcacgaagtggcgttggacattcaggaaggtgcggatatggtgatggttaagcccggtttgccgtatttggacgttgtccgccgcgtgaaggacgagttcggtgtgccgacttatgcctatcaggtttcgggcgaatatgcgatgctacaggcggcggttgccaacggatggctggatggcgataaagtggttttggaaagcctgctggcattcaaacgtgcgggtgcggacgggattttgacctattacgctattgaggcggcaaagatgttgaagcgttga

SEQ ID NO: 39063 - DNA, 759 bp, Neisseria meningitidis
atgaaacagaaaaaaaccgctgccgcagttattgctgcaatgttggcaggttttgcggcagccaaagcacccgaaatcgacccggctttggtggatacgctggtggcgcagatcatgcagcaggcagaccggcatgcggagcagtcccaaaaaccggacgggcaggcaatccgaaacgatgccgtccgtcggctgcaaactttggaagttttgaaaaacagggcattgaaggaaggtttggataaggataaggatgtccaaaaccgctttaaaatcgccgaagcgtctttttatgccgaggagtacgtccgttttctggaacgttcggaaacggtttccgaaagcgcactgcgtcaattttatgagcggcaaatccgcatgatcaaattgcagcaggtcagcttcgcaaccgaagaggaggcgcgtcaggcgcagcagctcctgctcaaagggctgtcttttgaagggctgatgaagcgttatccgaacgacgagcaggcttttgacggtttcattatggcgcagcagcttcccgagccgctggcttcgcagtttgcagcgatgaatcggggcgacgttacccgcgatccggtcaaattgggcgaacgctattatctgttcaaactcagcgaggtcgggaaaaaccccgacgcgcagcctttcgagttggtcagaaaccagttggaacaaggtttgagacaggaaaaagcccgcttgaaaatcgatgccattttggaagaaaacggtgtcaaaccgtaa

SEQ ID NO: 39064 - DNA, 1038 bp, Neisseria meningitidis
atgagcgatacccccgctacccccgctacccccgctacccccgctacccgcgatttcggcctgatcgacgggcgtgccgtaaccggctatgtgctgtccaatcggcgtggtacgcgtgtctgcgtgctggacttgggcgggattgtgcaggaattttccgttttggcagacggcgtgcgcgaaaacctcgtggtgtcgttcgacgatgcggcttcctatgcggacaatccgtttcagattaacaagcagatagggcgcgtggccggacgcatccgcggtgcggcgttcgacatcaacggcaggacttaccgcgtggaggccaacgaaggcaggaacgcgctgcacggcggttcgcacgggctggccgttacccgtttcaacgcggtggcggcagacggccgttcggtggtgctgcgcagccgcctgcaacagtcggccgacggttatcccaacgatttggatttggatatttcctaccgcttggacgaggacaaccggcttaccgttagctatcgcgccaccgcgctcggcgacacggtgttcgacccgacgctgcacatttactggcggctggacgcgggcctgcacgatgcggttctgcatattccgcagggcggacatattccggccgatgccgaaaaactgcccgtctcaacggtttcagacgacctcgaagtatttgatttcagccggcccaagccgctggatgccgccgttgccgccctgcgccgcgaaacgggtcgggccggttttgacgacgcttaccgcgtgccgtccgatataggccgtcccgccgctgtgttgcaagccggacgccgccgtcgtatcagcatatacagcgaccgcaacggcttggtcatctttaccgccgccccgcaggatttcgcgcggcacgatgcgggcgtttacgacgcgctggcgaccgaggcgcagacgctgcccgacagcctgaattggcccgagttcggcaatattcgtctgaacaagggtgataccagggaggcgacgattgcttacggcatcgaatccctttcttag

SEQ ID NO: 39065 - DNA, 330 bp, Neisseria meningitidis
atgtcattacccccatgcccacaatgcgcctccgaatacacttatgaagacggcggacaatacatctgccccgaatgcgcccacgaatggaatgaaaccgaatccgccgccgaccttgcggctcaagtgctcgatgccaacggcgcagtgctgcaaaacggcgataccgtcatcctcatcaaagacctcaaggtaaaaggcagctcgatggtgatcaaacaaggcacaaaagtcaaaggcatacgcctgcaagaaggcgatcacaacatcggctgcaaaatcgacggcagcgcgatgaatttaaaatccgaattcgtcaaaaaagcctga

SEQ ID NO: 39066 - DNA, 750 bp, Neisseria meningitidis
atgaaagcactggtcgcagtaaagcgcgtagtggactacaacgtcaaagttcgtgtaaaagccgatggttcggatgtggatatcggcaatgtcaaaatgtcgatgaatccgtttgacgaaatcgctgtggaagaagccgtccgtttgaaagaagccggaaaagtaagcgagatcgtagcggtttctttgggcgaaaagaaatgcgaagaaacgttgcgtacagctttggcgatgggtgccgaccgtgccattcatgttgaaaccgatactaaactggagtctctggccgttgctaagttgctgaaagccgttgcggacaaagaaaatccgcaaattttctttttgggcaaacaagcgattgatgatgatgccaatcaagtggcgcaaatgctggcagctttgctgaatgcggcgcaaggtacgtttgcttcaaaagtacacattgaaggtggtgaagtacagattgtgcgcgaaattgatggcggcgaagaaaccatcgcattgaaactgcctgctgttatcagcgcggatttgcgtttgaacgagccgcgctttgtcaaactccccaatattatggcggcaaagaaaaaacctttggaaaaactgactcctgacgatttggttgccgacatttcacctcgtttgaaaacggtgaaatttgccgaacctaaggcgcgtcaggcaggcgtaaaagtagcaagcgttgccgaattggttgaaaaattgaaaaacgaagccaaagtgatttga

SEQ ID NO: 39067 - DNA, 918 bp, Neisseria meningitidis
  misc_feature 8, 9, 10, 11, 12: 'n' is a, c, g or t
gtgtgtgnnnnntgcaccgtcaccgaaatcgccaaacagcttaaccgccacaaaagcaccatcagccgcgaaatcagacggcaccgcacccaagggcagcaatacagcgccgaaaaagcccagcggcaaagccggactatcaaacagcgtaagcgacaaccctataagctcgattcgcagctgattcagcacatcgacacccttatccgccgcaaactcagtcccgaacaagtatgcgcctacctgtgcaaacaccaccggatcacgctccaccacagcaccatttaccgctaccttcgccaagacaaaagcaacggcagcacgttgtggcaacatctcagaatatgcagcaaaccctaccgcaaacgctacggcagcacatggaccagaggcaaagtccccaaccgtgtcggcatagaaaaccgacccgctatcgtcgaccagaaatcccgtatcggcgattgggaagccgacaccattgtcggcaaaggacagaaaagcgcattattgaccttggtcgaacgcgttacccgctacaccatcatctgcaaattggatagcctcaaagccgaagacactgcccgggcagctgttagggcattaaaggcacataaagacagggtgcacaccattaccatggataacggcaaagagttctaccaacacaccaaaataaccaaagcattgaaagcggagacttatttttgtcgcccttaccattcttgggagaaagggctgaatgagaacaccaacggactcatccggcaatacttccccaaacaaaccgatttccgtaacatcagtgatcgggagatacgcagggttcaagatgagttgaaccaccgaccaagaaaaacacttggctacgaaacgccaagtgttttattcttgaatctgttccaaccactaatacactag

SEQ ID NO: 39068 - DNA, 567 bp, Neisseria meningitidis
atgagtctttacgctttgctcttgattgcgctggggatgtcgatggatgcgtttgccgtcgcgctggcaaagggtgcggcggtcaggatgcctccgcgcaaaattgcagcaacagccttggtgttcggcacggttgaggcactcacgccgctggcaggctgggtaggcggtttttatgccaaaccgtttatcagcgaatgggaccattgggcggctttcgtcctgctgggcgggctgggtctgaaaatgatgcgcgaagggctgtccggcaaggcggaagatgtacgcgaaagcaaacgggaaagcctatggatgacggttttgactgcttttggaaccagcatcgactctatgatagtcggggtgggcttggcgtttatggaggtaaacatcgcctttgccgccgcaatcatcggtatggcgacgacggtgctggtggcggtcgggctgacggtgggaagggctttgggcgtattgttcggcaggcgtgcggaatttgccggaggtttggtgttgattgccatcggtacatggacgctcttgtcgcacttggggctgatcgggtaa

SEQ ID NO: 39069 - DNA, 924 bp, Neisseria meningitidis
atggatattgaaaccttccttgcaggggaacgcgccgccggcggataccgttgcggcttcgtggcgattgtcggtcgtccgaacgtgggcaaatcaacgctgatgaaccatctcatcggtcagaaaatcagcatcaccagcaaaaaggcgcagacgacgcgcaaccgcgtaacggggatttataccgacgataccgcgcagttcgtgtttgtcgatacgcccggctttcaaaccgaccaccgcaacgcgctcaacgacaggctgaatcaaaacgttaccgaggcgcttggcggcgtggatgtggtggttttcgtcgtggaagcgatgcgctttaccgatgccgaccgtgtcgtgttgaaacaactgcccaagcacacgccggtcattttagtggtcaacaaaatcgacaaggacaaggcgaaagaccgttacgcgctggaggcgtttgttgcccaagtgcgcgccgaatttgaatttgcggcggcggaggcggtcagtgcgaaacacggattgcggattgccaacctgttggagctgctcaagccgtatctgcccgaaagcgtgccgatgtatcccgaagatatggttacggacaaatcggcgcgttttttagcgatggaaatcgtgcgtgaaaaattgttccgctatttgggcgaggaattgccttatgcgatgaacgtcgaagtggagcagtttgaagaggaagacggtttgaaccgcatctatatcgccgttttggtcgataaggaaagccaaaaggcgattttaatcggcaaaggcggggagcgtttgaagaaaatttccaccgaagcgcggttggatatggaaaaactgtttgataccaaagtatttttgaaggtctgggtcaaagtcaaatccggttgggcggacgacatccgcttcctgcgcgagctgggtttgtag

SEQ ID NO: 39070 - DNA, 960 bp, Neisseria meningitidis
atgtccaaaaaaaccaaacaagaactggaaaacaacaaactcagcaaacgcctgcgccacgccgtcggcgacgcgattaacgatttcaacatgatcgagccgggtgacaaaatcatggtctgcctctccggcggcaaagacagctacgccctgttagacatcctgcgccggcttcaagccagcgcgccgattgatttcgaactggtcgccgtcaatctcgaccaaaagcagccgggcttccccgaagaagtattgccgacctatctcgaaagcatcggcgttccctacaaaatcgttgaagaagacacctactccaccgtcaaacgcgtattagacgaaggcaaaacgacttgttcgctgtgcagccgcctgcgccgcggcatcctctaccgcactgcaaaagaattgggctgcaccaaaatcgccttgggacaccaccgcgacgacatcctcgccaccttgtttttaaatatgttttacggcggcaaactcaaagccatgccgcccaagctggtgagcgacaacggcgaacacatcgtcatccgtccgctggcgtatgtaaaagaaaaagacttaatcaaatacgccgaattaaaacaattccccatcatcccgtgcaacctctgcggctcgcaacccaacctgcaacgccaagtcatcggcgatatgctgcgcgattgggacaaacgctttcccggccgcatcgaatcgatgttctccgccctgcaaaacgtcgtcccttcccaccttgccgataccgaactcttcgactttgccggattggaacgcggtcaaaccctgaaacacggcggcgatttggcgtttgacagcgaaaaaatgcccgaacgtttttcagacggcagcgaagaagacgaaagcgaaatcaaaatcgcgccgcaaaaagccgaacgcaaagtcatcaacattctggcgaacaagccgaaaacctgcggcgcgtaa

SEQ ID NO: 39071 - DNA, 303 bp, Neisseria meningitidis
ttgtccgccgtttttattgcaccttacctgacggcatttcacgaacaagaaaaaacattcgaatatgcggaattgaccgttaccgcccccaaccgcagcggacgggcaatcaaactggatgcagacgggcagcattaccggctttcctgctatgggttcgacagtttgtgcacaggcggcaatatcggcagaaccatcagggcggagcaggttagagccgttttaagcgaaaccgtcggcaaaggttttttaaacggcgttctgttggaataccgcaacagtggcagtgtctataagcaataa

SEQ ID NO: 39072 - DNA, 1455 bp, Neisseria meningitidis
atgagcatcgaacacactcctccgacacacgacggcgaaaccggtcaaaaccatgccgaacgcccttccgctgatttcgaccgtgtccactccctctgcgaaatcctcgaacctgcctttgaacaaatcgaaaacggcacaccgctcgaagacgcgccgctgcgcgacaagctgaccgagctgaccgtcctcttgggcgagctgcaccctgccgacgtggcggcggtgttggaatcgctgccgccgcgcgaacgcaacgtcgtttggcttctggtcaaacccgaagacgacggcgaagtattgctggaagtatccgacgcggtgcgcgaaacactgatcgagtcgatggataaggacgaattgttggcggcagttgacgatttggacgcggacgaattggcggaactggcagacgatttgccgcaccaagtggtttacgaagccttacagacgcgtgatgaggaagaacgcgcccaagtcaaggcggcaatgtcctacgaagacaaccaagtcggtgcgattatggacttcgagttggtcagcatccgcgccgatgtcgcctgcgaagtggtgctgcgttacctgcgccgcttcgacagcctgcccgaccacacggataaaatcttcgtggttgacgaaaacgatgtgttgcagggcgtgctgcccatccgcaaacttttggtcgccgatcccgaagacttggtggaaaacgtgatggcgaaagatgtcgtgcgtttccgcgccgaagacgacgtggaagaagcagcgcaggcgtttgaacgctatgacttggttaccgcgcccgtcgtcgatgaaaacaaaaagctcatcggcagggtgaccgttgacgaaatggtggacgtgatccgcgaagaatccgaagcagatatgttgaacatggcgggtttgcaagaagaggaagacttattcgcccccgtcttggattccgtcaaaaaccgctggatgtggctcgccgtcaacctctgcaccgccttccttgccagccgcgtcatcggcgcgtttgaaggcagcatcgaaaaaatcgtcgcactcgccgcgctgatgcccatcgtcgccggtatcggcggcaactcgggcaaccagacgattaccatgattgtccgcgccatggcgatggggcaactgacggatatgcaggcggggcgtttgctgaaaaaagaagtcggcgtcgccttggtcaacggcatcatttggggaacggtcatgggcgcagtatcttggctgctttacggcagcctcggcatcggtttggtcatggttgccgcgatgacgctcaacctgctgctggcggcaaccgtcggcgtattaattcccgtggtaatggaaaagttcggacgcgatcccgcgctgggcagctcggtgctgattacggcggtaacggattccggcggcttcctgattttcttgggtctcgccaccctgttcctgctttaa

SEQ ID NO: 39073 - DNA, 387 bp, Neisseria meningitidis
  misc_feature 8, 9, 10, 11, 12: 'n' is a, c, g or t
gtgtgtgnnnnncaatggcacagcctctccgatcccgaactcgaacacagcctcatcacccgcatcgatttcaacctgttttgccgtttcgacgaactgatcatccccgattacagtaccttatgccgctaccgcaactggctggcgcaagacgacaccctgtccgaattactcaaactgattaactgccaactgaccgaaaaaggcttaaaagtagagaaagcatccgccgccgtcgttggcgccaccattattcaaaccgccggcagcaaacagcgccaggccatagaagtcgatgaagaaggacaagtcagcggccaaaccacaccgagtaaggacagcggcttgttcggtttcggtttttttgaggtttcgggcaacttctaa

SEQ ID NO: 39074 - DNA, 732 bp, Neisseria meningitidis
ttgcaagatcgtaccggtcaaaaagtaccttccgtagtattccgcacccgcgtcggcgacacttggaaagatgtgtctaccgatgatttgttcaaaggcaaaaaagtagtcgtattctccctgcccggtgcatttaccccgacttgttcttcttcacacctgccgcgttacaacgaattgttcggcgcgttcaaagaaaacggcgttgacgcaatctactgcgtatctgtaaacgatacgttcgtaatgaacgcttgggctgccgaagaagaatccgacaacatctacatgattcctgatggcaacggcgaatttaccgaaggtatgggtatgctggtcggtaaagaagacttgggcttcggtaaacgctcttggcgttactccatgctggttaacgacggcgtggttgaaaaaatgttcatcgagcctgaagaaccaggcgatccgttcaaagtatccgatgcagatactatgctgaaattcgttgctcctgattggaaagctcaagagtctgtggcaattttcactaaaccaggttgccaattctgcgccaaagccaaacaagctttgcaagacaaaggtttgtcttacgaagaaatcgtattgggcaaagatgcaaccgttacttccgttcgcgccattaccggcaagatgactgcccctcaagtcttcatcggcggcaaatacatcggcggcagcgaagatttggaagcttacttggctaaaaactga

SEQ ID NO: 39075 - DNA, 777 bp, Neisseria meningitidis
atgaaagacgtcgccttcgcgtatggcgaccgcccgattctgaagaacatcaatttcagcattccgcaaggcaattttgctgccgtaatgggcggttcgggcagcggcaaaaccacgctgatgcgactgattacaggacagattcgtccgcagtccgggcaggttttgattgaaggacgggatttggcgggcttttcggctgacgagttgtatgaacaccgccgccgtatgggcgtattgttccaacacggcgcgctgtttactgatttgtcggtattcgacaatatcgcttttccgatgcgcgaactgacgcgcctgccggaagcggtgattcgggatttggttttgttgaaattgaacgcggtcggtctgcgcggtgtggaaaacctgatgccgtccgagttgtccggcgggatgtcgcgccgcgtcgcgcttgcccgcacgattgcgctcgaccctgaaattatgttgtacgacgagccgtttaccggcctcgatccgatttccttgggcgtgattgcccacttgatcagccgcgtcaacaaggctttgcgttcgaccagtattatggtaacgcacgacattgaaaaatctttggaaatcgtcgatcaggtgattttcttggcgcacggcgaaattatgttctccggctcgccgcaggaaatgcgcgaactggattcgccttgggtgcgccagtttgtcggcgggctggcagacggccccgtagcataccgttatccggcgcaaacgtcgttgcagcaggatttgctcgggtaa

SEQ ID NO: 39076 - DNA, 708 bp, Neisseria meningitidis
ttggtcaaaacggcagacggctacaaagccattgcccatattcaagccggcgaccgcgtcttcgccaaagatgaaaccagtggaaaaactggatacaaacctgttaccgcccgatacggcaatccgtatcgggaaaccgtttacattgaaatttcagacggcatcggcaacaaccaaaccctgatttccaataaaatccacccgttttacagtcaaggaaaatggatacaggcaggtcgtctgaaaaaaggcgacaccctgctttccgaaagcggtgcaaaacagacggttcaaaacattaccctcaaacagcagccgctcaaagcctacaacctgaccgttgccgactggcatacttacttcgtcaagggtgataaggcggaaacggaaggggtttgggttcataatgagtgtccgtatggagaaaaatataggacagaagttggttcttatactaatactcatgaaagtggtcgaacttattctggaaagggcacaagacaacgttcccaaatctctggagcaagagaagctagggttaataatgaccctcatatagctacagattttactcctgccaaaaataatcgagaggcattcaaagatgaatctagaagaattgacgctcacggtggttccaaaagtaccaataattacaatcgaattgaaagcccggggaaaaaatatcgaaaacaagatggagattaa

SEQ ID NO: 39077 - DNA, 501 bp, Neisseria meningitidis; identical to SEQ ID NO: 37418

SEQ ID NO: 39078 - DNA, 777 bp, Neisseria meningitidis; identical to SEQ ID NO: 37612

SEQ ID NO: 39079 - DNA, 1161 bp, Neisseria meningitidis
atgaatatggaaaattatttttctaacttaaatttagacatcagaacacataaactcggcacatttaccgatcaaaaagtaaccccggatgtattatgtgccgtagcagaatgtatcatcgaatatattgaaaatattggagaaatatttagcattaacgatattcgttattcagattatgccgaatatatcgccaccgccgtatttaaaaaaccatccattgaaaatgccggtagcgaatacaataaatttttttcacaaccgattaaaatgctgagctattgtggcgtattaagcgaagaaaagttttctagatactatcggtacggcgtacagaataataaaatcctgcaatatattgccaatcgtgaaagaaatgccctaaatttcatccaagcatttagtgaaaaattattaaaagacagtggtatttatccaaaatttgccgatttttttgcccagcctaataaaaatacgtttgaaagtatgaaaacggcgtttaccgatcttgttatccaaaacacacccaaaaataccgaagtagaagttcgccgtatttttaccaaaatcattaatccattggcttataaacataatacttttggcacaagaaaagggagtatttccaatacccccattacattagacgagctttattacaatcgcctaaactggcgagataaaggcaaagaaaaatcgctcactcgcaaagaagctcaagctctatttgccgatagtgcaaatgccgcaaatttgaattatttagttaataaagccaaaaaatttgtcaaaatgctacacaaaaccagcgaagttcaacgttttgatcccacagaagccaatcaggcacatcatatttttatggcaagcgaatttcctgatttagcatcgctgcctgaaaatctgatttgcctgacaccaaaccagcatttcaatttggcacacccaagcaataaaaccaccgttattgacaaacattaccagcgtatttgcctgatggcgaaactggatagtattgagcaagataaccgtgctaatacaggcaattacgattaccatgaatttattcatgtactcaatacaggatttaatacagatcagtttgatgtttctatgagttacgaaacattgaagcatcgtattttaatgttttatttttaa

SEQ ID NO: 39080 - DNA, 2013 bp, Neisseria meningitidis
ttggcgtgtttggtatcggtattggggtttcatggtttttatacggatttgcgccatttaagggcgcgtttttctttgtctcttaaaggcgcaacattggcagatttggtacggtttgctaatagcatgaatttaactgctcgagctgttcggttggatttagatgaattggtaaatttgcgcttaccctgtattttacattgggatttaaatcattttgtggtgttgcatgaagttcatcgtaatcacattgtgattatgaaccctgcttcgggttggcaaaaagtgcgtatggaagaagtctcgcgctgttttacaggcatagcgttggagctattccctaacacgcaatttgaagagaaacacgaaacgcgtaaaattcgcatactaccgatgttgcgcggtgtggttggattaaaaaggtctttatttcagcttctgctgctggcggcagtattacaggtgtttgctttggcaagccctttttttatgcaatgggtaatagaccatgccattgtatcggcagaccgtgatttattgctgacattggcattgggttttggcttgttgatgattgtgcagcagttagtgtcattgttgcaaacttgggcgggtatgtatttgtctacttcattgaatatccaatggaaagccaacgtattccgccgcttaatggatttacctgtttcttatttcactaaacgacacttgggcgatgtggtttcacgttttggctcggtggatagtattcaaagtacgctcacttctactttctttgtgctggtactcaacagcattatggcagtatttacattagggttaatgtatttatacagccctagtttaacggctgttgtattggttgttttactgatttatatcggtattcgttgggtggcatattatccgttacgccatgcaaccgaagaaaatattgttcatgctgccaagcaaagcagttatttcatggaaaccatacgcggtattcaaaccgttaaattatttgataaaaatgcacaacgtcatgcggcttggctgaacttatttgttgatacaatcaacacaggtttaacgacacaaaaactttccgcaatgttcggttttgcgaacagccttttgtttggtatcgctaatattttaattgtgtattttggtgcggtttctgtgttggacggtgtttttaccgttggggcgttaatggcgtttatgtcctacaaaagtcagtttgagagtaaagcaggttcattgattgaccagtttgtacaaatcaaaatgctaggattgcacgcggaacgcttggcggatattgtgctagaaaaaacggaaaacgagcagaacaacgatttcaggctgcctaaaaatttagaacactttgatattaaaatagaaaatatatcatttcgctatgctgaaaatgaaccatacattttgcaagatttcagtttaattatcaaacaaggaacagccattgcttttgctggacattcaggctgtgggaaatctacgctcattcaaattctgacaggcagtctgaaacctgaaagcggtcacgtgttactaggcgagaatgatattcatgcgtttccacctgcatttatccgcaaatggagcgcaagtgtaatgcaagatgatgtgttatttgctggctcaatcgcagaaaacatcagtttttttgatgatacgcccaatatggaaaaaatcgcattttgcgctcaaatggcgaatattcatcatgaaattgtcgctatgcctatggcgtatgaaaccttaattggtgacatgggaagcgcattgagcggtgggcaaaagcagcgtattgttctagctcgtgctttatatcgtgaacccaaaattttgtttttagacgaagccagtagccatttggacatcaacaatgaacgtgtgattaacgataatctacgccaactcaacattaccaaaatcatggtcgcgcatcgtcaggaaactttaaatactgctgatagcgtagtttatttagacaaggtagcctga

SEQ ID NO: 39081 - DNA, 156 bp, Neisseria meningitidis; identical to SEQ ID NO: 38050

SEQ ID NO: 39082 - DNA, 486 bp, Neisseria meningitidis
atgattcaaatcggcatcatcatgggcagcaacagcgattggcccgttatgcggcaggcagcgcagtttcttgaagagttcggcgtagaatatgaggcgtgcgtcgtttccgcacaccgcaccccggatttaatgttccaatacgccgaaaccgcacgggcgcgcggcatcaaagccatcatcgcgggtgcgggcggcgcggcgcatttacccggtatggttgccgccaagaccaccgtccccgttttgggcgtacccgtccccagcaaatacctgcgcggcgaagattcgcttttatcgattgtacaaatgcccaaaggcgtacccgtcgccacattcgccatcggcgaggcaggcgcggcaaatgccgcattgttcgccgtttccatgctcgccaacgaaacccccgaactggcgcaaaaactggcagacttccgagccaaacaggaacaggctgttttgagtatggaattggaacagatttaa

SEQ ID NO: 39083 - DNA, 684 bp, Neisseria meningitidis
atgtttgcccttttggaagccttttttgtcgaatacggctatgcggccgtgtttttcgttttggtcatctgcggtttcggcgtgccgattcccgaggatttgaccttggtaacaggcggcgtgatttcgggtatgggttataccaatccgcatattatgtttgcagtcggtatgctcggcgtattggtcggggacggcatcatgttcgccgccggacgcatctgggggcagaaaatcctcaagttcaaacctattgcgcgcatcatgacgccgaaacgttacgcacaggttcaggaaaaattcgacaaatacggcaactgggttctgtttgtcgcccgcttcctgccgggtttgcggactgccgttttcgttaccgccggcatcagccgcaaagtatcgtatctgcgctttctgattatggacgggcttgccgcgctgatttccgtgcccgtttggatttacttgggcgagtacggcgcgcacaacatcgattggctgatggcgaaaatgcacagcctgcaatccggcatcttcatcgcattgggcgtgctggcggcggcgctggcgtggttctggtggcgcaaacgccgacattatcagctttaccgcgcacaattgagcgaaaaacgcgccaaacgcaaggcggaaaaggcagcgaaaaaagcggcacagaagcagcagtaa

SEQ ID NO: 39084 - DNA, 420 bp, Neisseria meningitidis; identical to SEQ ID NO: 38483
  misc_feature 401, 402, 403, 404, 405: 'n' is a, c, g or t

SEQ ID NO: 39085 - DNA, 375 bp, Neisseria meningitidis; identical to SEQ ID NO: 38588

SEQ ID NO: 39086 - DNA, 324 bp, Neisseria meningitidis; identical to SEQ ID NO: 37971

SEQ ID NO: 39087 - DNA, 579 bp, Neisseria meningitidis
atgaatattttattattagacggcggcaaggcgttcggacattctcacggcgggttaaaccgcacgcttcacaaaaaagcgaaagaagttttgaccgcgctcggacacaatgttcaagaaaccgtgattgatgccggctatgatgttgaggcagaaatcgaaaaattcgtttggatggatgccgtgatttggcagatgccgggctggtggatgcacgagccttggacagtgaaaaaatacatagacgaagtattaaccgctggacacggcaaactctaccaaagcgacggcagacaccgcgtcaatccgactgagggctacggcacaggcggcttgttgcaaggcaaaaaacatatgctttcactgacttggaatgcgccgattgaggcgtttacccgcgaaggcgatttctttgaaggcaaaggcgttgatgttttgtatatgcacttccacaaagccaacgagtttttgggtatgacccgcctgccgacattcttatgtaacgatgtggttaaaaatccgcaagtggaaaaatacttggcagattatcaggcacacttggaaaaagtgttcggctaa

SEQ ID NO: 39088 - DNA, 405 bp, Neisseria meningitidis
  misc_feature 8, 9, 10, 11, 12: 'n' is a, c, g or t
gtgtgtgnnnnnctgcgcgaacacgcccaaagcaacccgttcttccaagccatgctttccaatatggagcaagtgatggcgaaaaccgacatcaccctcgcggaaaactatgccggcttgagcgaatcgctggaaaaagccgccgtcatcttcggcatgattaaggaagaataccaacgcagccgcaaagccctgctcgacctgctgcaaaccgaagaacttttacgcgacaaccgcagcctcgcccgttcgcttgccttgaggattccatatttgaacgcgctcaacggcctgcaggtcgccatgctcaaacgcctgcgtaaagaacccgacaatccgcacgcgctgctgatggttcacctgaccatcaacggcgtggcgcaaggtttgcgcaatacaggctga

SEQ ID NO: 39089 - DNA, 798 bp, Neisseria meningitidis
atgctgaaacaacgggtaatgaccgccatgtggctgctgccgctgatgctgggcatgctgttttacgcgccgcaatggttgtgggctgcattttgcggactgattgccctgattgccttgtgggaatatgcccgtatgggcggtttgtgcaaaattaaaaccaaccattacctcgccgcaaccttggttttcggcgtggttgcctatgcgggcggctggatgctgcctaatttggtttggtatgttgttttggcattttggctcgccgttatgcctttatggttgagattcaaatggaggctcaacggcggttggcaggtttatgccgtcggctggcttctggtcatgccgttttggttcgcgctcgtatccctgcgcccgcatcccgatgatgccctgctgctgctcgccgtgatgggtttggtgtgggttgccgatatttgcgcgtatttcagcggcaaggcgttcggcaaacacaaaatcgcgccggcaatcagccccggaaaaagctgggaaggcgcaatcggcggcgcggtttgcgtggccgtgtacatgaccgccgtacgaagtgccggctggctggcattcgatacaggctggttcgataccgtgttaatcggtttggtgttgaccgttgtcagcgtatgcggcgaccttttggaaagctggctcaagcgcgcggcaggcatcaaagacagcagcaacctgctgcccggacacggcggcgtgttcgaccgtaccgacagcctgattgccgttatcagcgtctatgcggcgatgatgtcggttttaaattga

SEQ ID NO: 39090 - DNA, 180 bp, Neisseria meningitidis
atggccgttcaacaaaacaaaaaatccccttccaaacgcggtatgcaccgttcgcacgacgcgctgaccgcgcctgcactgtctgtcgacagcacaaccggcgaagtacaccgcccgcaccacatctcccccaacggtatgtaccgcggccgcaaagtggtcaaagccaaaggcgaataa

SEQ ID NO: 39091 - DNA, 966 bp, Neisseria meningitidis
atgaaccttaataaactgaaaaacaaactgttccgccgcccggggcagcgtgtggtgattgccgtaccgtatatttggcttttggtgctgtttctgattccgttcgccatcgtgctgaaaatcagctttgccgaacaagaaatcgccattccgccgtttacgccgctgaccagcatcgacgaagatttaggtcgtctgaatatcaccatcagttatcaaaactatgccgatattttccaaaatttttggcatacccttaacccgttcggcgacagtgaaaacagcaatatctatctgatgacctactggtcttcaatcaaaaccgcattgatgacgacagtgatttgcctgttggtcggttatccgaccgcctatgcgatttctcgtgccaatccttctgtccgcaatggtttgctgcttgccattatgctgcccttttggacatcgttcctgttgcgcgtctatgcgtggatgggtctgctcgggcataacggcattgtaaacaacctgttgattaaaatgggtattatcagcgagcctttggatttgttctacaatgccttttcgctcaatttggtgatggtttacgcctatctgccgtttatgattctgccgctatacacgcaactggtgaaactcgacaaccgcctgcttgaagcggcttccgatttgggcgcggggccggtcaaatcgttcttgacgattaccctgcctttgtcgaaaaccggcattattgcaggctccatgctggttttcgtccctgctgtcggcgagttcgtcattcccgagctggtcggcggttcggaaaacctgatgattggtaaagtcttgtggcaggcgttcttcgatcaaaacaactggccgctggcttccgccgtcgccgtcgtgatggtcgcgctgctggtcgtgccgattgccctgtttcagcattatgaaaaccgcgaattggaagaaggagccaaataa

SEQ ID NO: 39092 - DNA, 738 bp, Neisseria meningitidis
atgaagcaggttgatttaaacgccgatctcgccgaaggctgcggcagcgacgaagccttgttgcagctgattacttcggccaacatcgcctgcgcccaacacgccggcagcattgccaatattcgggcggcattggcgtatgcccaacaaaacggcgtgcgcatcggagcacaccccggctatcccgatcgggaaaacttcggccgtaccgaaatgaatctgtccgaagccgatttgcgggcgtgtctgaattaccagttgggcgcattgcaggccttgtgccgtgatcagggtttggaaatggcttatgtcaaaccgcacggcgcaatgtacaatcaagcggcgaaaaaccgtgcgctggcggataccgttgcccgaattgtggcggatttcgacccgaaattgaaattgatggcactttccggcagcctgctcttggaagccggaaaagccgcaggcttgggtgtgatttccgaagtattcgccgaccgccgctatatgcccgatggtacgctggttccccgcagccgccccgatgcgcaggtggacagcgacgaagaagccatcgcccaagtattgcagatggtgcgggacgggcaggtcaaagcagtggacggcagcctggttgccgtgcaagccgacagcatctgtctgcacggagacgggccgcacgccgtggtgtttgccgaaaaaatccggcaggaactactggcggcaggcatcaaagtttctgcttga

SEQ ID NO: 39093 - DNA, 255 bp, Neisseria meningitidis
  misc_feature 236, 237, 238, 239, 240: 'n' is a, c, g or t
gtggttgtcttcggcattctgaaacgcaacggacgggtctataccgttgtcgtaaacaatgccaagtctgaaacgttactccctgtcatcaaaaagaaaatcatgccggacagtattgtttataccgatagtctgagcagctgcgacaagttggacgtgagcggttttatccattaccgcatcaaccattccaaggagtgtgcagaccgtcagaaccacattaacggcattgagannnnncacacacttaattaa

SEQ ID NO: 39094 - DNA, 3615 bp, Neisseria meningitidis
atgtctgcacccatccaagcatttgacccgctgaccgtccccatttccggcaccaacctgattgaggcctctgccggcaccggcaaaacctacggcattgccgccctgtttacgcgcctgatcgtattggaacaaaaaaacgtcgaacgcgtattggtcgtaaccttcaccaaagccgccaccgccgagttgaaaacacgcctgcgcgcacgtttggacgatgtgttgcaggttttagaaagtaaagaaattgccaaacttggagacgacacgctttcagacggcatcgccgcctattgtgcggaacaccacaaaggcgacaccttcctgcccgcactcttaaaacaggctttgcaaaaagagggccggacgcgtctgattgtccgcctcaaggccgccatcgggcaattcgacaacgccgccatctataccatccacggcttctgccaacgtatcctgcgcgactacgccttcttgtgccaagcaccgttcgatgtcgaactgaccgaagaagacggcgaccgcctgcttatcccggcgcaagatttttggcgggaacgcgtcagcaatgatccggtgcttgccgcattggcgtttaaacgcaaagctgtgccgcaaaccgtccttgcccaaatccgcgcctacctgtcccgcccgtacctgaatttccgccgtccgcaggcggatttgaaacaggcgcagcgcaacgccgaaacctcatggcaaaccgtctgccgcctgctgcccgagctggaagccggcttttggcgcatccatcccgacctcaacggcaacagttaccgcaaaaacagcttcggcaacctttttaaagaactggcacaaaaatccgccgccggacaactgccctttctggacaaagacacgcacgacagactcttgaaacttgcgtccgacaaactcgaagccggactgaaaaaaggcaaaacgcccgatgcggcagtatttgccgaattgcagaaactggcagacttcgggtacgatttgaacgcactcgaagaagcggaagaagcaacaataatccggctgcaactggatttaatcggatacctcaaccgcagccttgccgagatgaaaaaatcgcgccgcgaacgcggtttcgacgacctgctgctcgatgtccacaccgcgctgaccgacaatccgcacgccgaaaccctcgcccgcgccgttgccgaaaactgggaaaccgcgctaatcgacgagttccaagacaccgacccgctgcaatacgaaattttccaaaaaatcttcatcgcccaaaaccgcccgctgtttctggtcggcgatcccaaacaggcgatttacagctttcgcggtgcggacatttacgcctaccttcaggcggcggaagatgcgcggcaccgctacacgctcgccaccaactaccgcagccacgccgcgcttatcggcagcataggcgcgctgttccgcctcaaagaacgcccgttcgttttggaaaacatcggctattcggaagtcggtgcggcgcgtgccgaaagcaggttgtcccccgaacgtcctgccgtacaggttcgttggctgcacgaaaacgacaatgaaaaagccaacaaagacgttttgcgccgccgtgccgccgactattgcgccgacgaaatcgcccacgcgctcaacgaagccgccggaggccgtctgaatttcaaaggctgcccgttgcagtcgggcgatattgccgtgctggtacgcacgcacaacgaggcggtgatggtttccgccgccctgaaaaaacgacaggtgcaaagcgtcctgctttcacgcgaatccgtgttcgcctcgcccgaagccgccgccctgtccgcactcatcggcttctggctcgaaccgcgccgcgccggaacgctgcgctttgtcctgacaagcggcatattcggttatgacgcgcagcaattgcacgacttcaaccaaaacgaaagcgagattttgcattgggcggaatctgcccgaaccgcgctcgacaactggaatcaatacggcattttcgccgccatgcagcaattttcccaaacacacggcatcgaaacgcgcctcttaagccggaacaacgggcgcagcctgaccaattatttccaactgctcgaactgcttgccgccgaagacgcccaaaaccgcaaccccgccgctttgcacaagtggctgggcgaccaaatcagccttgccgaaaacaacagcaacgacaaccgcgccatccgtctggaaagcgacgaagatttggtcaaaatcgttaccatgcacgcctcgaaaggtttgcagtatccgctggtgtactgcccgtttgcgtgggacgcgcaagataccgggccgtccgactggcaaatcctccaccaaagcgccaaccgaaccgaactgttggcaaaggcgcaactgtcggaagacgaacagaagcaatacgccgacgaagaaatggcggaacgcctgcgcctgctttatgtcgcgctgacgcgtgccgaggaacagctcaacatctacgccgcctattcttccgataccgccgacaaccccctcgcctacctgattgaaggcttgccgcaagacagccgtgaaaccgtccgccgtgcctatgcgtgtgaaaaagacggcataacgatgctcaaacgcaactggcagcgcgtgacggacaacgccccggccgacacggatttcgccttcacagaagatgcgccgccccctgccgcctatcgcggcaacgccggtcaaaccgccgaatttgccgcaaacagcattcccgaacgcagattccgatttgtccgccacaccagctttaccgctttaagccgccatacccaaacgcccgacggcggcgaagaagatgcctgcccgtccttggatgccgccgaaacctcagtagcggcgatgccgtctgaaacgccgacggcttcagacggcatatcgatacacgattttccgaaaggcacgcaggcggggctgtgcctgcacgaaattcttgaagatttcaaattcggacaagcagccgccggacaggaaaccctcattgccgacaagctgaagaaatacgggtttgaagaaatgtggctgcccgccgttgccgaaatggcggaagcctgccgtaaaacgccgctgacgggggcatactgcctgtccgacattccgcccgagtgccgctgtcccgaaatgggctttaccctccataccgaagacttcggcctcaaacggctgcgcgactggtttgcccgcgacgacatcaggctgcccgaagtctgccgtgccgccgccgaaacgctcgacttccacaccgtcaacggctttttaaacggctttatcgatatggtctgccaagaccccgacggcaatatctgcatcatcgactacaaatcaaaccatctcggcgcggacgcatccgcctacacgcaacaggcgatggacgaagccgtcacgcaccaccactattaccttcaggcgctgatttacgccgttgccgccgcacgctacttcaaactgcgcggacaaccgcccgccgccgtttccgtccgctacctgtttttgcgcggcacagacggcaaaggcggcggcgtttggcgttgggacatagatgccgccgctttggaacagataaaataa

SEQ ID NO: 39095 - DNA, 882 bp, Neisseria meningitidis
atgccgtctgaaaacaccctcttttccctacccgacaccctgttgcgccccatggtggaacaagccttgagcgaagatttgggcaggcgcggcgacattacgtccgccgccgtcatcgcgcccgataaaaccgccaaacttttcctcgtcagccgcgaagacggtgttatcgccggcatggacttggcgcgcctcgcctttcagacgatggatccgtccgtccgcttccaagccgaaatccgagacgggcaagtcgtccgcgcaggtcagacgcttgccgccgtcgaaggcaacgcccgcgcgctgctcgccgccgaacgcaccgcgctcaactacctcacgcacttgagcggcatctccaccgccaccgcgcgtgccgttgccgaagtcgccaaatacggtacagacatcgtgtgcagccgcaaaaccatccccctgctgcgcgtcctgcaaaaatacgccgtcagggcgggcggcggcgtgaaccaccgcatgggtttggacgatgccgtactcatcaaagacaaccacctcgcctattgcgacagcatcgcccaagccgttcggcaggcaaaacaggcggtcggaccgttgacctgcgtagaaatcgaagtggacacgttggcacaactggacgaagccatcgcagcgggcgcggaacggattttgctggacaacatggacgacgaaaccctgaaagaagcggcaaaccgctgccacacgcaaaccgcccacccccacaccgtctattgcgaagcatcgggcggcatcggcttcgaccgcctgaagcgcgtggcgcaaaccggcgtggacggcatcgccctcggctatctgacccacagcagccgctcgttggacataggtttggatttcttggcatga

SEQ ID NO: 39096 - DNA, 726 bp, Neisseria meningitidis
atgccccgattctacctgcccgaaaacctttccgtcggacaaaccgtcgccctgcccgacaacatcgtccgccacctcaacgtcctacgcgtccgccccaacgaaaacatcaccctcttcgacggcaaaggcaaggcacacgccgcacagctgaccgttttggaaaaacgccgcgccgaagccgaaatcctgcacgaagacacaaccgacaacgagtccccgctcaacatcacactgatacaatccatctcctccggcgatcgcatggatttcaccctgcaaaaaagcgtcgaactcggcgtaaccgccatacagcccgtcatcagcgaacgctgcatcgtccgcctcgacggagaacgcgccgccaaacgcctcgcacgctggcaggaaatcgtcatctccgcgtgcgaacaaagcggcaggaacaccgttccccccgtactgcccatcatcggctaccgtgaagcactcgacaaaatgccgtctgaaagcaccaagctgattatgagcatcaaccgcgcccgcaaacttgccgacatacgccaaccgtccggcgcaatcgtctttatggtcgggccagaaggcggctggacagaacaggaagaacaacaggcatttgaagctggctttcaggcggttacactcggcaaacggattttacgcacagaaaccgccccactcgccgccctcgccgccatgcagacgctttggggcgatttcgcataa

SEQ ID NO: 39097 - DNA, 441 bp, Neisseria meningitidis
ttggacaaacaaatcgacaaccacacccacacgcattttgacggcaaagaccaagtggcggagcaaatcaaaggcatcggttcgataacgacggctacgctgatggcgatgttgcccgaattggggcggctgtcgcacaaacggatagcgggtttggccggcattgccccgcacccgagggagggcggggaaaccaaattcaaaagccgctgctttggcggaaggtctgcggtgcgtaaagcactgtatatggctaccgtggcagcgacacgttttgaaccgcttattcgggatttctaccaacgcctgccgtccgagggtaagccgtataaggttgccgttacggcatgtatgcgcaaactgctgacgatatcgaatgcccggatgcgtgattattttgccgaaaacgataccgccgaaaacggtatccggacggcttga

SEQ ID NO: 39098 - DNA, 834 bp, Neisseria meningitidis
atgccgcaagccctcgtcctccaatttccctccgccgaagccctgccttccgacttcccctcccgcctgcccgaacctgattgcgccgatgaaaagcgtatgcgttttatcgttgaagaagggttttctttaagcggggcggacgcggcgttgcttggcagccgtcaaatcgaccacgccgtgttgccggatatggatttcggcgaactcggtttgattgtcagcgatatggattcgacgctgattaccatcgaatgcgtcgatgaaattgcggcaggcgtgggtttaaaagacaaggtagcggaaattaccgagcgttcgatgcgcggagagttggatttcgagcagtcgttgcgcagccgcgttgcgctgttggcgggattggacgaacagattttggcggacgtttatgaaaacgttttgaagctctcgcccggtgcggaatttttgttggacgaatgcaaaaggcacgatgtgaaattcctgctggtgtccggcggcttcacgttttttaccgaacgtctgcaacaacgcctcggcttcgaataccaacacgccaatgttttggaaattgaaaacggcaggttgaccggccgtctgaaaggcagaatcatcgacgcgcaggcaaaggcggatttattgcgcgaataccgcagccgcctcggattgcagccacatcaggtgttggcgatgggcgacggtgcgaacgatattccgatgctcaaagaagcgggcataggcgtggcttaccgtgccaaaccgaaagcgcaggcagccgccgatgcctgtatcaatttcggcggtttggagcgtgtacgcggcctgttcggatag

SEQ ID NO: 39099 - DNA, 1248 bp, Neisseria meningitidis
atgcaacttaccgctgtcggactcaatcatcaaaccgcacctttaagcatacgggaaaagctggcgtttgccgcggcctgcctgcccgaagccgtccgcaatcttgcccgaagcaatgcggcaacggaggcggtaatcctttctacctgcaaccgtaccgagctttactgtgtaggtgattcggaagaaatcatccgttggctcgcagactatcacagccttcccatagaagaaatcagcccctacctttatactttggggatgcaggagactgtgcgccatgctttccgcgtcgcctgcggcttggattcgatggtgttgggcgagccgcagattttaggacagattaaggatgcggtcagggttgctcaagagcaggaaagtatgggtaagaaactcaatgccctgttccaaaaaaccttttctgttgctaaagaggtccgtaccgatactgccgtcggcgaaaactcggtttccatggcttccgcttccgtcaagttggcagagcagattttccccgacatcggcgatttgaatgtcttgtttatcggtgcgggtgagatgattgagctggttgccacttattttgccgccaaaagtccccggctgatgacggttgccaaccggacgctggcgcgtgcacaggagttgtgcgacaagctcggtgtcaacgccgaaccgtgcctgctgtccgatctgcctgccattttgcatgagtacgacgtggtggtttcttcaacggcaagccagttgcccattgtcggcaaaggtatggtggagcgcgcattgaaacaaaggcagagtatgccgttgtttatgcttgacttggccgtgccgcgagacattgaggcggaagtcggagatttgaacgatgcctatctttatacggtggacgatatggtcaatatcgtccaaagcggcaaggaggcaaggcagaaggccgccgccgccgccgaaacgctggtgtccgagaaggttgccgaatttgtcaggcagcagcagggcaggcagagtgtcccgttaatcagggcattgagggatgagggagagaaagcgcgcaaacaggtcttggaaaatgcgatgaaacagcttgccaaaggcgcaacggcagaagaggttttggaaaggctgtcgatccaactgaccaacaagctgctgcattcgccgacccaaaccttgaataaggcgggggaagaagataaagatttggttcacgccgtcgcgcagatttatcatttggacaaataa

SEQ ID NO: 39100 - DNA, 372 bp, Neisseria meningitidis
atggctattactaaagaagacattttggaagcagttggttctttgaccgtaatggaattgaacgacttggttaaagcttttgaagaaaaattcggtgtttctgctgctgctgttgcagttgcaggtcctgctggtgccggtgctgccgatgctgaagaaaaaaccgaatttgatgtcgttttggcttctgccggcgatcaaaaagtcggcgtgattaaagttgtccgtgcaattaccggtttgggtctgaaagaagctaaagacatcgttgacggtgcacctaaaaccattaaagagggtgtttctaaagctgaagccgaagacatccaaaaacaactggaagaagccggcgctaaagtcgaaatcaaataa

SEQ ID NO: 39101 - DNA, 774 bp, Neisseria meningitidis
atgaaaccgaaaatccaaaggcacggagagattttaagccttgtccgccggcatcagtttatgtcggtggacgagcttgccgccgcattggacgttaccccgcagacgatacgccgcgacatccgcgaattggaggatgctggcagcctgaaacgccaccacggcggcgcatcctcgggcggaaacttgccggaggggctgcctgccagccgccaaattcaatgtcaaaacgaaaaaaacgccattgcccggctgattgcggaacatattcccgacgagtcatcgctgtttgtcagtatcggcacgacgatggaagccgtggcatcggagctggtgagacggcgcggcagcctgcggattattaccaacaatatccacgtcgcctccatcgtttcggcgcggacggattacacggtcatcatcacttccggagtcgtccgccctttggacggcggcattaccggcgtggcaaccgtcgattttatcaaccagttcaaagtcgattatgccgtgatgagtacgcacggcgtggaaagcgacggttcgcttttggacgacgactacaaagaagtcagcgtgatgcaggcgatgattgccaacgcgcgcgtccgcttcctcggcgtggaccacagtaaattccgcagcaacgcgctggtcaggctcggcgacattacggcgtttgacaaagtatttaccgaccggctgcccgataccgcgatgcagaagatgctgaaagaggcggaggtggaatgcctgattgccgatgccgtctga

SEQ ID NO: 39102 - DNA, 870 bp, Neisseria meningitidis
atgaagcgcatctttttgcccgccttgcccgccatcctgcctttatccacttatgccgacctgcccttgacgattgaagacataatgaccgacaagggaaaatggaaactggaaacttcccttacctacctgaacagcgaaaacaaccgcgccgaacttgccgcaccggtttacattcaaaccggcgcaacctcgtttatccccattccgaccgaaatccaagaaaacggcagcaataccgatatgctcgtcggcacgctcggtttgcgctacggactgaccgggaataccgacatttacggcagcggcagctatctgtggcacgaagaacgcaaactcgacggcaacagcaaaacccgcaacaaacggatgtccgacgtatccctcggcatcagccacactttccttaaagacgacaaaaaccccgccctaatcagctttcttgaaagcacggtttacgaaaaatcgcgcaacaaagcctcgtcgggaaaatcctggctcatcggcgccaccacctacaaagccatagatccgattgtcctttccctcaccgccgcctaccgcatcaacggcagcaaaaccctttcagacggcatccgctacaaatcgggcaactacctgctgctcaaccccaacatctcatttgccgccaacgacagaatcagcctgaccggaggcatccaatggctgggcaaacagcccgaccgcatagacggcaaaaaagaatccgcaagaaacacatccacctacgcccatttcggcgcaggtttcggtttcaccaaaaccacggctttaaacgcatccgcacgtttcaacgtttcagggcaaagcagttccgaactgaaattgggcgtacagcatacattttaa

SEQ ID NO: 39103 - DNA, 1068 bp, Neisseria meningitidis
atgggcggtaaaacctttatgctgatggcgggcggaacgggcggacatattttccccgcgctggcggtggcggattcattgcgcgcgcgcggccatcatgtgatttggctgggcagcaaggattcgatggaagagcgtatcgtgccgcaatacggcatacgcttggaaacgctggcgattaaaggcgtgcgcggcaacggcatcaaacgcaagctgatgctgccgtttactttgtatcaaaccgtccgcgaagcgcagcggattatccgcaaacaccgtgtcgagtgcgtcatcggcttcggcggcttcgttaccttccccggcggtttggcggcgaagctattaggcgtgccgattgtgattcacgagcaaaacgccgtggcaggtttgtccaaccgccacctgtcgcgctgggcgaagcgggtgttgtacgcttttccgaaagcgttcagccacgaaggcggcttggtcggcaaccccgtccgcgccgatattagcaacctgcccgtgcctgccgaacgcttccaagggcgtgaaggccgtctgaaaattttggtggtcggcggcagtttgggcgcggacgttttgaacaaaaccgtaccgcaggcattggctttgctgcccgacaatgcgcgtccgcagatgtaccaccaatcgggacggggcaagctgggcagcttgcaggcggattacgacgcgctgggcgtgcaagcggaatgcgtggaatttattaccgatatggtgtccgcctaccgcgatgccgatttggtgatttgccgtgccggcgcgctgacgattgccgagttgacggcggcgggattgggtgcgttgttagtgccgtatcctcacgccgttgatgaccatcaaaccgccaacgcgcgttttatggtgcaggcggaggcgggattgctgttgccgcaaacccagttgacggcggaaaaactcgccgaaatcctcggcagcctgaaccgcgaaaaatgtctcaaatgggcggaaaacgcccgtactttggcattgccgcacagcgcggacgacgttgccgaagccgcgattgcgtgtgcggcgtaa

SEQ ID NO: 39104 - DNA, 465 bp, Neisseria meningitidis; identical to SEQ ID NO: 38444

SEQ ID NO: 39105 - DNA, 1296 bp, Neisseria meningitidis
atggcacaaaaaatccaatccgtcaaaggcatgaacgaccttctgcctgtcgagcaaaaagatttcaaactgacggctgcgttttggcaggcgtttgaagatacggtcggccgctggacacgcgcttacggttatcagcaaatccgtacgccgattgtcgagcaaaccggtttgtttgtccgctccatcggcgaggaaaccgatgtggtcggtaaggaaatgtacaccttctccgattcaaacgattctttgagtttgagcctgcgtcctgaaggtacggcgtcttgtctgcgtgcggtggtcgaacacaaccttttgtacaacagcccacaaaaactgtggtatatggggccgatgttccgccgcgagcgtccgcaaaaaggccgttatcgtcagttccatcaggtcggtatcgaagctttgggttttgaaggtccggatattgatgcggaaatcatcgcgatgtctgccgacttatgggaaaaattgggtatccgcgaatacctgactttggaaatcaacagcttgggcaaccgtgaggagcgagcggcacaccgtgcggcgttggttgaatatttgacacgctatgaagataaattggacgaagacagcaaacgccgtctgaaaaccaatcctttgcgtgttttagatacgaaaaaccctgatttgcaggaaatctgcaacgccgcgccgcgtttggtggattatttgggcgaggcttcgcaaaaccactatgcacgcttcaaggcgatgttggacggtttgggtatccaatatattgaaaatccgcgcttggttcgcggtttggattattacaatcagacggtttttgagtggacgaccgacaaactcggcgcgcaggcaactgtgtgcggcggcggccgttacgatggtttgattgaggaacttggcggcaaacctgcgccgtccatcggctttgcgatgggcatcgaacggctgctgcttttggtgagcgaatacggctcgctggaagtgaacgctgcgcctgatgtctatgcaatgcaccaaggcgaaagggcggacttgcaggtgatgaaatacgcgcaagccttgcgcgcgcaaggtttcaatgtaatgcagcattccggctatcaaagcctgaaagcgcaaatgaaaaaagccgacaacagcggcgcgcgctttgccctgattgtcgcgcaagacgaactggcgaacggtacggttacgctcaaagacatgaacggcgcacacggtcagcaaactgtcgccgccgaggatttaacccatactttacaacaatggaagaacgcataa

SEQ ID NO: 39106 - DNA, 291 bp, Neisseria meningitidis; identical to SEQ ID NO: 38495

SEQ ID NO: 39107 - DNA, 1281 bp, Neisseria meningitidis
atggaaaactcattgaaagaagccgccctcaagttccacgaattacccgttccgggcaaaatttccgttaccccgaccaaatctttggcgaccgacaaagatttggcgttggcgtactctccgggcgtagccgctccttgtatggaaatccatgccgatccgcaaaatgcctacaaatacaccgccaaaggcaacttggtcgccgtcatttccaacggtacggccgttttgggcttgggcgacatcggcgcgctggcgggcaaacccgtgatggaaggtaaaggcgtattgttcaaaaaattcgccggtgtggacgtgttcgacatcgaaatcgatgaaaaagacccgcaaaaactcgtggacatcatcgccgctttagagccgaccttcggcggcatcaacctcgaagacatcaaagcacccgagtgtttctacatcgaacgcgaattacgcaaacgctgcaaaatccccgtattccacgacgaccagcacggcacggccatcattaccgccgccgccgtattgaatgccctgcgttttaccggccgtaaaatcgaagaagcgactttggtgtgttccggcgcaggtgcggccgcgattgcctgcttgaaccaattgctggatttgggcttgaaacgcgaaaacgtgaccgtttgcgactccaaaggcgtgatttaccaaacccgcgaagacaaagaccgcatggatgagtctaaacagttctacgccattgaagacaacggccagcgcgtgcttgccgatgccgtcaaaggcaaagacatcttcttgggcctctccggcgcgaacctgctgacgcctgaaatgctgaacaccatgaacgaaaaacccatcgtgttcgccatggccaacccgaatccggaaattctgccgccgctggcaaaagaaacccgtccggacgtggttatcggtaccggccgttccgacttcccgaaccaagtcaacaatgtattgtgcttcccgttcatcttccgtggcgcgttggatgtcggcgcgaccaccatcaacgaagaaatgaaacgcgcctgcgtgtatgctttggcggatttggcgatggaagaagtgaccgaagaagtggttgccgcttacggtaagaaatttgaattcggcgcggaatacctgattccgactccgttcgattcccgcctgctgccgcgcgtcgctacggctgccgccaaagcagcgatggaaagcggcgttgcaacccgtccgattgccgactttgaagcctacgccgccaagctgggcgaatggaagctgtaa

SEQ ID NO: 39108 - DNA, 624 bp, Neisseria meningitidis; identical to SEQ ID NO: 36421

SEQ ID NO: 39109 - DNA, 381 bp, Neisseria meningitidis
atgaaacagacagtcaaatggcttgccgccgccctgattgccttgggcttgaaccaagcggtgtgggcggatgacgtatcggattttcgggaaaacttgcaggcggcagcacagggaaatgcagcagcccaatacaatttgggcgcaatgtatgccgaaggacaaggcgtgcgccaagattatgtcgaagcggtcagatggtttcgtaaggcggcggatcaggggttagcacgagcccaatttaatttgggcgcaatgtattacaaagggcacggcgtgcgccaagaccgcgcccttgcacaagaatggcttggcaaggcgtgtcaaaacggaaaccaagacggctgcgacaatgaccaacgcctgaaagcgggttattga

SEQ ID NO: 39110 - DNA, 723 bp, Neisseria meningitidis
atgaaacccgcctatttcatttccgacctgcatttgagcgaaaagcaccccgaactgaccgcgctgctgctgcgttttttacgttcttccgccgccgggcaggctcgggcgatttatattttgggcgatttgtttgatttttgggtgggcgatgacgaagtttccgagttgaatacttcggttgcgcgggaaatcaggaaattgtccgacaaaggcgttgccgtgttcttcgtcaggggcaaccgcgatttcctgattgggcgggatttttgccgacaggcgggtatgacgctgctgccggattactcggttttggacttgttcggctgcaaaaccctcatctgccacggcgacactctgtgtacggatgacagggcataccaacgtttccgcaaaatcgtgcatcggaagcggctgcaaaaactgttcctaatgctgcccctgaagtggcgcacgcgccttgccaccaaaatcaggcgtgtcagcaaaatggaaaaacaggtcaagcccgccgatattatggatgtcaatgccgcctttaccgcgcggcaggtacgcgccttcggtgcggaaaggctgatacacggacacacccaccgcgagcatatccatcacgaaaacggctttacccgcatcgttttgggcgactggcataacgactatgcttcaatcctccgcgtggacggggacggcgcggtattcgtgccgctggaaaaatactga

SEQ ID NO: 39111 - DNA, 492 bp, Neisseria meningitidis
atgcgacatatcttatctgttctgatcgaaaacgaatcaggtgcgatgagccgcgtggtcggtttgttctctgcacgcgattacaatatcgattctttggcggttgcgccgaccgaagacaaaaccctgtcccgtatgaccatcgttacccacggcgacgagcaggttatcgaacaaatcaccaagcaactcaataaattgattgaagtgattaaagtggtcgatttgaacgaaagccgttttgtcgaacgcgaactgatgttggtaaaagtccgtgccgccggcaaagaccgcgacgaatttttacgcttgaccgaaatctaccggggcagcatcatcgacgtaaccgaccgcagctatacgattgaaattaccggctcgaccgacaagctggattcctttttggaaacggtcggacgcgcccaaattttggaaaccgtacgtacaggcgcggccggcatcggtcgcggtgagcgtattttgaaaatttaa

SEQ ID NO: 39112 - DNA, 1809 bp, Neisseria meningitidis
atgcgtaccaactattgcggcctgatcagcgagcaatacttagaccaaaccgttaccgtcaaaggctgggtacaccgccgacgcgaccacggcggtgtgatttttatcgacctgcgcgaccgcgaaggcatcgtccaagtcgtgatcgatcccgacacgcccgaagcgtttgccgctgccgattccgctcgcaacgaatacgttttgagcattaccggccgcgtacgcaaccgtcccgaaggcacgaccaacgataaaatgatttccggcaaaatcgaaatccttgccaaagaaatcgaagtcttgaacgccgccgccacgccgccgttccaaatcgacgatgaaaacatcagcgaaaacgttcgcctgaccaaccgcgttatcgacttgcgccgtccggtgatgcaacgcaacctgcgcctgcgttatcaagtcgctatgggcgttcgccgttatctggacgcgcaaggcttcatcgacatcgaaacgccgatgctgacccgctccactccggaaggcgcgcgcgactacctcgtgccgagccgcgttcatccgggcgagtttttcgcgctgccgcaatcaccgcaattatttaagcaactgttgatggtggccggtttcgaccgttactatcaaattaccaaatgtttccgtgacgaagacttgcgtgccgaccgtcagcctgaattcactcaaatcgacttggaaacctcgttcttgaacgaggatgaaattatggacatcaccgaaggtatggcgaaacaagtcttcaaagatgctttaaacgtagatttaggcgacttcccgcgtatgccttacgccgaagccatgttctactacggctctgacaaaccggatatgcgtatcaacttgaaatttaccgagttgaccgacctgatgaaaacggaagaattcaaagtcttccgtggcgcggcagatatgaaaggcggccgtgtagtcgccctgcgcgtaccgaacggcgcaaaattcagccgcaaagaaatcgacgaatacactaaatttgtcggcatctacggcgcgaaaggtctggcatacatcaaagtaaacgatgtgggcaacctctcaaacggcgaagacagcggcctgcaatctccaatcgtaaaattcctgtctgagaatgccctgaaagaaatcatcgagcgtaccggcgcacaaaacggcgatattatcttcttcggtgcggacaaaaccaaagttgtgaacgaagccatcggcgcattgcgtatcaaagtcggcttggaacacggcaaagacaacggctacttcacagacgaatggaaacctttgtgggttgtcgatttcccaatgttcgaatacgacgaagaagccgaccgctacgttgccgtacaccatccgtttaccgcgcctaaagaaggtcatgaagacctgatggtttccgaccctgcaaactgcctggcccgtgcctacgacatggtattgaacggctgggaaatcggcggcggctctatccgtatccaccgtgcagacgtacaagagaaagtgtttgccgcgctgaaaatcagccctgaagagcaacaagagaaattcggcttcctcttggacaacctgaaattcggtgcgcctcctcacggcggccttgcattcggcctcgaccgtttggttaccctgatgaccggcgccgaatctatccgcgacgtgattgccttcccgaaaacacaacgtgcccaatgcctgctgaccaacgcgcccaacagcgtggacgacaagcagttgcgcgaattgagcttgcgcctgcgtcaaaaggtggctgaaaccaaagaagcataa

SEQ ID NO: 39113 - DNA, 780 bp, Neisseria meningitidis
atgaaaaccatcacagaaaccctaaatcttgccccgaaaggcaaaaacttcctgaccgccgattggcccgcgcccgccaatgtgaaaaccctgattaccacgcgcaacggcggcgtgagccaaggtgcgtatcagagtttgaacctcggtacgcacgtcggcgacaatcccgaagccgtgcgccgcaaccgcgaaatcgtgcaacagcaggtcggattgcccgttgcctacctcaatcaaatccacagcaccattgtcgtcaatgctgccgaagcattggacggcacgcccgatgcggacgcttccgtggacgacacgggcaaggttgcctgtgccgtgatgaccgcagactgcctgcctgttttgttttgcgacagggcgggtacgacggttgccgccgcacacgcgggctggcgcggtttggcgggcggcgtattgcaaaacaccattgcagcgatgaaggttccgcctgtcgaaatgatggcgtatctcggccccgccatcagtgcggatgcgtttgaagtcggacaggacgtgtttgatgcgttctgcacgcccatgcccgaagccgccgccgcatttgaaggcataggcggcggcaaattccttgccgacctttacgcgctcgcccgcctgattctgaagcgcgaaggcgtgggcggcgtgtacggcggcacgcattgtacggttttggaacgggatactttcttttcctaccgccgcgacggagcgacagggcgtatggcgagcctgatttggctggacggcaatgccgtctga

SEQ ID NO: 39114 - DNA, 1020 bp, Neisseria meningitidis
atgaaaaaaattctcgttaccggcggcaccggttttatcggctcgcataccgttgtttctttgctgaaaagcggccatcaagtcgtgattttggataacctatgcaattccagcatcaatatcctgccacgcttgaaaacgattaccggccaagagattccgttttatcaaggcgatatccgcgatcgtgagattttgcgccgtatttttgcggaaaaccgcattgattcggtgattcattttgccggcttgaaagcggtgggtgaaagtgtggccgagccgatgaaatattatgataataatgtttccggcagcttggtgttggcggaagaaatggcgcgtgcgggcgtgtttagcattgtgttcagttcttcggcgacggtttatggcgatccgggcaaagtgccttataccgaggatatgccactgggcgataccaccagcccttacggcacatcgaaatcaatggttgagcgcattctcactgatattcaaaaagccgatccgcgctggagcgtgattttgttgcgttatttcaatccgattggggcgcacgaaagtggtttgattggcgagcagccaaacggcatcccgaataatttgttgccttatatctgccaagtggcggcaggcaaactgccgcaattggcggtatttggcgatgactaccctacccccgacggcacggggatgcgtgactatattcatgtgatggatttggcagaagggcatatcgcggcaatgaaggcaaaaagtaatgtagcaggcacgcatttgctgaacttaggctccggccgcgcttcttcggagttggaaatcatccgtgcctttgaagccgcatccggcttaaatattccctatcaaatccaaccccgacgcgccggagacttggcgtgttcctttgccgacccgtcccataccaaacaagagacaggttgggaaaccaaacgcagccttgcgcaaatgatggaggattcgtggcgttgggtcagccgcaaccccaacggatatggggattaa

SEQ ID NO: 39115 - DNA, 501 bp, Neisseria meningitidis
atggcggatttgcagaaaacttttcaaacttcgttccgtgatgcgatggcatcctgtgcggcaggcgttcatgtcatcacgacagacggtgcggcagggcgttacggcattacaatgacggcggtcgcgccggttaccgacgagccgccgaccgtgatgctgtgcatcaaccggagtgcgcgaatcattccgatcctgtcggaaaacggcagcctctgcatcaatatgctggcggacgaacatcaggatgttgccgaacattttgccgggctgaccggcctgtcgcccgaagagcggtttgcctaccacatctggcatcgcggcaaaacgggacaacttgaaatagaaggcgcgttggcgcacctgcacgggcatattgtcggcaaacatgaaatcggcacgcattttgtgttttacgtcaggctcgacgaaatcaaaaactgcgggtgcaaacgccccgcgctgctgtatttcagacggcagtttagatttttagactga

SEQ ID NO: 39116 - DNA, 621 bp, Neisseria meningitidis
  misc_feature 598, 599, 600, 601, 602: 'n' is a, c, g or t
atgaccgacaaaatttctcccgacgcactaattgaagccgcactgctgacccaaaccgaaccgctgaccgaaaaatctatgcgcgaattgtgtgtgccgccactgtcgcaggacaaactgattgatgtgttggcgcagttgaaaacgcgttggcaggatagggcgttgcaactggtgcatacgcaagagggctggcgttttcagattgttcagacggcattcgagcggctgggcagcctgcaagaacagcgtgcgccgcgttactcccgcgccgtgatggaaacactggcgattatcgcctaccagcagcccgtaacgcgcggcgacatcgagggcatacgcggcgtggcggtgtcgcagaacgtgatgcagaccttgcaggatcgggggtggattgaagtcatcggacatcgggacacattgggaaaacccgcattgtgggcgacaacggcaacttttctcagcgatttgcgcttggacggtctggaagaacttccgccgctgaccgaactgggcgaactggttttacccgatttaatggaaatgccgcctacggatgaagaagagccggaagccgtaccgtccgataccctgcccnnnnncacacacttaattaattaa

SEQ ID NO: 39117 - DNA, 270 bp, Neisseria meningitidis
atggcaatgaacaaattgaatttccttctgctgcttgcggtgtgcgtttccgctttttccgttgtgatgcagcaaaaccagtacaggctcaacttcacagctttggacaaggcgaaaaaacaggaaatcgccttggagcaggattatgcgcaaatgaggctgcaacaggcgcgtttggcgaaccacgaagcgatcagggcggcggcagaaaaacaaaacctccatccgccggtttcgggcaatacctttatggtggcgcatcaaagatag

SEQ ID NO: 39118 - DNA, 918 bp, Neisseria meningitidis
atggttttggacgggtttgcggcgcattttgacgcttatttggaaaacatcgtgcgcgagggcaagtcggagcacacggtggcggcataccggcgcgatttggaagaactgtttgcgctgttggcacaaatgccgtctgaagatgcaggcggcgtgccgcaggacttgtcgcggcgcgattttacggcggcgttgcggcggctgtcgcagcgcggtttgaatgcgcggacgctggcgcgcaagctgtcgtcttggcggcagtattgtgtttggctggtggaacgcggtctgctgcataccgacccgaccgccgacatcaaaccgccgaagcagcccgagcgcgtacccaaagccctgtcgcaggaatggctgaaccggatgctggatttgcccgtggacggcggcgacccgctggcggtgcgcgatcacgccctgttcgagctgatgtacggcagcggtttgcgcgtgagcgagatacacggcttgaatgcagatgatgtctatttggacgaggcgtgggtacacgttaccggcaaagggcgcaagcagcggcaggtgccgctgaccggcaaaagcgtggaagccctgaaaaactatctgccgctgcgtcagacggcatcggacggcaaagccctgtttaccggcaggaacggcacgcgcctgagccaacgccaaatccaaaaacgtttggcgcaatgggcggcgcaaaacggcgacggcaggcacgtttcgccgcatatgatgcgccacagctacgccggacacctgttgcaggcttcgcgcgacatcagggcggtgcaggagctgctcgggcacagcagcctttcgaccacgcagatttacaccaaactcgatttcgaccacatcgcccgcctgtatgacgaagcccacccgcgcgccaagcggcaggacgaatga

SEQ ID NO: 39119 - DNA, 318 bp, Neisseria meningitidis
atgcaaaaacgtattgatgaaatccaaagcaaataccgcgaatggtgtcatttactaccgcaactggaagaagacatccgccgttggaaatatgtcgtcactttaattcgcgacatggacaatttctatacccacgagtatcaggcgtgtcatcaggctattgaagacggggtagaactggatttgagtacggaaggcgaatacagcattatgagtgaagatgcgctatggaacgcgctgggcgaattccatcaattggcttggttatatttgcgctccagcgtcgatgccttagacaaatatacacaagaagattag

SEQ ID NO: 39120 - DNA, 1428 bp, Neisseria meningitidis
atgtttttctccgccctgaaatcctttctttctcgatacattactgtatggcgcaatgtttgggcggtgcgcgaccagttggaaccgcccaaacgcacggcggaagaacaggcgtttttgcccgcgcatttggaactgaccgatacgccggtctctgccgctccgaaatgggcggcgcgttttattatggcgtttgcgcttttggctttgttgtggtcctggttcggcaaaatcgatattgtggcggcggcttcgggcaaaacggtgtcgggcgggcgcagcaaaaccatccagccgctggaaacggcggtggttaaggcggtacatgtgcgcgacgggcagcatgtgaaacagggagaaacgctggcggaactggaggctgtgggaacagacagcgatgtggtgcagtcggagcaggctttgcaggctgcccaattgtccaaactgcgttatgaagcggtattggcggcattggaaagccgtaccgtgccgcatatcgatatggcgcaagcacggtctttaggtctctccgatgccgatgtgcaatcggcgcaggtgttggcgcagcaccagtatcaggcatgggcggcgcaggatgcgcaattgcagtcggctttgcgcggccatcaggcggaattgcagtcggccaaggcgcaggagcagaagctggtttcggtgggggcgatcgagcagcagaaaacagcagactaccgccgtttgcgggccgacaattttatttcggaacatgcgtttttggagcagcagagcaaatcggtcagcaattggaacgatttggaaagtacgcgcggtcagatgaggcagattcaggcggccattgcacaggcggagcagagtcgggtgctgaatacgcagaacctgaaacgcgatacgctggatgcgctgcgccaggcaaacgaacagattgaccaataccgcggccaaacggataaggcaaagcagcggcagcagctgatgacaatacagtcgcctgcggacggcacggtgcaggaattggccacctatacggtgggcggtgtggtgcaggctgcccaaaaaatgatggtggttgcgcccgatgacgacaaaatggacgtggaagttttggtattgaacaaagacatcggttttgtggaacagggacaggatgcggtggtgaagattgagagttttccctatacgcgctacggttatctgacgggcaaggtgaaaagtgtcagccatgatgcggtaagccacgaacagttgggcttggtttatacggcggtggtgtcgctggacaaacataccttgaatattgacggcaaagcagtgaatctgacggcgggcatgaatgtcacggcggagattaaaacgggtaaacggcgggtgctggattatctgttaagcccgctgcaaaccaaattggacgaaagctttagggagcgatag

SEQ ID NO: 39121 - DNA, 813 bp, Neisseria meningitidis
atggcttcaaaacccttcctaaaatgggcaggcggcaaacataaacttgtcccctttatcgaacataatctacccactcctacacgaaaacgcctgattgaacccttttgcggttctgccgctttgtctcttgcattggacttcgaacattatctgctcaatgatattaacgctgacttaatcggcttattccgtatcctaaaagaagaaaaatccggattcatcgactacgcccgctctttctttatttccgaaaacaatagcgattcaagattctatgaattgcgggaacaattcaacttcagcaaaaatctgcacgaacgctcagcactatttatttatttgaaccgtcatgcttttaacggtttatgccgttacaacagcaaaggggtattcaatgtgccgttcggacgctacaaatcgccgtactttccccaacaagaaatggaaggtttcattcagaaatctgacagagttgaattaatgtgcggagattttcaaatgattctatctcagacagacaataccgatacggtttattgcgatcccccttacgcgcctttaagcccaaccgcttcatttaccacttatgccaaagaaagtttcaatttagacaatcaaatccgtcttgcccagtcagcccaacaaattgcgcccgattcccaaggcgttttgatttcaaatcatgatactgaattcacaagggatatttattcttttgccattctgaaaacaattgaagtacaacgcaatattgccgcaaaaggcagcagccgtaaaaaagtcggagaattattggcaatttatgattga

SEQ ID NO: 39122 - DNA, 1248 bp, Neisseria meningitidis
atgttttctctagaggcttggataggcttgaggtatctcagggcgaaaaagcgcaacggctttatgtcgtttatcacgatggtttcgattgccggaatcgccttgggcgtaaccgcgctgattgtcgtcttgtcggttatgaacggctttcagaaagaaatacgcgggcagctcctgaatgtcgcgccgcacgccgaaatcggctatatcgacaatacggatacggattggcgcaacctgcttcggtttaccgaaaaccgcaaaggtattttggctgccgcgccctatgtttccaatcaggctctgctggcaaacgcgggcgaaatcaggggcgtgcagatgcgcggcattttgccgtctgaagagcgcaaagtggtggaatacggcgacaaaatgccggcaggcaaatttgaagatctgattccgggcgagtttgacattatcctcggtgtcggcttggcggaggctttgggggcggaagtcggcaataaagttaccgtcatcacgccggagggcaacgttacccctgccggagtcgtaccgaggttgaaacagtttaccgtggtcggtctggttaaaacgggtgtttacgaggttgacaattcattggcgatgacgcatatccaagacgcgcgcgtactgtaccgcttggataaggaagttgcggggctgcggctgaaactcgccgacccgcaaaacgcccccgccttgacggcaacactgattccggaggcgcaaagggacgcggtttgggtgcgcgattggacgtacaacaaccgcagctattttgaggcggtcgagttggaaaaacggatgatgttcatcatcctgacgctgattatcgccgtggcggcgttcaaccttgtctcttccttggtgatggcggttacggaaaagcaggcggacattgcgattttgcggactttgggtctttcccctggcggcgtgatgaagatttttatggtgcagggcgcgttttcaggctttttcggcacgctggcgggtgtggtctgcggcgtgcttttgggttggaacgtcggcagggtcgtggcgttttttgaaaacctgctcggtgtccaccttatcaattcgcaggtttattttatcgactacctgcccagcgatgtcgatatgggcgacgttgccctgattgcctgcatttccttgggactgtctttcgttgccacgctctacccgagctggcgtgcctcaaaaacccaaccggcggaggctttgcgttatgagtga

SEQ ID NO: 39123 - DNA, 252 bp, Neisseria meningitidis
atgggtaaagtagaagccatcatcaactcgatgacccctaaagaacgcgccaaccctgccctgctcaaagccagccgcaaacgccgtattgcaatgggtgcgggcacgaccgtacaggaagtgaacaaattgctcaaacagtttgaacaaatgcaacaaatgatgaagatgttcagcggcaacggcttgggcaaactgatgcgtatggcgaaaggaatgaagggaatgaaaggaatgttcccgggtttgtaa

SEQ ID NO: 39124 - DNA, 591 bp, Neisseria meningitidis
atgtcggaaaggataatactgccggtcttgtcgttgggcggcgttcgtctcgaaccgttggatgtgcatcatgaaatgggtttgcgcgaggcggtttgcgatggggaagtttggaagctgggagtaacgtccgcgccccatccggatagggtggcagactatatcgggacagcattggcaacgcgtttggcgtttgcggttgtcgatgaagaggcgggcagggtggtcgggacaacggcgtattatcattttgaaccgcagattccgcgtttggatatcggattcacatggtatgcggcatcggcacggcggacacggataaacacctgttgcaaaatcatgctgttggattacgcatttgatgttttggcttgccgttgcgtgggatggcgcacggatattctgaaccttgcctcgcaacgtgccatcgaacggctgggtgcggaaaaagacggcgtgctgcgtatgcatatgctccgtaaagacggcagtgtgcgcgatacggtcgtgtacagtatgctgagggaagattggtgcaaaaacagggaaatcctgaccggcaggttggcagggtatggcgtgcaggtgtga

SEQ ID NO: 39125 - DNA, 864 bp, Neisseria meningitidis
atgaaaaccttcttcaaaaccctttccgccgccgcactcgcgctcatcctcgccgcctgcggcggtcaaaaagacagcgcgcccgccgcatccgcttctgccgccgccgacaacggcgcggagaaaaaagaaatcgtcttcggcacgaccgtcggcgacttcggcgatatggtcaaagaacacatccaacccgagctggagaaaaaaggctacaccgtcaaactggtcgagtttaccgactatgtgcgcccgaatctggcattggctgagggcgagttggacatcaacgtcttccaacacaaaccctatcttgacgacttcaaaaaagaacacaatctggacatcaccgaagtcttccaagtgccgaccgcgcctttgggactgtacccgggcaagctgaaatcgctggaagaagtcaaagacggcagcaccgtatccgcgcccaacgacccgtccaacttcgcccgcgtcttggtgatgctcgacgaactgggttggatcaaactcaaagacggcatcaatccgctgaccgcatccaaagcggacattgccgaaaacctgaaaaacatcaaaatcgtcgagcttgaagccgcgcaactgccgcgtagccgcgccgacgtggattttgccgtcgtcaacggcaactacgccataagcagcggcatgaagctgaccgaagccctgttccaagaaccgagctttgcctatgtcaactggtctgccgtcaaaaccgccgacaaagacagccaatggcttaaagacgtaaccgaggcctataactccgacgcgttcaaagcctacgcgcacaaacgcttcgagggctacaaatcccctgccgcatggaatgaaggcgcagccaaataa

SEQ ID NO: 39126 - DNA, 1578 bp, Neisseria meningitidis
  misc_feature 6, 7, 8, 9, 10: 'n' is a, c, g or t
gtgtgnnnnntatcgggcagcctcaattcagacggcagcgtgcgcggccgcgtgatggcgcagacgtcggcgcgtctccgcgtcccgccgagaaaaacaaccgggcacgaaacgttctacgcggcggcggattgggacatcaaccccgatacggttttgggcgcgggctatctttaccagcaacgccacctcgcgccgtacaacggcttgccagccgatgccaataacaaattaccgtccctgccgcaacacgtatttgtcggcgcggattggaacaaatttaaaatgaacagccacgacgtgtttgccgatttgaaacattacttcggcaacggcggctacggcaaagtcggtatgcgctattccgaccgcgatgccgactccaactatgcctttgccggcagcaagctgggcatgaaaaccctggcaggccgcccgggctgcaatacggctgacgacaaagcctgcgcggtgggtttgggtacagaaatcaaacaaaaagccctcgcgtttgacgccagctacagcaggcctttccgcttgggcaatacggccaacgaatttgtcatcggcgccgattacaaccgcttccgcagcaccaacgaacaaggccgtactactttatatgcacgcggcggcctggctttaaacgagttccgcagcataccgcaggttgatttgattgccaacgcgcgcaaaggcgtgcgcggttacagccataccgtcgctaccgaaaacctcgacgaattcggcatttacggcaaatccaccttccatcctgccgacgggctgtcgcttatcggcggcggacgtttgggacactataaaatcgagtcgggcgaaggcaaaaccctgcacaaagccagcaaaaccaagttcaccggctacgcaggcgcggtttacgacttgaacgacaacaacagcctctacctgagcctgtcccagctctacacaccgcaaaccaacctcgatgccgacggcaagctgctcaaaccgcgccaaggcaaccagtttgaagtcggttacaaaggcagctacatggacgaccgcctcaatgcccgagtttcgttctaccgcatgaaagacaaaaacgccgccgcaccgttgaacccgaacaacaaaaaaacccgttacgccgcattgggcaaacgcgtgatggaaggcgttgagaccgaaatcagcggcgcggttacaccgaaatggcaaatccatgcaggttacagctatctgcacagccaaatcaaaaccgcctccaattcacgcgacgacggcatcttcctattgatgcccaaacacagcgcaaacctgtggacgacttaccaagttacgcccgagctgaccatcggcggcggcgtgaacgcgatgagcggcattacttcatctgcagggatgcatgcaggcggttatgccacgttcgatgcgatggcggcataccgcttcacgcccaagctgaagctgcaaatcaacgccgacaacatcttcaaccgccattactacgcccgcgtcggcggcgcgaacacctttaacattcccggttcggagcgcagcctgacggcaaacctgcgttacagtttttaa

SEQ ID NO: 39127 - DNA, 3837 bp, Neisseria meningitidis
  misc_feature 8, 9, 10, 11, 12: 'n' is a, c, g or t
gtgtgtgnnnnnactaccgcccctcagcgtattcgggaaatcccctacaactatacttcctacaccgaccgcgaaatcgtcatccgattattgggcgacgaggcgtggcagattctgcaagacttgcgcggacagcgtaaaaccggacgttcggcgcggatgctgtttgaagtgttgggcgatatttgggtagttgtgcgcaatccatatctggtcgatgacttgttggagcacccgaaacgccgcaccgcgctggtgcgggaaatgcgccaccgtttgaacgaaatccgcaaacgccgcgacgacaatcggcaagtggatgtcttggttgcggcggcggacaaagcggtcgggcgttttgacggcagctttgacgaaacgcgccaaaagcggcagcagattttggagcgtttgagcaaaatcaccaagccgcacaatattatgttcgacgggctggcgcgggtaacgcacgttaccgatgcgaccgactggcgcgtggagtatccgtttgtggtcgtcaatcccgacacggaggcggaaatcgcgcctttggtgtgcgccttaatcgagctggatttggtcattattccgcgcggcggcggcacgggttataccggcggcgcgattcctttggacgcgatgagcgcggtcatcaatacggaaaagctggataaacataatggcgtggaatttgtcgaactggcgggcttggacggcaaacatccgattatccggtgcggcgcgggcgtggttacgcggcgggtggaagaaaccgcgcatcaggcgggtttggtattcgccgtcgatccgacttccgccgatgcgtcctgcgtgggcggcaatgtggcgatgaacgcgggcggcaaaaaagccgtactgtgggggacggcgttggacaatctcgcctactggcagatggtcaaccctcagggcgaatggctgcgcatcgagcgcgtgcgccataatttcggcaaaatccacgacgaagaaaccgccgtgttcgacgttcacacgctggattcagacggcctcaatatcgttaaaaccgaacgtttggaaatccccggtcacaaattccgcaaagtcggtttgggcaaagacgttaccgacaaattcttgagcggcctgcccggcgtgcaaaaagaaggtacggacggcatcatcaccggcgtcgccttcgtgttgcacaaaatgccgaaatacacgcgcaccgtgtgtatggagtttttcggtacggtcgccaccgccacgccatctattgtcgaaatccgcgactttttgcttgcccatgaaagcgtgcggctggcgggtttggaacatttggactggcgttatgtccgcgccgtcggctacgccaccaaagcggcgggcaagggacggccgaaaatggtcttgctggcggatgtggtttcagacgacgaagccgccgtgcaggcagccgccgaacacatctgcgaactcgcccgcgcccgcgacggcgaaggctttatcgccgtgtcgcccgaagcgcgcaaaaccttctggctcgaccgcagccgcaccgccgccatcgccaaacacaccaacgcctttaaaatcaacgaagacgtggtgattccgctggagcggctcggcgagtattcagacggcatcgaacgcatcaacatcgagctttccatccaaaacaaactcaaactctgtgccgcattggagcaatatctttcgggcaaactccccatcgacaaaatgggaaccgacctgccgaccgccgaactattgggcgaacgcggcaaacacgccctggcccacgtttccgccgtcaaagcgcgttgggactggttgctcgccaatctcgacacgccgcttgccgactacaagacccgctacggcgcagccgtccacgccgcgcccgaagccaaagacgatgaaagttgctttattgccttccgcgatttccgcctgcgcgtgtctgtcaaagcagacgtaatgaagccgctttctgaaatcttcagcggcaaaaccgataccaaaattatccaaggcttgggcaaaatccacgccaaaaccgtacgcagccgcgtcttcgtcgccctgcatatgcacgccggcgacggcaatgtccacaccaatattccggtcaattcagacgatgccgaaatgcttcagacagcctatcgttcggtcgaacgcattatgaaaatcgcccgttcgcttaacggcgtgatttcgggcgaacacggcatcggcatcaccaagctcgaatttttaagcgatgaagaaatgcagccgttttggaactacaaaaaccaagtcgatcccaaacacaccttcaaccgccacaaactgatgaaaggatcggacttacgcaacgcctacacgccgtcgttcgagcttttgggtgcggaatcgctgattatggaaaaatcagatctcggcacgattgccgattccgtcaaagactgcctgcgctgcggcaaatgcaaacccgtctgctctactcacgttccgcgtgccaacctgctgtacagtccgcgcaacaaaatcctcggcgtgggcttgctgaccgaagccttcttatacgaagaacaaacccgccgcggcgtttccgtcaaacactttgaagaactcatggacatcggcgaccactgcaccgtgtgccaccgctgcgtcaaaccctgccccgtcaacatcgacttcggcgacgtaaccgtagccgtccgcaactaccttgccgattccggccacaaacgatttgcgcctgccgcagctatgggtatggcgtttttgaacgccaccggcccgaaaaccatcaaagcccttcgcgccgccatgatacagaccggcttcccagcgcaaaactttgcctacaaaatcggcaagcttcttccgatcggcacgaaaaagcaaaaagccgaacccaaggcaaccgtcggcaaagccccaattaaagaacaggttatccatttcatcaaccgtcctttgccgaaaagcgtacccgccaaaacaccgcgctccttattgggcatcgaagacggcaaaagcatccccatcatccgcaaccccgccgcgcccgaagatgccgaagccgtgttctacttcccgggttgcggttcggaacgcctgttcagccaaatcggacttgccgttcaagccatgctctggcacgtcggcgtacaaaccgtcctgccgcccggctatatgtgttgcggctatccgcaagacgcgggcggcaacaaggctaaagccgaagaaatgagcaccaacaaccgcgtggctttccaccgtatggcaaacaccctcaactacctcgacattaagaccgtcgttgtcagttgcggcacttgttacgaccagctcgaaaaataccgctttgaagaaatcttccccggctgccgcatcatcgacatccacgaatacctgctcgaaaaaggcgtgaaactcgacggcgtgcaaggtcagcaatacctctaccacgacccctgccacacccccatcaaaaccatgaacgccacccaaatggccagcagcctgatggggcagaaagtcgtcttaagcgaccgctgctgcggcgagtccggtatgttcgccgtcaaacgacccgatatcgccacccaagtcaaattccgcaaacaagaggaaatcgagaaaaacctcaaagagctgccgcagggtgaacccgtcaaaatgcttacttcctgcccagcctgcctgcaaggcttgagccgctacaccgacgacaacaatatgcctgccgactacatcgtcatcgaaatggcgaaacacatcctcggcgaaaactggctagacgagtttgtgaaaaaagccaacaacggcggcgtggaaaaagtattgctgtaa

SEQ ID NO: 39128 - DNA, 1086 bp, Neisseria meningitidis
atgaaaaaatccctgattgccctgacactggctgccctgcctgttgcagcaatggctgacgttaccttgtacggtacaattaaagcaggcgtagaagtttctcgcgtaaaagatgctggtacatataaagctcaaggcggaaaatctaaaactgcaacccaaattgccgacttcggttctaaaatcggtttcaaaggtcaagaagacctcggcaacggcatgaaagccatttggcagttggaacaaaaagcctccatcgccggcactaacagcggctggggtaaccgccagtctttcatcggcttgaaaggcggcttcggtaccgtccgcgccggtaatctgaacaccgtattgaaagacagcggcgacaacgtcaatgcatgggaatctggttctaacaccgaagatgtactgggactgggtactatcggtcgtgtagaaagccgtgaaatctccgtacgctacgactctcccgtatttgcaggcttcagcggcagcgtacaatacgttccgcgcgacaatgcgaatgataaggacaaatacacacataagcagtccagccgtgagtcttaccacgccggtctgaaatacgaaaatgccggtttcttcggtcaatacgcaggctcttttgccaaatatgctgatttgaaagataatgcagaacgtgttgcagtaaatactgcaaatgcccatcctgttaaggattaccaagtacaccgcgtagttgccggttacgatgctaatgacctgtacgtttctgttgccggtcagtatgaagctgctaaaaataacactggtactgtcggcaaacaaggtaaaaaacacgagcaaactcaagttgccgctactgccgcttaccgttttggcaacgtaacgcctcgcgtttcttacgctcacggcttcaaagctaaagtgaatggcgtgaaagacgcaaattaccaatacgaccaagttatcgttggtgccgactacgacttctccaaacgcacttccgctctggtttctgccggttggttgaaacaaggtaaaggcgcgggaaaagtcgaacaaactgccagcatggttggcttgagtcacaaattctaa

SEQ ID NO: 39129 - DNA, 1728 bp, Neisseria meningitidis
atgcagttatcaggcgcgcaaatcatagtgcagagtctcaaagccgaaggtgtcgagtacgttttcggttatcccggcggtgcggttatcgaaatctacgatgcccttttccaactcaataaattcaaacacattcttacccgccatgagcaggcggcagtacacgcggcagatgcgtatgcgcgcgtcagcggtaaggtgggcgtggcattggttacatccggcccgggcgttaccaatgcactgaccggtattgctactgcctatacggattcgattccgatggtggtcatcagcgggcaggtaggcaattccctgattggtacggatgcgttccaagaagttgatacggtgggtattacccgtccgtgcgtcaaacacaatttcctggttacggacatcaatgagttggcggaaaccattaaaaaggcgttccaaattgccgcaagcggccgaccggggcccgtggtggttgatgtcccgaaagatgttacgcaggcgatggcgaaattcagctatcctcaggaagacatttttatccgttcgtatcaaccggttgttcaaggacatatcggtcagattaaaaaggccgtgcagatgttggcatctgccaaacgtccggtcgtctattttggcggcggcgtggtgttgggtaatgcttctgaagagctgacccgatttgtccgaatgacgggtgctccgtgcacgggtacgctgatgggcttgggcgcttatccttccggcgaccgccaattcctcggtatgctcggtatgcacggtacttacgaggcaaaccttgccatgcagaatgcggatgtcgttcttgccgtaggtgcgcgttttgacgaccgtgtggtttccgtaccgtccaaatttttcgagaaggcgaagaaggttatccatatcgatgtcgatccttccagcatcgccaaacgcgtgaaggtggacattccgattgtcggcgacgtgaaaaacgttttgtccgagatggttgcgctgtggcaaaaacaagagtccgtgccgtctgaagatgctttgggcaaatggtggaaaaccatagaggaatggcgttcccgagattgcttgtggtttgacaacggcagcgaaattatcaagccccaatatgtgattcagaagcttgccgagattaccggcaattcggcaatcatcacatcggatgtagggcagcatcaaatgtttgcggctcaatattatcccttcgaacgtccgcgccaatggctcaattccggcggtttgggtacgatgggcgtgggtctgccttatgcgattggtgcaaaacttgccgccccggatcaagacgtattctgtattaccggcgacggctcgatccagatgaacatccaagagctgtccacctgtttccaatatcggattccggttaacgtcattacgctgaacaacggttatcttggtatggtacgccagtggcaggaaatatattacggcggtcgagagtcggaaacctatttcgattctttgcccgatttcgtcaaacttgccgaggcatacggccatatcggtatccgcgtggacaagaagtctgatgtggagggtgccttgttggaagcattgaaccaaaaagacaggctggtgtttatcgacttcctgactgaccagaaacagaatgtgatgcctatggtcggcaacggcaaaggtttggacgaaatggtacttccgccgcatatgcgtgcggacggaaaggcgtaa

SEQ ID NO: 39130 - DNA, 1302 bp, Neisseria meningitidis
atggctatttaccaatcaggcgtgatttttgaccaagtggataccgccaatcccgattgctggacattggacgaatacgtcaaacgtggcggttataccgccctgcgtaaaatcctgtccgaaaacatctcgcaaaccgatgtgattgacgaagtcaaaacctccggcttgcgcggtcgtggcggtgcgggcttcccgaccggtttgaaatggagctttatgccccgttctttccccggcgaaaagtacgtcgtttgcaacaccgacgaaggcgagccgggtacatttaaagaccgcgacattattatgttcaacccccatgccctgattgaaggcatgattatcgccggttacgcgatgggcgcgaaagccggttacaactatatccacggcgaaatttttgaaggctaccaacgctttgaggccgctttggagcaggcgcgtgccgcaggctttttgggtaaaaatattttgggttcggattttgaattcgaactcttcgcccaccacggctacggtgcatacatctgcggcgaagaaaccgcattgcttgaatcgctggaaggcaaaaaaggccagccgcgctttaaaccgccattccctgcttcgttcggcctgtacggcaaaccgactaccatcaacaataccgaaactttctcctccgtttcattcattatccgtgacggcggacaggcatttgccgataaaggtattccgaatgcaggcggtaccaaattattctgtatttccggccatgtcgagcgtccgggcaactatgaagtgccattgggcacaccgtttgccgaagtcttgaaaatggcaggcggtatgcgcggcggcaaaaaactcaaagccgtcattcccggcggttcgtccgcgcccgtattgcctgccgacatcatgatgcagacaaatatggactacgactcgatttccaaagcaggctcgatgctgggttctggcgcgattatcgtcatggacgaagacgtgtgcatggtgaaagcccttgagcgcctgagctacttctactacgacgagtcttgcggccaatgtacgccttgccgagaaggcaccggctggctttaccgcatcgtccaccgcatcgtagaaggcaaaggtaaaatggaagatttggatttgctggattctgtcggcaaccaaatggcaggccgcaccatctgcgcccttgccgatgccgccgtcttccccgtccgaagctttaccaagcatttccgtgatgagtttgtgcattacatcgaacacggcggaccgatgaaagagcataagtggggagggtggtaa

SEQ ID NO: 39131 - DNA, 138 bp, Neisseria meningitidis
atgaagattagcgcactcgaccatctggtactgaccgttgccgacattgaccgaaccatcgcgttttacacgcaagttttgggtatggaagaagtttcatttggcaacaaccgtaaggcttgtattttagaagactaa

SEQ ID NO: 39132 - DNA, 357 bp, Neisseria meningitidis
atgttgtccgcttactttcccgtctttgtctttatcctcatcggcctcgcggccggcgtactgtttatcctgctcggcacaattttgggctcgaaacgtcactatgccgaaaaagacgcaccttacgaatgcggttttgaagcctttgaaaacgcaaggatgaagttcgacgtgcgctattacctcgtcgccatcctctttatcttgtttgatttggaggtcgcgtttatgttgccgtgggcagtcgtgttcaaagatttgggcgcgtacggcttctggtctatgctggtgtttatcgtcgttctgacggtaggctttatttacgaatggaaaaaaggtgcgctggaatgggaatag

SEQ ID NO: 39133 - DNA, 756 bp, Neisseria meningitidis
atggattcttttttcaaaccggcagtttgggcggttttgtggctgatgtttgccgtccgccccgcccttgccgacgagttgaccaacctgctcagcagccgcgagcagattctcagacagtttgccgaagacgaacagcccgttttacccatcaaccgagcccccgcccggcgggcgggcaatgccgacgaactcatcggcagcgcgatggggcttaacgaacagcccgttttacccgtcaaccgagtccccgcccggcgggcgggcaatgccgacgaactcatcggcaacgcgatggggcttaacgaacagcccgttttacccgtcaaccgagcccccgcccggcgggcgggcaatgccgacgaactcatcggcaacgcgatgggacttttgggtattgcctaccgctacggcggcacatcgatttctaccggttttgactgcagcggcttcatgcagcacatcttcaaacgcgccatgggcatcaacctgccgcgcacgtcggcagaacaggcgcggatgggtacgccggttgcccgaagcgaattgcagcccggggatatggtgtttttccgcacgctcggcggcagccgcatttcccatgtcggactttatatcggcaacaaccgcttcatccacgcgccgcgcacggggaaaaatatcgaaatcaccagcctgagccacaaatattggagcggcaaatacgcgttcgcccgccgggtcaagaaaaacgacccgtcccgctttctgaactga

SEQ ID NO: 39134 - DNA, 225 bp, Neisseria meningitidis
atggacgcggttcaagagttggaacaccgcatcacagagctggaaatccaatccgcgcttcaggaggacgtaatcgccggcctgaacgcgatggtggcggaattgcggcagacgctggatttgcagcaggctcagttgaggctgctgtatcaaaaaatgcaggacaggaatcccgacacgcaagagccgtattccctgcgcgacgagattccgccgcattattga

SEQ ID NO: 39135 - DNA, 936 bp, Neisseria meningitidis
atgagtgtattgattattgtcgaacacgacaacaaacagttgaatcctaccactttgcatgctgttaccgctgccgctaagctgggtaaaatcgatttattggttgccggaagcggtgcatctgctgtggtagagttcgcaaaacaagtggcgggtgtggaaaaagttttggttgcagatgctgcccattatgccgaaggtttggctgaagagttggctccgctggttgttaaattggcagcggattactgctatgttgcagcaacggcaactacattcggtaaaaaccttttgcctcgcgtagcagccttattagacgtaccgcaaatttctgatttgaccgaaattgtggataacacgacttttgtgcgccccatttatgcgggtaatgcatttgaaaccgtgcaagctgattcagaaaaattggtgctgaccttccgtgcgacggtttttgacgcagtggcggcgcaaggtggtaatgctgaggtaattaatgttgaagcaacccctgcccaaaacctgagtcgttttgttaaccgtcagctttcccattccgatcgtcctgaactgactcaggcaaaagtgattgtttccggtggtcgtgcgttgggtagtgcgggaaaattcaatgaagtgctgacaccgttggcggatgttttaggtgcggcaatcggtgcatcccgtgcggcggttgatgccgaatatgcgccaaacgatgctcaagtcggacaaaccggtaaagtagttgcgccgcaactctattttgcaatcggtatttcaggtgcaattcaacacgttgccggtatgcaagacagtaaggtgattgttgcaatcaataaagatgctgatgcgccgattttcaatgtagccgattacggattggttggcgatttatttgaaatcgttccacaattaacagaagtattgaaaaattga

SEQ ID NO: 39136 - DNA, 1134 bp, Neisseria meningitidis
atgtttaaaaaattcaaactggtactgttgtcattttttgcacttgtatttgccttttggctgggaacgggtattgcctatgagattaatccgcgttggtttttgagcgatacggcaactgaagtacctgaaaatccgaatgcttttgtggcgaaacttgcccgcctgttccgaaatgccgacagggcggttgtcatcgtgaaggaatcgatgaggacggaggaaagtcttgccggaactgtggatgacggtccgttgcagtcggagaaggattatctcgcgctcgctatccggctcagtcgtttgaaagaaaaggcgaaatggtttcacgtaacggagcaggaacatgggaaagaggtttggctggattaccatatcggcgagggcggtttggttgcggtttcgctttcgcaacgctcgccggaagcgtttgttaatgccgaatatctgtatcggaacgatcgtccgttttctgtaaatgtgtacggcggaacggttcacggggaaaattatgaaacgacaggagaatatcgggttgtttggcaaccggacggttcggtatttgatgcgtcggggcgcgggaaaatcggggaagatgtttatgagcattgcctcgggtgttatcagatggcccaggtatatttggcgaaatatcgggatgtcgcgaatgatgagcagaaggtttgggacttccgcgaagagagtaaccggattgcgtcggactcgcgcgattctgtgttttatcagaatatgcgggaattgatgccccgagggatgaaggcaaacagtcttgtggtcggctatgatgcggacggtctgccgcagaaagtctattggagtttcgacaatgggaaaaaacgccagagtttcgaatattatttgaaaaacggaaatctttttattgcacaatcttcgacggtagcattgaaagcggatggcgtaacggcggatatgcagacctatcatgcgcaacagacgtggtatttagatggcgggcggattgtccgcgaagagaaacagggggacagactgcctgattttcctttgaacttggaagatttggaaaaagaggtgagccgttatgcagaggctgcggcgagacgttcgggcggcaggcgcgacctttctcactga

SEQ ID NO: 39137 - DNA, 216 bp, Neisseria meningitidis
  misc_feature 193, 194, 195, 196, 197: 'n' is a, c, g or t
atgaaaggcgaccgtctggttatccgcgagctaaacaaaaacttaggcttgctgctggtaaccatcaaccaatatttccttcacgcccgtattttgaaaaactggggctttgaagaactgggcgaacatttcttcaaacagtccatcgttgaaatgaaagctgccgacgatttgatcgagcgcattctgttcnnnnncacacacttaattaattaa

SEQ ID NO: 39138 - DNA, 654 bp, Neisseria meningitidis
atgaagataacgcactgcaaattaaagaaaaaagtacagaaagaactgctccgtttttttgtgctggaagttaccgcccgttctgccgccgatattttgggtatccatcccaattcggcagcactgttctaccgtaaaatccgcacggttatcaaccatcatttggtcttggctgccgatgaggtttttgagggccctgtcgagccggacgaaagcgatttcggcggacggcgtaaaggcagacgtggtcgcggtgcggcaggaaaagtggttgtcttcggcattctgaaacgcaacggacgggtctataccgttgtggtggataatgccaagtctgaaacgttactccctgtcatcaaaaagaaaatcatgccggacagcattgtttataccaatagtctgagcagctgcgacaagttggacgtgagcggttttatccattaccgcatcaaccattccaaggagtttgcagaccgtcaaaaccacattaacggcattgagaacttttggaatcaggcaaaacgcgtcttgcgaaaatacaatggaatcgatcgcaaatctttcccgctgttcttgaaagaatgcgaatttcgatttaacttcggcacaccgtctcaacagcttaaaatcctgcgggattggtgtgggatttag

SEQ ID NO: 39139 - DNA, 318 bp, Neisseria meningitidis
atgaacaagccgtttatcactcaggcgcagttggcactttataaatatcagccgtctagcaagtattttgggcaatcgatggcggttatagcgcaatctgaatttgttgaatttgcgaagattaataagtctgaaaatgttattgattgtttctcttttttctggaatagaagaattaaacatgatatttggctaatctcattttctgataattcagaaatggtaattaaagaatccctgaaagatggtcataaaatatacaaatttgaattttgcgaaattgtcgataattgcaattttgatgatgtattcgtttga

SEQ ID NO: 39140 - DNA, 732 bp, Neisseria meningitidis
gtgtcgcgcgaaatcaatgcgggcgggcatcatttcctctacggcggcatcagcggcggcggcgtgcattattgggataacaaagatttcagcgaacagtgcctgcacctgtcgctcggctataaaaatcgttcggtaacgcgctcgttcggcatcgtgccgtttgtcgggcaaaacctcttaggcggcagccgatacaatttcgtcggcggctttaatgccgatttctcccaacacttgagcgaacgctggcggttgacactaaacgcgggcaatatgtggaagcattatcaggaagaccgcaccgccgcccgatacgacagccatatgccgctggcgggcgcgacgctgatgtattccgcgccgaaagactggctgctttacggcggtgcggactggtcgcacgacttgacgaaggaggcggaacaggcttccatccgcaagggtttgcgtgtcggagcggtcaaaacgttcgacggcggcttgggtctgcgggcaaacctgcgctacacccgcaggacttttgatgcacccgggacccttgtgtaccgcttcccgcgcaaagaccacgaatatcaggcaaacctgtcgttgtggcacgacaaaatctcttggaagggctttacgccgcaactcaatttccgctatctgaaaatcgacagcaatatgaaaagtttttacacacgcaaaaacatgcagattttcatgagcgtggaaaaggatttcaaataa

SEQ ID NO: 39141 - DNA, 1380 bp, Neisseria meningitidis
atgctgctcgacctcaaccgcttttccttttccgtcttcctgaaagaagtccgcctgctggccgcccttgccctgcccatgctgttggcgcaggtcgcgcaggtaggcatcggtttcgtcgataccgtgatggcgggcggtgcgggcaaagaggatttggcggcggtggccttgggcagcagcgcgtttgccacggtttatattacctttatgggcattatggcggcactgaacccgatgattgcccagctttacggcgcgggtaaaaccggtgaagtgggcgaaacggggcggcaggggatttggttcgggctgtttttggggattttcggcatggtattgatgtgggcggcgattacgccgttccgcaactggctgaccttgagcgattatgtggaaggcacgatggcgcagtatatgttgttcaccagtctggcgatgccggcggcaatggtgcaccgcgcgctgcacgcctacgcttccagcctgaaccgcccgcgcctgattatgttggtcagctttgcggcgtttgtgttgaacgtgccgctgaactatattttcgtttacggcaaattcggcatgcccgctttgggcggcgcgggctgcgggttggcgacgatggtggtgttttggttcagcgcgctggcgttgtggatttatatcgccaaggaaaaattcttccgcccgttcgaactgacggcgaaattcggcaagccggattgggcggtgttcaaacagatttggaaaatcggcgcgcccatcgggctgtcttattttttggaagccagcgcgttttcgtttatcgtgttcttgatcgcgcccttcggcgaagattatgtggcggcgcagcaggtcggcatcagtttgtcggggattctctatatgattccgcaaagcgtcggctcggcagggacggtgcgcatcggcttttcattaggacggcgcgaattttcgcgggcgcgttatatttcgggcgtgtcgctggcgttgggttggatgctcgccgtgattaccgtgctttctttggtattattccgttcgccgctggtaagtatgtacaacaatgatccggcggttttaagcatcgctgccaccgtcctgctgttcgccggcttgttccaaccggcagacttcacccaatgtatcgcctcctacgccttgcgcggctacaaagttacaaaggtgccgatgttcatccacgccgccgccttttggggctgcggtctgctgccgggctacctgctcgcctaccgtttcgatatgggcatttacggcttctggacggcattgattgcctcgctcaccatcgccgccatcgccttggtgtggtgcttggaattgtgcagtagggagatggtcagatcgcataaggtcgtctga

SEQ ID NO: 39142 - DNA, 1647 bp, Neisseria meningitidis
atgaaacactttcacgacttacccgcatggtcgaaattgtggaaccactttgacgacagcaaaacattgcatatgcgcgaaatgttcgagcaagacccgcagcgtgcggaacgctactggctgcaagtcggcggactgacgctggactactccaaaaaccgcatcaacgacgaaaccatgtcgcttttgttcgagttggcgtgtgaagcaggcgtgccggagcggatgcggcagatgttccacggcgaaaaaatcaataccaccgaaaaccgcgccgtcctgcatgtcgcccttcgcaaccgcaccaattcgccgattgtggttgacggtgaagatgtgatgcccaaagtcaaccgcgttttgcaacgtatgggcgaatttgcacacgaagtccgcagcggaagctggctgggctataccaaccaagtcattaccgacgttgtcaacatcggcatcggcggatcggatttgggcccgctgatgatgtgtaccgcgctcaaacctttcggtcatccgcgcctcaatatgcacttcgtctccaacgtggacggctcgcaactgcgcgacgtattgtccaaagtccaccccgaaaccacgctgttcatcatcgcctccaaaacatttaccacgcaggaaacgctgaccaacgcgctgaccgcgcgcgaatggtttttgaatcatgcgggcgacgaagaagccgttgccaaacacttcgccgccgtttccaccaatcaaaaagccgtcgccgaattcggcatcgacaccgccaatatgtttgaattttgggattgggtcggcggtcggtacagcctgtggtccgccatcggattgccgattatgctgtatctcggcgaagaaaacttcattgaaatgctcaacggcgcgcacctgatggaccaacacttcatcaacacaccgctcgagcgcaacctgcccgtcattctcgccctcatcggcatctggtatatcaactactacggcggcggcagccacgtcatcgcgccttacgaccaacatttgcaccgcctgcccaaattcatccagcagctcgatatggaaagtaacggcaaacaggttacgttggacggcaaagcagtcggacacgaaacctcgccgattatctggggcgaaacgggcattaacggccagcacgcctttttccaactgctgcaccaaggcacgcacattacccccatcgacctgattgcctcgcttgaaaaacgcagcaacctgcccggacaccacgaaatcctgcttgccaacgtcttcgcccaagcagaagcctttatgcgcggcaaaacccccgacgaagtccgtgccgaactcaaagcgcagggtatggatgaggcgcgcatcgaagagctggtcccgcacaaaaccttctccggcaaccgcccgaccaacctcattctcatggacaaggtcaacccgcgcaatatgggcagcctgattgccatgtacgaacacaaaaccttcgtacaaggcatcatttggggcatcaacagcttcgaccagtggggcgtggaactcggcaaacaactggctaaaaccattttgggcgaactgaccggcgaaaccgggccgcaaaagcacgacagttcgaccgaacgcctgatcaacctctacctgcagaccaaccgcaaataa

SEQ ID NO: 39143 - DNA, 477 bp, Neisseria meningitidis
atggaacacctatttgggaaatggctgcccgacttgcccacccccatttcagacggcatcagcctgccgatggtgcggctgctgcacacccggtcgctgaccgccgcattgcgcgccttgccgcatacattttcggtggaactgctgaaactgggcgaattggagacggaatgcggagggaggctggtgcgcgaagttttgttgaagctggacggtatccctgttgtcgcggcaaggagcgagtgccgtatcggttcggcgttttggcaaaacattttggactgcggcacgcgtcctttgggcgaacgtctgtttcaagccgatttggaaggggcgcgttcggcgtttgagtttgccgttttcggcgaaggatgcggacggtactttgccgctcggcgttcgcggttttcccatcacggcgaggaaatgctgctgaccgagtattttctgcccgaactgaaacgctttatcggataa

SEQ ID NO: 39144 - DNA, 1692 bp, Neisseria meningitidis
atgagcgcatcacaattactgtcaagactgacccaaaccgtaggcgaaaaatacatcatcaccgaccccgcgaaaaccgaacaataccgccaaggctaccgcttcggcgagggtaaggcgttggcggtggttcgccccggaagcattctggaaatgtggaaaattctgcaggcgtgcgtcgaagcagacgtgattgtgattacgcaggcggcgaataccggactgaccggcggttcgacccccgacggcaacgattacgaccgcgacatcgtgattgtgaacaccatgcggatgaacatcatccaaaccatcaacaacaacgaacaagtcgtctgtctgcccggttcgaccctgaaccagcttgaattgctgctgaaacctttggggcgcgaaccgcattcggtcatcggctcatcctgtatcggcgcgtccgtcttgggcggcgtgtgcaacaactccggcggcgcgttggtacagcgcggcccggcctacaccgaaatggcgttgttcgcccaaatcaacgaagaaggcaggttggaactggtcaaccacttgggcatagacttgggcgacacgcccgaagaaatcctgaccaacctgcaaggtcatcattatcaaaacaaagacatcaaacaagacgcgggcaaaggacacgaccacgcctattgcgaacacgtccgccaagtggacgaaccgaccgccgcgcgtttcaatgccgaccccgcccgccattacgaagcctcgggctgcgcgggcaaactgatggtttttgccgtccgtttggacaccttcccgcaagaaaaacaaaccgccgtgttctacatcggcacgaacgacatcaacgagctgaccgacatccgccgcgccgccttgggcgaatttgaaagcctgcctgtttccggcgaatacatccaccgccacgctttcgatattgccgacgtgtacggcaaagacacgttttacgtcatcaaaaaattcggtacgcaccaactgccgaaattatttgacttgaaggcgcgcgtggacaggttcggcaaaaaagccagcttcctgcccaaacatttttccgacaaggccatgcagttcgtcagcaaatacctgcccgaccacctgcccaaatccatgcgcgattaccgcgacaaatacgaacaccacctgattctgaaaatgggcgggaaaggcgtggatgaggcgcgcgcgttcttaaaagaatattttgcacaccacagcggcgcgtttttcgagtgcaacgccgaagaaacccaagccgcgatgctgcaccgtttcgccgtcgcctccgccgccatccgctaccgcgccgtgcatgatgacgaagtggaagacttggtcgcgctcgacatcgccctgcgccgcgacgatcgcgactggtttgaaaaactgccgtcggaaatcgacaataaaatcatccataaactctactatggacatttcatgtgccacgttttccatcaggattacatcatcaaaaaaggcaacgactgcatggcgttggaacacgaaatgctgcatcttttagaccaacgcggcgcgcaatatcccgccgaacacaacgtcggtcatttgtatgaagccaaacccgcgctcaaacagttttaccgcaaacttgacccgaccaacagcttcaacccgggcgtaggcaaaaccagcaaaaagaaaaactgggcggaataa

SEQ ID NO: 39145 - DNA, 402 bp, Neisseria meningitidis
atgcagcaacatattgaaaagtggcagcacttaagccgtgaagaacagaaaatccttgccgaagtatggggtctcgtgcaaaacgatgatcaggaggttcactatgaaatgcttaaattgaacgcacccgacgaagccagcggcgaattttggttcagaatggcagaaacactcagcaccctgccgcccaaccgttccctcgaccttagaatgaacggcggcaggctggcgaccgccgtatccatcctttccgtcatgattgaagacaatcccgacataccgcagctttgggcgcaaaaaattaccgcgctcaattatagtggattaaatttaaaccagtacggcgttgcctcgccttgtcgtactatctgtactgtctgcggcttcgtcgccttgtcctga

SEQ ID NO: 39146 - DNA, 657 bp, Neisseria meningitidis
atgaaaaacaaaaccaaagtttgggacctccccacccgccttttccactggctgcttgccgcgtccctgccctttatgtggtatagcgcgaaagccggcggcgatatgctgcaatggcacacgcgcgtcgggctgttcgtccttttcctgctcgtatttcgcctctgctggggcatttggggcagcgataccgcccgtttttcccgtttcgtccaaggctgggcaggcatacgcggctatctgaaaaacggtattcccgaacatatccagcccggacacaaccccttgggcgcactgatggtcgtcgcgcttttggtcgccgtctcatttcaagtcggcacggggctttttgccgccgatgaaaacaccttcagcaccaacggctatctcaaccatttggtttccgaacatacgggcagccttatgcggaaaatccacctcaactttttcaagctgctcgccgttttttccgccattcatatcgccgccgtcgccgcataccgcgtgttcaaaaagaaaaacctcgtcctcccgatgataaccggcttcaaatacatcgaaggcaaaacctcaatccgctttgccggcaaaaccgcgcttgccgccgcattatcggttgccgcgcttgccgcagccgccatcctgctcctgtcctga

SEQ ID NO: 39147 - DNA, 1194 bp, Neisseria meningitidis
atgaattccaaacacctcatcgcattttccgccctgttcgccgccacgcaggcagaagccctgcccgtcgcctccgtcagcctcgacaccgttaccgtttccccgtccgccccctacaccgatacaaacgggctcttgaccgactacggcaatgccgccgcctcgccttggatgaaaaaactccaatccgtcgcacaaggcagcggcgagaccttccgtatcctgcaaatcggcgactcgcataccgccggcgacttctttaccgacagcctgcgcaaacgcctgcaaaaaacttggggcgacggcggcataggctgggtttaccccgccaacgtcaaagggcagcgcatggcggccgtccggcacaacggtaactggcaaagcctcaccagcaggaacaacaccggagacttcccgctcggcggcatcctcgcccacaccggcagcggcggcagcatgaccctgaccgcatcggacggcatagcaagcaagcagcgcgtttccctgtttgccaaacccctgcttgccgaacaaaccctgaccgtcaacggcaacaccgtctccgccaacggcggcggctggcaggtactggatacgggcgcggcactgcccctgaccatacacaccgaaatgccgtgggacatcggcttcatcaacatcgaaaatcccgccggcggcattaccgtttccgcgatgggcatcaacggcgcacaattaacccagtggtcgaaatggcgtgccgaccgtatgaacgaccttgcccaaaccggcgccgatctagtcatccttgcctacggtaccaacgaagccttcggcgacaacatcgacattgccgacactgaacaaaaatggctggataccgtccgccaaatccacgacagcctgcctgccgccggcatcctcatcatcggcgcgcccgaatccctgaaaaacacgctcggcgtatgcggcacacgccccgtccgcctgaccgaagtccaacagatgcagcggcgcatcgcccgtcaggggcagacgatgttctggtcttggcaaaacgcgatgggcggcgtttgcagcatgaaaaactggctcaaccaaggatgggccgccaaagacggtgtacacttctccgccaaaggctaccggcgcgcggcggaaatgctcgccgacagcctcgaagaactcgtccgcgccgccgcaatcaggcaataa

SEQ ID NO: 39148 - DNA, 693 bp, Neisseria meningitidis; identical to SEQ ID NO: 37236

SEQ ID NO: 39149 - DNA, 171 bp, Neisseria meningitidis
ttgagcatttgggcggacaaccctgaagaagccagggcgaaatttcgggctgcacgagaaaatgcgcactatgacggcgaagttgtagcaaaggtttatacatttgtaaatatttcgtgggttaagaaattgtacaagcggacaaaatatttaatgggtatcaaagaatga

SEQ ID NO: 39150 - DNA, 1746 bp, Neisseria meningitidis
atgttgattaagagcgaatataagcctcggatgctgcccaaagaagagcaggtcaaaaagccgatgaccagtaacggacggatcagcttcgtcctgatggcaatagcggtcttgtttgccggtctgattgctcgcggactgtatctgcagacggtaacgtataactttttgaaagaacagggcgacaaccggattgtgcggactcaaacattgccggctacacgcggtacggtttcggaccggaacggtgcggttttggcgttgagtgcgccgacggagtccctgtttgccgtgcctaaagagatgaaggaaatgccgtctgccgcacaattggaacgcctgtccgagcttgtcgatgtgccggttgatgttttgaggaacaagctcgaacagaaaggcaagtcgtttatctggattaagcggcagctcgatcccaaggttgccgaagaggtcaaagccttgggtttggaaaactttgtatttgaaaaagaattaaaacgccattacccgatgggcaacctgtttgcacacgtcatcggatttaccgatattgacggcaaaggtcaggaaggtttggaactttcgcttgaagacagcctgcatggcgaagacggcgcggaagtcgttttgcgggaccggcagggcaatattgtggacagcttggactccccgcgcaataaagccccgaaaaacggcaaagacatcatcctttccctcgatcagaggattcagaccttggcctatgaagagttgaacaaggcggtcgaataccatcaggcaaaagccggaacggtggtggttttggatgcccgcacgggggaaatcctcgccttggccaatacgcccgcctacgatcccaacaggcccggccgggcagacagcgaacagcggcgcaaccgtgccgtaaccgatatgatcgaacccggttcggcaatcaaaccgtttgtgattgcgaaggcattggatgcgggcaaaaccgatttgaacgaacggctgaatacgcagccttataaaatcggaccgtctcccgtgcgcgatacccatgtttacccctctttggatgtgcgcggcatcatgcagaaatcgtccaacgtcggcacaagcaaactgtctgcgcgtttcggtgccgaagaaatgtatgacttctatcatgagttgggcatcggtgtgcgtatgcactcgggctttccgggcgaaactgcaggtttgttgagaaattggcgcaggtggcggcctatcgaacaggcgacgatgtctttcggttacggcctgcaattgagcctgctgcaattggcgcgcgcctataccgcactgacgcacgacggcgttttgctgccggtcagctttgaaaaacaggcggttgcgccgcaaggcaaacgcatattcaaagaatcgaccgcgcgcgaggtacgcaatctgatggtttccgtaaccgagccgggcggcaccggtacggcgggtgcggtggacggtttcgatgtcggcgcgaaaaccggcacggcgcgcaagttcgtcaacgggcgttatgccgacaacaaacacatcgctacctttatcggttttgcccccgccaaaaacccccgtgtgattgtggcggtaaccattgacgaaccgactgcccacggttattacggcggcgtagtggcagggccgcccttcaaaaaaattatgggcggcagcctgaacatcttgggcatttccccgaccaagccactgaccgccgcagccgtcaaaacaccgtcttaa

SEQ ID NO: 39151 - DNA, 1143 bp, Neisseria meningitidis
atgaatactttatatacacttttcgccacctgcccgcgcggcttggagaccgttttatctcaagaactcgaaagcctcggctgtaccgatgtacaagtgtttgacggcggcgtttcctgccggggcggattggaacaggtttacgccgccaacctgcactcgcgtaccgccggccgcatcctgctacgcctgaccaaaggcacataccgaaccgagcgcgacatttacaaacttgccaaaaacatcaactggttcaactggtttaccttgcagcagacgttcaaagtcaaaatcgaggcaaagcgtgccaacgtcaaaagcctccaatttgtcggactgaccgtcaaagatgccgtctgcgacgctttccgcgacatttacgacgcacgtccgagcgtggacaaagccgcgcccgatgttcgcatccacgcctttttggacgaacgcaatgtcgaaatcttcatcgacacttcgggcgaagccctgttcaaacgcggctaccgtctcgataccggcgaagccccgctgcgcgaaaaccttgccgccggattgctgctctcggcaggctacgacggcacgcagccgtttcaagacccgttttgcggcagcggcacgattgctatcgaagccgcttggattgccgcccgccgcgcgccgggtatgatgcgccgtttcggttttgaaaaactgcaaaatttcgataaaacgctgtggtcggatttgcgccgccgtgccgaagcgcaggttaaaccggcttttgcaccgatttcgggcagcgacagcgaccgccgcatcattcagacggcattggccaacgcacgcagtgccggggtggacgacatcgtttccttcagcgttgccgacgcgcaatccgtccgtccgaacggcgtgggcggcattatggtgtccaatccgccctacggtgtgcgccttgaggaagtccgcgctttgcaggcactgtatccgcagttggggacgtggttgaaaaaacactatgccggctggcaggtcggtatgtttaccggcgacagggaaatgcccaaattcatgcgcctgtcgcccaagcggaaaattccgctttataacggcaacctcgactgccgcctgttcctgattgatatggtgcagggatcgaaccgttga

SEQ ID NO: 39152 - DNA, 462 bp, Neisseria meningitidis
atgtctgatttttcccccatttcccgatttcttgccgacgaagccgccacactcgatttgggcgcggcgtggtcttcccgtttaaacgcaccgctggtcatttatctcgaaggggatttgggtgcgggcaaaaccacgctgacacgcggcatcctgcgcggattgggtcatcagggcgcagtcaaaagcccgacctacgccatcgtcgaatcttatccgctggaacgcttcaccctgcaccatttcgacctctaccgcttctcgttccccgaagaatgggaagacgcggggcttgacgaactgtttgccgcaaacagcgtctgcctgatcgaatggccgcaacagggaggcgaatttaccccgcccgccgacatcaccgcaacattgacacacgacggcgacggcagaaaatgcctgctgaccgcccataccgaacgaggacgcgaaagcctgccgctatga

SEQ ID NO: 39153 - DNA, 492 bp, Neisseria meningitidis
atgaaataccgtcgtttttaccgcaatggcggcacttacttttttacggttgtaaccaataaacggcagaagattttgaccgatgatgcggtgcgtttggctttacggcaggcggtaatggcggtgcgcgaacggtatccgtttgaaattttggcatgggtgttgatgcccgaccatctgcataccatatggcggctgccggacaatgattctgcttattcggaacgctggcggcaaatcaagcggcacagccaatatttaatcggcggcaatctcaggctttggcaaaaacgcttttgggaatatactatccgcgatgaggccgattttgcctggcattttgattatctgcatttcaatccggtcaaacatggctatgtaggacaaatttccgattggcggttttctacgtttcaccgttatgtcaaacagggtatttatccgcataattggggtggcggcaatgcggacttttctattggatacgattga

SEQ ID NO: 39154 - DNA, 870 bp, Neisseria meningitidis
atgaaaccgataaaaaaagccgtcttccccgtcgcagggatgggaacacgcttcctgcccgccaccaaggccagcccgaaagaaatgctgcccatcgtcgacaaaccgctgatccaatacgccgtagaagaagccgtggaagccggctgcacggaaatggtgtttgttaccggacgcaacaaacgcagcatcgaagaccatttcgacaaggcatacgaactcgaaaccgagttggaaatgcgccataaagacaaacttctggaacacgtccgcaacatcctgccaccgaacattacctgcctctacatccgtcaggcggaagcactgggcttgggacacgccgtcttgtgcgcccgtgccgccatcggcgacgaacccttcgccgtgattttggctgacgatttaatcgatgccccaaaaggcgcgctcaaacaaatggtcgaagtgtacgaacgcagcggcaacagcattttgggcgtagaaactgtcgaaccgtcgcaaaccggctcatacggcatcgtcgaaaccgaacagctcaaacagttccaacgcattaccggcattgtcgaaaaacccaagcccgaagacgcgccctccaaccttgccgtcgtcggacgctacatccttaccccgcgcattttcgacctcttaaccaatcttccgcgcggcgcgggcaacgaaatccagcttacagacggcatcgccaagctgctcgatcacgaatttgtcctggcgcacccctttgaaggcacgcgctacgactgcggcagcaaactgggctacctcgaagccaccgtcgcctacggcctgaaacaccccgaaaccggcgaacccttccgccgccttttggaaaaataccgtaccgaataa

SEQ ID NO: 39155 - DNA, 282 bp, Neisseria meningitidis
atgatgattgtttctttcaaacacaaagggcttgaacgcttttttaaaacaggctcgctatcgggcatccaagccgggcattccgtcaaactgaatctgcttctaaccgcgctgaatgccgcgcaaacgccttcggatatggctgtgccgagttggaatcttcatcccctcaagggcagtttgtcgggacattgggcggttaaagtcaacggaaattggcgtttgacttttcgtttcaacgacggcaatgccgaagttgtcgattatcaggattatcactag

SEQ ID NO: 39156 - DNA, 780 bp, Neisseria meningitidis
atggcagcctcgcccgaagcaaaattcactgaagaaaagattttgtgggtcaaacaccacacgccgaaactcatcactttcgccatcagccgtcccgaatcctaccgttttaaagcgggacagttctcccgactcggtttctacgaaggggaaggctttatttggcgtgcctactccatcgtttccgcagaatatgccgacacgctcgaatattttgccgtactcatccaagacggccccatgtctgcccgtttcgccaaaatgcaacagggcgacaccatcctgctcgataaaaatgccaccggcttcctgcttcccgaacgcttccccgacggcaaggatttggtgatgctctgcaccggctccggcatcgcccccttcctttccattctcgaacaacctgaaatccggcagcgtttcgataccgtcaacctgatacattccgtatcttttcccgaagaattgattttcaacgaccggctcgccgcattgaccgaacatcccctggtaggcgaatacggacactcgttccgtttcctccctgttaccacccgtgccgccaacccctcgggcttaagcggaaaacgcattccggaactcttaaaaaacaacagcatcgaacaggcgctgcataccaagttcaccccggaatccacacggtttatgatttgcggtaacccggacatggtcaaagacactttccaaacgctgcttgacatgggttacgccatgcaccgcaaccgcattcccggtcaaatcatgatggaaaacggcttctaa

SEQ ID NO: 39157 - DNA, 687 bp, Neisseria meningitidis
atgtacgcatttaccgacgcacagcaacagaaggcactcttccggctggtgctttttcatatcctcatcatcgccgccagcaactatctggtgcagttccccttccaaattttcggcatccacaccacttggggcgcgttttcctttcccttcatcttccttgccaccgacctgaccgtccgcattttcggttcgcacttggcacggcggattatcttttgggtcatgttccccgcccttttgctttcctatgtcttttccgttttgttccacaacggcagttggacgggcttgggcgcactgtccgaattcaacacctttgtcggacgcatcgcgctggccagctttgccgcctacgcgctcggacaaatccttgatatttttgtgttcaacaaattacgccgtctgaaagcgtggtggattgccccgaccgcatcaaccgtcatcggcaacgctttggatacgctggtatttttcgccgttgccttttacgccagcagcgatggatttatggcggcaaactggcagggcatcgccttggtcgattacctgttcaaactcaccgtctgcggtctgtttttcctgcccgcctacggcgtgattctgaatctgctgacgaaaaaactgacgaccctgcaaaccaaacaggcgcaagaccgccccgcgccctcgctgcaaaatccgtaa

SEQ ID NO: 39158 - DNA, 279 bp, Neisseria meningitidis; identical to SEQ ID NO: 38900

SEQ ID NO: 39159 - DNA, 888 bp, Neisseria meningitidis
atgccctaccaacaaatcaccatcaacgtcaacgatgccgtcgccgaacgcctcgccgacgcgctgatggaacacggcgcactctccgccgccatcgaagatgcctacgccggcacgcaaaacgaacaggcgattttcggcgaacccggtatgcccgccgaacaaatctggcagcagagcaaagtcatcgccctgttcggcgaacacgacgaagccgccgccatcatccaaatcgccgcacaagaatgcgggttaaaagacttggcatacaccggcgaaaccatcgaagaccaagactgggtgcgtctcacgcaatcgcaattcgaccccatccgaatttccgaccgcctgtggattaccccctcttggcacgaagcccccgaaggcactgccgtcaacctacgcctcgatcccggcctcgccttcggcactggcagccacccaaccacgcgcctctgcctcaaatggctggatacgcaactcaaaaacggcgaaagcgtcctcgactacggctgcggttcgggcatcctgaccatcgctgccctcaaactcggcgcaggttctgccgtcggcgtcgatattgacgaacaagccgtccgcgccggcaaggacaacgccgaacaaaacaacgtcgatgcacaattcttcctgcccgacggcctgcctcaagggcaattcgacgtagttgtcgccaacatcctcgccaaccctttacgtatgctcggcgaaatgctcgccgcccgcaccaaacaaggcggccgcatcgtgttatccggtttgttggacgaacaagccgaagaactcggcggcatttacagccaatggttcgatctcgacccggcggaaaccgaagaaggctgggcgcgcttgagcgggacaaaacgctga

SEQ ID NO: 39160 - DNA, 1074 bp, Neisseria meningitidis; identical to SEQ ID NO: 38263

SEQ ID NO: 39161 - DNA, 360 bp, Neisseria meningitidis
atgtattttgttgaccgcaccgcagtcgtcctcaagccgaccgcccgttttttagaatggctcaaatctgctgatgaaaacatgcccgatctgactgtcgaacagatccgtctcaactgttccgtcttcctcgttccgcagttcgacgaaccggaagccgtcgtttcctatttcgacgaacgctaccgccagatttttgaagccgaactcgccggctgggacatcgacaaggataaatggccgcaagatatggggctgaaggcgttttgggaatttttcgacatcgaaatccacgatatggtgttggatatggaagaagcggatttgaacatcacgcccgtgttcgacaatatgatgtaa

SEQ ID NO: 39162 - DNA, 1143 bp, Neisseria meningitidis
atgcagaaatggcaaaccgagctttattccacaccgctttggctttgcctgacaccgaaaagcacggtcaaagtcttgctgctgattacggtaatggttacgctgctgttgaccgaagtacggctgaatgtgttgagtacctttatgtccaaaggactttacgactcgatgcaggatttgaacgcctccgcgttttggatgtttgccgcgatgaacgcgggcgtggtgctgatacgggcgtttaacaatgtcgtcaacgacttcctcgatcaaggcttggcgattaaatggtcggagcagctcaatgaagtgctgacgacgcgctggcttgccgacaaaaactactaccgcctgcaaatgcgccgccacgcgccggacaacatcgaccaacgtatccaacaggacgcgcaggatttcatcgcttcgaccatcgaatttgtacgcggcatggtcaattcggtcgttacctctttggaatttgccgttgttttgtggggcttggctggcatcctgaccgtgttcggcttcgacattccgcgcggcattgtttggctcgtctttatttttgtgattttggcgacctttatcgcgatgtggataggcaaccccttgattcgttacaactatgaaaacgaaaaactcaacggcgactaccgttattccctcatccgcgtacgcgaccacgccgaaagcgtagcgttttacaacggcgaacaacacgaacacggccggctttccgaccgctttaaagccattatccgcaaccgttggcgcatcgcgcggcaaagcgtctgcttaagcggctttaacgatatgttcaccaacggcatcaaactcttccccattattttgcaagcgccgcgcctgtttgccggacaaatcaaaatcggcgacatccagcagaccgtccaagcctttgcgcgactgcaaaacgcgctatcttttttccggatgttctacaacaaattcaccgcctaccgcgcccgattggagcgtctgtacggctttttgctgagtaccgaagaacaacacagcgcgcggcaacccgagattagcgaagtttcagacggcattgcactggaatgtaaggcggcggcagcttttgcacgaattggcggcagcttttgcaccgccgaagcgtag

SEQ ID NO: 39163 - DNA, 888 bp, Neisseria meningitidis
atgtacacaggacgtttcgcccccagcccgaccgggctgctccacatcggctcgctgctgaccgccgccgcttcctatgccgatgcacgctcaaacggcggcaaatggctggtccgcatggaagacctcgatccgccgcgcgaaatgccgggggcggcaagccatatcctgcacacgcttgaggcattcggattcgagtgggacggagaagtcgcctatcagagccgccgttacgccctgtatgaagaaaccctatgccgtctgaaaaccgccggactggtctatccctgccattgcagccgcaaagactggcaggctgcggcagtccacggcgcagacggattcgtctataacggacgttgccgcaatccgcagcaacgccctgcaccgcaaggcaaacagcctgcgtggcgcatccgcgtccccgaccgcgacatcggcttttcagacggcatcgtcggcggttacgcccaaaacctcgcccgcgacatcggcgatttcgtcctgcttcgtgcagacggttactgggcataccagctcgccgtcgttgccgacgatgccgaacagggcgttacccacatcgtccgcggacaagacctgctcgtttccacgccgcgccaaatctatttgcagcagtgtttgggcgttccgacaccgcaatatgcccacctgccgctgctgaccaacgcacaagggcagaagtggtcgaaacagacgctcgcccccgcattggatttaaaccgccgcgaacaactcctccgccaagtgttccgttacctcaagctgcccgaagcaccggaaaccgaccgccctgccgaactgctcgactgggcggtggcacactgggatatgggcaaagtgccgaaacacgccattaccaccccctaa

SEQ ID NO: 39164 - DNA, 1476 bp, Neisseria meningitidis
atgatcagcaaacaagaataccaagcccaagccgctcaaggctacaaccgcatcccgctcgtgcaagaactccttgccgatttggatacgccgctttccctctatctcaaactcgccaaccgcccctatacctacctgctcgaatccgttgtcggtggcgaacgtttcggccgctattcttttatcggcctgccttgcagccactatctcaaagccagcggcaaacacgtcgatgtttatcaaaacggcgaaattgtcgagcaacacgacggcaaccccctgccctttatcgaagccttccacaaccgcttcaaaacacccgaaatcccaagcctgccgcgctttaccggcggactggtcggctacttcggttacgaaaccatctacaattttgaacacttcgcccaccgcctgaaaaacaccaccaaagccgacccgctcggcacgcccgacatcctcctgatgctctcgcaagagcttgcagtagtggataacctaagcggtaaaatctacctgattgtttacgccgatccgtcgcagcccgacggctacgaacgcgcacgcgaacgcctcgaagacatccgtacacagttacgccaaagttgcgccatcccgctttcgctcggcagcaaacacaccgaagccgtcagcgaattcggcgaagagccgttcaaagcctgcgttaacaaaatcaaagactacatctttgcaggcgactgcatgcaggttgtccccagccagcgcatgagcatggaattcaccgacagctcgctcgccctctaccgcgccttgcgcacgctcaacccttcgccttatctcttctactacgatttcggcgatttccacatcgtcggctcctcgcccgaaatcctcgtccgccgcgaacgcgacgatgtcatcgtccgccccatcgccggcacgcgcctgcgcggcaaaacccccgccgaagaccttgccaacgaacaagatttgttaagcgatgccaaagaaatcgccgaacacgtcatgttgattgacttaggacgcaacgacgtcggccgcatcagtaaaaccggcgaagtcaaagttaccgacaaaatggtgattgaaaaatactcccatgtaatgcacatcgtttccaacgtcgaaggccgtctgaaagacggcatgaccaacatggacatcctcgccgctaccttccctgccggcacactctccggcgcacccaaagtccgcgccatggaaatcatcgaagaagtcgaaccaagcaaacgcggcatctacggcggtgccgtcggcgtatggggtttcaacaacgacatggatttggcaatcgccatccgcaccgccgtagtaaaaaacaacacgctatacgtccaaagcggcgcgggcgtggttgccgactccgatccggcctccgaatggcaggaaacacaaaacaaagcccgagccgtcatacacgccgcgcagatggtgcaggaagggttggataaatga

SEQ ID NO: 39165 - DNA, 702 bp, Neisseria meningitidis
atgagcgcgcgcgaaaatattttggcaaaactgaaaaaagccgacgcattgccgatggaagaacctgcggtttttgattattaccgtgaaatgggtgtttcttggggcagcgaagttgagcgtctgaaacattgggctgccgcaatgcgcgcggtcaaaaccgaaatttattgggtgacgaaaagcaattggatgcaggttttccgcgaagcggcagaaggcaagggtttgaaaaacatcctgctgcccttggcgaccgaacacggacaaattgcccgtgccgcattggcggacagcaatatcgaaccgattgccttcgagcgcgaaatcgatacttggaaaaccgagtttttcacgaacatcgatgcgggcttcagcggcgcgcaatgcggcatcgcccgcaccggcacgctgatgctgttttccagccccgaagaaccgcgtactttgagtctcgttccgcccgtgcatttctgcctgttcgatacgtccaagatgtacaacgagtttcataatgccgtcgaaggcgaaaaactggtggaaaacggtatgccgaccaatgtattcctgatttccggtccgtccaaaaccgcagacatccaactgacgcttgcttacggcgcgcacggtccgcgtgatttggttatcctcgccatcctgcccgaccacatttcccctaccgatttggaggaaaacgcatga

SEQ ID NO: 39166 - DNA, 1176 bp, Neisseria meningitidis; identical to SEQ ID NO: 38512

SEQ ID NO: 39167 - DNA, 2208 bp, Neisseria meningitidis
atgtttcccgaccaatccgcccccaacctcctgcaaggcttgaatcccgaacaactctccgccgtaacctggccgccgcaatccgcccttgtgctggcgggcgcgggcagcggcaaaacgcgcgtgctgaccacgcgcatcgcatggcttttgcaaagcggacaagccagcgtgcatagcattatggcggtaacgtttaccaacaaagccgccaaagaaatgcagacccgtttgggcgcaatgattcccgtcaacgtccgcgccatgtggctcggcacgttccacggcctctgccaccgctttttgcgcctgcaccaccgcgacgcaggcctgccgtcttcctttcaaatcctcgacagcggcgaccagctttccctcatcaaacgcctgctcaaaagcctcaacatcgccgaagaaatcatcgcgccgcgttcgctgcaaggctttatcaacgcgcaaaaagaatccggtttgcgcgcttccgtcttgagcgcgcccgacccgcacacaagccgcatgatcgaatgctacgccgaatacgacaaaatctgccaacgcgaaggcgtggtcgatttcgccgagcttatgctccgcagctacgaaatgctgcaaagcaacgaaatcctgcgccagcattaccaaaaccgcttcaaccacattctcgtcgacgagttccaagacaccaacaaactgcaatacgcctggctcaaactcatggcgggcggaaacgcagcggtatttgccgtcggcgacgacgaccaaagcatttaccgtttccgtggcgcaaacgtcggcaacatgaccgcgctgatggaagaattccacatcgacgcgcccgtcaaactcgaacaaaactaccgctccgtcggcaacatccttgccgccgccaatgccgttatcgaaaacaacgacgaacgactcggcaaaaacctgcgcaccgacgccgaagcaggcgacaaaattcgctactactccgcctttaccgacctcgaagaagcccggttcatcgtggacgaaaccaaagccctcgaacgcgaaggctgggatttggacgaaatcgccgtcctctaccgtagcaacgcccaatcccgcgttatcgaacaaagcctgttccgcagcggcatcccctacaaaatctacggcggcttgcgcttttacgaacgccaagaaatcaaacacgccctcgcctacctgcgcctcgccgtcaatcccgacgacgacaacgccctcttgcgtgtcatcaacttcccaccgcgcggcatcggtgcacgtaccgtcgaaaatcttcagacggcatcgcaagagcaaggcgtttcactttggcaggcagcctgcaatgccggcgcaaaagccgccaaagtcgccgccttcgtccgcctcattgaagccctgcgcaaccaagtcggacaaatgcccctgcccgaaatcatcgccggcatcctcaaagacagtggcttgaccgaacactaccgcacccaaaaaggcgacaaccaagaccgtctcgacaaccttgacgaactcgtcaacgccgccatcgagttcaaacccgaagacagcaactttgaaaccctgcctgaaaacatttcagacgatcccgccttccccatcctcgctttcttgagcaacgccaccctcgaatccggcgaaaatcaagcaggtgcaggcgaaaaagccgtccaactcatgaccgtccacgccgccaaaggcttggaatttaacgccgtcttcctcaccggcatggaagaaagccgcttccccagcgaaatgagtctcgccgaacgcggcggcctcgaagaagaacgccgcctcatgtacgtcgccatcacccgcgcccgcaaacgcctctacatcaccatggcgcaacaacgcatgctgcacggacaaacccaattcggcatcgtctcccgcttcgtcgaagagatcccacccgaagtattgcactacctgtccgtcaaaaagcctgcctacgacagttacggcaacacgcgccaaaccgccgcatccaaagataaaatcatcgacgactacaaacagccccaaacctacgcaggtttccgtatcggacaaaacgtccgccacgccaaattcggcaccggcgtgattatcgatgccgcagataaaggcgaatccgcccgactgaccatcaatttcggcaaacagggcgtgaaagagttggacaccaagtttgcgaaattggaagagatgtag

SEQ ID NO: 39168 - DNA, 1338 bp, Neisseria meningitidis
atgactttccaaaacaaaaaaatcctcgtcgccggacttggcggcacgggtatttccatgattgcctacctgcgcaaaaacggcgcggaggttgctgcgtatgatgcggagctgaagccggaacgcgtgtcgcaaatcggtaagatgtttgacgggctggtgttttacacgggccgtctgaaagatgcgctggacaacggtttcgatattctggcgctcagtcccggcatcagcgagcggcagccggatatcgaggcgttcaagcaaaacggcggacgcgtgttgggcgacatcgaattgctggcggacattgtgaaccgccgcggcgacaaggtaattgcgattaccggcagcaacggcaaaaccacggtaacgagcctggtcggctatctctgtatcaagtgcgggctggataccgttatcgcgggcaatatcggcacgccggttttggaggcggaatggcagcgcgaaggcaaaaaggcggacgtgtgggtgttggagctttccagcttccaactggaaaacaccgaaagcctgcgcccgactgcggcgacggtgctgaacatttccgaagaccatctcgaccgctacgacgacttgctcgactacgcgcataccaaagccaagattttccgtggcgatggcgttcaggttttgaattcagacgacgtgttctgccgcgccatgaaacgggcagggcgtgaagtgaaatggttttcgttggaacacgaagccgatttttggttggaacgcgagacaggccgcctgaaacaaggcaatgaagatttgattgccacgcaagatattccgttgcaaggcttgcacaacgccactaacgtgatggctgccgttgccttgtgcgaagccgtcggtttgccgcgaaatgaattgctcgaacacgtcaaaaccttccaaggcctgccgcaccgcgtggaaaaaatcggcaagaaaaacggcgtggtattcattgatgacagcaaaggcacgaatgtcggcgcgaccgccgccgcgattaccggtttgcaaaatccgctcttcgtgattttaggcggcatgggcaaagggcaggacttcacgcctctgcgcgatgcgcttgccggcaaggcaaaaggcgtgttcctgatcggtgtcgatgcgccgcaaatccgccgcgatttggacggctgcgatctgaatatgaccgactgcgccactttggaagaagcggttcagaaggcatatgcccaagccgaagcgggcgacatcgtgttgctcagccccgcctgcgcaagcttcgatatgtttaaaggctatgcgcaccgttcggaagtgtttatcggggcgtttaaggctttgtga

SEQ ID NO: 39169 - DNA, 297 bp, Neisseria meningitidis
atgcgcaaagcctgccgcaaccgtccgctggcggaagtgcaaaccaaacgtaaccgatatttgtcgaagacccgttatgtggtcgaacagagcttcggtacgctgcaccgtaagttccgctatgcgcgggcagcctatttcggactgattaaagtgagtgcgcaaagccacctgaaggcgatgtgtttgaaccttttgaaagcggccaacaggctaagtgcgcccgctgccgcccaaaaggcgaccggatgcctgattatcgggtatccggggaggattaagggggtatttgggtag

SEQ ID NO: 39170 - DNA, 1185 bp, Neisseria meningitidis
atgacaccacaagtcctgaccatattaggcagtaccggcagcataggcgaaagcacgctggacgttgtctcccgccaccccgaaaaattccgcgtattcgcgctggcagggcataagcaggtcgagaaattggcggctcaatgtcaaacgttccgccccgaatatgccgtcgttgccgatgcggaacacgccgcccggcttgaagccctgttgaaacgcgacggcacggcgacgcaggttttacacggcgcgcaggcattggttgacgttgcgtctgccgacgaagtcagcggtgtcatgtgcgccatcgtcggggcagtggggctgccttccgcgctcgcagcggcgcaaaaaggcaaaaccatttatctggcgaacaaagagacgctggtggtttccggcgcgttgtttatggaaaccgcccgtgcaaacggcgcggcagtgttacccgtcgacagcgaacacaacgccgttttccaagttttgccgcgcgattacgccggccgtctgaacgaacacggcatcgcttcgattatcctgaccgcttccggcggcccgtttctgaccgccgatttaaacacgttcgacagcattacgcccgaccaagcggtcaaacaccccaattggcgtatgggacgcaaaatctccgtcgattccgccaccatgatgaacaaaggtttggagctgattgaagcgcattggctgttcaactgtccgcccgacaaactcgaagtcgtcatccatccgcaatccgtgatacacagcatggtgcgctaccgcgacggctccgtgctggcgcaactgggcaatcccgatatgcgaacgcccattgcttattgtttgggcttgccggaacgcatcgattcgggtgtcggcgacctggatttcgacgcattgtccgcgctgaccttccaaaagcccgactttgaccgcttcccctgcctgaagctcgcctatgaagccatgaacgcaggcggagccgcgccctgcgtattgaacgccgccaacgaagccgccgtcgccgcctttttggacggacagattaagtttaccgacattgccaaaaccgtcgcccattgtctttcacaagacttttcagacggcataggcgacataggggggctcttggcgcaagatgcccggacacgcgcacaagcgcgggcatttatcggcacactgcgctga

SEQ ID NO: 39171 - DNA, 741 bp, Neisseria meningitidis
atgaatcctttaatctccgacttccaaactccgcaacaacgcacccccgttatcgtcgcccttgatttttccaacgaaaaagacacgctcggattcgtccgcaaccttgacccgacattgtgtcaaatcaaaatcggcaaagagctgtttaccgcgacgggacgcaatttggcagaaagcttaatcaatcaaggtttcaaacttttcctcgatttgaaataccacgatattccccacaccgtcgcgcaagcctgcaaagtcgctgccgatatgggcgtttggatggtcgatatgcacgcatcgggcggccgccgtatgatggaagccgcagcagaagccgttgccggatacggcacgaagccgctcttaatcggcgtaaccgtgttgaccagcatggaacaaagcgatttggcggaaatcggtttgaacaccgcccctgaagaacaagtcatccgcttggcaaaactggcgcaaagttcgggcttggacggcgtggtctgttccgcccaagaagccgcgccgctgcgccgcgaattgggacaggattttgtcttggtcacgcccggcatccgcttggacgttgccggcaataatgatgaccagcgccgcatcatgacaccggccgaagccttggctgccggttcgacttatttggtaatgggtcgtcctgtaacccaagctgccgatccggtagccgtattgcgcgaagtgaaccgcgtggcaaaccttgaagcaaactga

SEQ ID NO: 39172 - DNA, 717 bp, Neisseria meningitidis
gtgttcaataatttccttgcttcgctgccgtttatgacggaaacacgcgccgatatgattgtcagcgcgtttttgcctatggtcaaagccggcttcgcggtgtctctgcctttggcggcagcttctttcgttatcggtatggttattgccgtagccgtggctttggtgcggattatgcccgccggcggcattgcgcggaaaatcctgctgaaattggtggaattttatatttccgtcattcgcggtacgccgctgttggtgcagcttgtgattgtgttttacgggctgccgtccgtcggtatctatatcgatccgattcccgccgccattatcggcttctcgctcaatgtcggtgcatacgcttccgaaaccatacgcgcggcaattttgtccgtacctaaaggccaatgggaagcaggtttctccatcggtatgacctatatgcagacgttccgccgcatcgtcgcgccgcaggcattccgcgttgccgtgccgcctttgagcaacgagtttatcggcttgttcaaaaacacctcgctcgcagcggtggtaacggtaactgaattgttccgcgtcgcgcaggaaacggcaaaccgcacttacgactttttgcccgtctatattgaagccgcattggtttactggtgtttctgcaaggttctgttcctgattcaggcacgtttggaaaaacgtttcgaccgttatgtcgccaaataa

SEQ ID NO: 39173 - DNA, 330 bp, Neisseria meningitidis; identical to SEQ ID NO: 37738

SEQ ID NO: 39174 - DNA, 729 bp, Neisseria meningitidis
atgtgggataatgccgaagcgatggaacggctgacgcgctggctgcttgtcatgatggcgatgctgcttgctgcgtccgggctggtttggttttacaattcgaatcatctgcccgtcaagcaggtgtcgctgaagggcaacctggtttattccgataagaaggcattgggcagtttggcgaaagaatacatccatgggaatattttgaggacggacatcaatggcgcacaggaggcctaccgccggtatccgtggattgcgtcggtcatggtgcgccgccgttttcccgacacggttgaggtcgtcctgaccgagcgcaagccggtcgcgcgttggggcgaccatgccttggtggacggcgaaggcaatgtttttgaagcccgcttggacagacccggaatgccggtattcagaggcgcggaaggaacgtctgccgaaatgctccgccgttatgacgaattttcgactgttttggcaaaacagggtttgggcatcaaagagatgacctatacggcacgttcggcgtggattgtcgttttggacaacggcatcaccgtcaggctcggacgggaaaacgagatgaaacgcctccggctttttaccgaagcgtggcagcatctgttgcgtaaaaataaaaatcggttatcctatgtggatatgaggtataaggacggattttcagtccgctatgcttccgacggtttacccgaaaaagaatccgaagaatag

SEQ ID NO: 39175 - DNA, 456 bp, Neisseria meningitidis
atgagaccatatgctactaccatttatcaactttttattttgtttattgggagtgtttttactatgacctcatgtgaacctgttaaagaacaaaccagtttcaacaatcccgagccaatgacaggatttgaacatacggttacatttgattttcagggcatcaaaatggttatcccctatggctatcttgcacggtatacgcaagacaatgccacaaaatggctttccgacacgcccgggcaggatgcttactccattaatttgatagagattagcgtctattacaaaaaaaccgaccaaagctgggtgctcgaaccatacaaccagcaaaacaaagcacactttatccaatttctacgcgacggtttggatagcgtggacgatattgttatccgaaaagatgcgtgtagtttaagtacgactatgggagaaaagattgcttacttacggggttaa

SEQ ID NO: 39176 - DNA, 1395 bp, Neisseria meningitidis
atgaccgtcaaaacccgtttcgcccccagccccaccggctacctgcacattggcggcgttcgcaccgccttgttttcatgggcgtttgcccgccatcacaaaggcgagttcctattgcgtatcgaagacaccgacttggcgcgttccaccgccgaatccgtcaacatcatcctcgacggcatgaaatgggtcggtctcgattacgataacgccgacaacgtggtgtaccaaacccgccgcttcgaacgctataaagaagtcatcgccgaactcttggcaaaaggcgatgcctactactgctattgcagcaaagaagaattggaagcgatgcgcgagaaagccgaaaaggaaggcacggcgacttacgaccgccgctggcggccggaagcaggcaaaaccctgcccgaaatccctgccggcgtgcaacccgtcgtccgcttcaaaacgcctttggacggcgtaaccaagtgggcggacctggtcaaaggcgaaatttccatccccaacgaagccctcgacgacctgattattgcacgcgccgacggcacaccgacctacaacttctgcgttgtcgtagacgactacgacatgggcgttacccacgttatccgtggtgacgaccatgtgaacaacaccccgaaacaaatcaacatattaaaagccatcggcgctaccctgcctgaatacgggcacctgccgatgattctcaacgaacaaggcaaaaaaatctccaaacgcagcggcgataccgttgccattaccgatttcggcgcaatgggcatcctgcccgaagccatgctcaactatctggcacgtttgggctgggcgcacggcgacgacgagttctttacgatggaacaattcatcgaatggtttgatttgaaagacgtttccccgtccccaagccgtatggatttgaaaaaactctattggatcaacggcgaacacatcaaaatcacgcctaacggcaaactcgccgaactcgtcaaaccgcgtctcgctctgcgcgatatccatgaaactgaaaaacctgcgttggaagacgtgttggcacaggtcaaagaccgcgcccaagatttgaacgccttggcagacgaatgtctgtatttctacaaaaaacaagtccctgccgaagccgatgttgccaaacacagggatgacgaagcggcggcacgcatgctgcgctttgccgaacgcctcgagggtttggaagactggaataccgaagccatccacgacctgttcaaacctttctgtgacgaagaaggcattaaaatgggcaaactcggcatgcctttgcgcctcgctgtctgcggcacggcgaagaccccaagcgtcgatgccgtgttggcattaatcggcaaagaggaagtgttgaaacgcatccgcgcttaa

SEQ ID NO: 39177 - DNA, 441 bp, Neisseria meningitidis
atgatgcagactttccgaaaaatcagcctgtatgccgcaaccttgtggctcggtatgcagattatggcgggttatatcgtcgcgccggtgctgttcaaaatgctgcccaaaatgcaggcgggcgaaattgccagcgtattgttcgacatcctctcttggagcgggcttgccgtttggggcgcggtactggctgccgcctttgccgccctaacccggcggcaaaccgccctgctgctttttttattgtccgcccttgccgccaaccgattcttgattacacccgttatcgaggcgctgaaatacgggcatgagaattggctgttgtcgtttgtaggcggatccttcggaatgtggcacggcatttccagtattgtttttatggcaaccgccctactttcagcagttttaagttggcggctttccggcaaagaggccgtctga

SEQ ID NO: 39178 - DNA, 855 bp, Neisseria meningitidis
atggaaacccaagaaaacatgattaaaaccgccttacaagcagctcaaaaacctttttttgagtttgcaccgaacaatactctgcttgtattcacaccagaccaagacggtggctggagatacaaatcacaccccgaattgatgcaaaacccgtaccgcaagtgcggcaaattcctcatgcacgataccgccagtcttattaagtttgtacaaaaacacaaacaggacggcacacaaatctacattgatgccgatttcaaatcagggcgtattgatgtcaccgccgtcatcaacggccatacgcaacaagctcctggctggctcgatttttatgccgtatacaccccgcaacacactacatcggcatccaactggctgaacaacaatgcgcaccgcatgaatcagatggagttttcccatttcctgaccaacaatgcccgcaacatcgtatccaaaaatcccggtaacgaaaattccgtttacccgaccgccgccgaagtattggatttcgcgctcaatctcgagtacaccgaaaaaaccaccttcaaacaaggctatcgtgaacaggacggcagaatcaactttaccttccaatccgaagactcagggcaaacagagaaaaacctcaaaatgtttgaacgtttcggcatcgagttcaccccgcatcaaggcggtgcatcctactttgttgaagccctgttgaaattccgcatcgacaaaaacagcggcgcactcgtcctgtggtacgaattgcagcaaatcgatgctgtaatcgaacaagcggcaaaagacatttccgaagccgtacaaaaagccttccctgaaatcgacatctatttcggcataatcgcctaa

SEQ ID NO: 39179 - DNA, 558 bp, Neisseria meningitidis
atgatcaacgatattcaaaaaacagccgaaggcaagatgcagcgttcggtcgaagtactgaaagaaaatctggcgaaagtgcgtaccggccgcgcgcataccggcctgctcgaccaagtggaagtcgaatactggggcagcatggtctccgtcagccaagttgccaacgtaacgcttctggatgcgcgcaccatcggcgtgaaaccgtttgagggcaatatggcggccaaagtcgagaaagccatccgcgattcaaacttgggactgaacccggcagctgtcggcgacctgatccgcgtgccgatgcccatgctgaccgaggaacgccgcaaagacctgattaaagtcgtacgcggcgaagcggaagaaggccgcgtctccatccgcaacgtgcgccgcgatgccaacgaccacatcaaaaaactcctcaaagacaaagaaatttccgaagacgaggcacgtcgcggcgaagaagcggttcaaaaactgaccgacaaatacattaccgaagccgacaaactcctgactgccaaagaagaagatttgatggcaatttaa

SEQ ID NO: 39180 - DNA, 327 bp, Neisseria meningitidis
atgaacttcaaacgccttctcttgaccgccgccgcaaccgcactgatgggcatttccgcccccgcactcgcccaccacgacggacacggcgatgacgaccacggacacgccgcacaccaacacagcaaacaagacaaaatcatcagccgcgcccaagccgaaaaagcagcgttggcgcgtgtcggcggcaaaatcaccgacatcgatctcgaacacgacaacggccgtccgcactatgatgtcgaaatcgtcaaaaacggacaggaatacaaagtcgttgtcgatgcccgtaccggccgcgtgatttcctcccgccgcgacgactga

SEQ ID NO: 39181 - DNA, 1089 bp, Neisseria meningitidis
atgtcccaaactatcgacgaactcctccttccccaccgcaacgccatcgacaccattgatgcggaaatcctgcgcctgctcaacgaacgcgcgcaacacgcacacgccatcggcgaactgaaaggcacgggcgcagtgtaccgtcccgaacgcgaagtcgccgtgttgcgccgcattcaggatttgaacaaaggcccgctgcccgacgaatcggtagcacgcctgtttcgggaagtgatgagcgagtgcctcgccgtagaacgcccgctgaccatcgcctatctggggccgcagggcacgtttacccagcaggcggcgattaagcatttcggacacgccgcgcacaccatggcgtgtccgaccatagacaactgcttcaagcaggttgaaacccgtcaggcagactatctggtcgcccccgtggaaaactcgaccgaaggctcggtcgggcgcacgttggatttgcttgccgttaccgcgttgcaggcgtgcggcgaagtcgttttgcgcatccaccacaaccttttgcgtaaaaacaacggcagcaccgaaggcattgccaaagtcttttcccacgcgcaggcgttggcgcagtgcaacgactggttgggcagacacctgcccaacgccgaacggattgccgtgtccagcaatgccgaagccgcaaggctggttgccgaatcggacgacggtacggttgccgccatcgccggacgcacggcggcggaaatctacggactcgatatggttgccgagtgcatcgaagacgaaccgaacaacaccacgcgcttcttggtgatgggacatcacgaaaccggtgcaagcagcagcgacaagacttcgctggccgtttccgcgcccaaccgggcaggcgcggttgcctcgctgctgcaaccgctgactgagtcgggtatttccatgaccaagtttgagagccgtccgagtaaatccgttttgtgggaatacctgttcttcatcgacatcgaaggacaccgccgggacgcgcagattcagacggcattggaacgcttgggcgaacgcgcttcgttcgtcaaagtcatcggttcgtacccgaccgccgttttgtag

SEQ ID NO: 39182 - DNA, 225 bp, Neisseria meningitidis
atgatgaaaaacaaatatattttaataaaagcagcaatcggcataaccgccatatctatattttatcttctaactcaagaaagcagcggcaaaactgaagaaccatcatatttcttgatgtttatgtttctcaacttgctttggtttgaagaaaataaaacagttatggctgccgttacggcaatgattgccgcccactttatatttgtcgcactatccgattaa

SEQ ID NO: 39183 - DNA, 126 bp, Neisseria meningitidis; identical to SEQ ID NO: 39018

SEQ ID NO: 39184 - DNA, 846 bp, Neisseria meningitidis
atgaatattgcggacggacggcaggcgttttccgcacctgcaaaactgaatctcgatttgaggattaccggcaggcgggaagacggttatcacaatatcgaaagcatattctgcctgatagatttgcaggataccgtatatttgaaaccgagggacgacggcaaaatcatcctgcacaatccggttgatggaatgccgcaggaagtagatttgagctaccgtgccgcatcgttgctgcaaaaatatgcgcgcaaccccgccggcgtggaaatatggctggacaaaaaaatcccgacaggggcgggtttgggcggcggaagctcggatgcggcaaccgttttgctggtgttgaaccgttggtggcagtgcggtctgacgcagcggcagctcattgattcgggcgcggctctgggggcggacgtaccgttttttattttcggcaaaaatgcgtttgcgcggggtataggcgacaggctggacgaaatggatattccgaaacagtggtatgtcatcgtcaaaccgcccgtccacgtttccactgcaaaaattttcacacacgaaagcttgacacgaaattccgcctcaagcataatgccgactttccaaaatctgcaaccgtttagaaatgatatgcaggcagttgtatttaaagaataccctgaagtttggaaagcctattccgagttgtcccgatatggatttgccttaatgacaggttccggtgcgtgtgtattcacggcgtgtcaagataggaatagcgcatacaatatataccgacaagtttcagatttgtacgaggcatatttggcagagggtctttcaaaacatcctttgttgtccgtataa

SEQ ID NO: 39185 - DNA, 1488 bp, Neisseria meningitidis; identical to SEQ ID NO: 39015

SEQ ID NO: 39186 - DNA, 291 bp, Neisseria meningitidis; identical to SEQ ID NO: 38495

SEQ ID NO: 39187 - DNA, 585 bp, Neisseria meningitidis; identical to SEQ ID NO: 38223

SEQ ID NO: 39188 - DNA, 1197 bp, Neisseria meningitidis
atgtcccaaaaattgatcttggttttgaactgcggcagctcgtccctcaaaggcgcggtcctggataacggcagcggcgaagtcctgctcagctgccttgccgaaaaactcaacctgcccgatgcctacatcacattcaaagtaaacggcgaaaaacacaaagtcgatctgtccgcacatcccgaccacaccggcgcggtcgaagccctgatggaagaactcaaagcccacggcctcgacagccgcatcggcgccatcggccaccgcgtcgtcagcggcggcgaactgtacagcgaatccatcctcgttgacgacgaagtcattgccggcatcgaaaaatgcatcccgctcgcccccctgcacaaccccgcccacctcttgggcctgcgtgccgcgcaaagcattttcaaagacctgcccaacgtcgtcgtattcgatacctccttccaccaaaccatgcccgaagtcgcctacaaatacgccgttccgcaggagttgtatgaaaaatacggcctgcgccgttacggcgcgcacggtaccagctaccgcttcgtcgccgacgaaaccgcgcgcttcctcggcaaagacaaaaaagacctgcgtatggtcattgcccacttgggcaacggcgcgtccattaccgccgtcgccaacggcgaatcgcgcgacaccagtatgggcctgaccccgctggaagggctggtaatgggtacgcgcagcggcgacatcgatccttccgtattcggctttctcgccgaaaacgccaatatgaccatcgcccaaatcactgaaatgctgaacaaaaaatccggtctgctcggcatttccggcctgtccaacgactgccgcaccattgaagaagaagccgccaaggggcataaaggcgcgaaattggccttggatatgtttatctaccgccttgccaaatacatcggcagtatggcggttgccgcaggcggtttggacgcactggtctttaccggcggcatcggcgaaaactccgacatcatccgcgaacgcgtgatcggctacttgggcttcctcggtctgaacatcgaccaagaagccaacctgaaagcccgcttcggcaacgccggcgtgattaccactgccgacagcaaagccgttgccgtggtcattccgaccaacgaagagctgatgattgcccacgacactgcccgtttgagcggtctgtaa

SEQ ID NO: 39189 - DNA, 252 bp, Neisseria meningitidis
atgggcagcatcgaacagcgtttggaatatctggaagaggcgaacgacgtgctgcgtatgcagaaccacgtcctgtccaccgcattcaaagccttaatccgcgcccttcccgccgaaaccgccgaaatcgcggtcgagtcgattcagcttgcttttgaggacgccttggcagaattgagctatgaggacagcccccataccgatttgttccacgacgttacttatgcgtttttccgtgaaaaagaacgttaa

SEQ ID NO: 39190 - DNA, 798 bp, Neisseria meningitidis; identical to SEQ ID NO: 38316

SEQ ID NO: 39191 - DNA, 624 bp, Neisseria meningitidis
atgaaaatcatacacaaaggtttggtcgaatatctgccgacttttgaagcgatgaaaacctttaatgccggacggaatgctgacaccgaagacgaactgtgggtcgtcgaacacccgcccgtgttcacacaaggactggtgggaaaacccgaacacctgctgattcgcgacgacattcccgtcgtccaaatcgaccggggcgggcagattacctatcacgggcccgggcaattggtcgtttatacgatgattgatttcaaacggcgcaaaaccagcgtccgcaacatcgtttccgcgcttgaaaacagcatcatcgccacattggcagaatacggcatcgaagcggcggcagaccccaaacgccccggcgtttatgtcggagaacgcaaaatcgcctcactggggctgcgtatcaaaaacggctccgtctatcacgggcttgcgctcaacgtcaatatggatttaagcccgtttacccacatcaacccctgcggctacgccggtatggaaatgacgcaaatcgcggattttgtccaaccctgccccacgccggacgaagtcgccgccaaacttaccgcacaccttgaaacacaattcacaccgaaagcagacaacaatgagtga

SEQ ID NO: 39192 - DNA, 375 bp, Neisseria meningitidis
  misc_feature 6, 7, 8, 9, 10: 'n' is a, c, g or t
gtgtgnnnnnaacaaatcgcgcaactgggcatcaaaaccgtcatctgcaaccgccccgaccgcgaagaagaatcgcaacccgacttcgcccaaatcaaacagtggctggaacaagcaggcgttactggattccatcaccaacccgttaccgcacgcgacatccaaaaacacgatgtcgaaaccttccgccaactcatcggacaagccgaatatcccgtccttgcctattgccggaccggtacgcgctgctccctcctgtggggcttccgccgggcggcagaaggtatgccggttgacgaaatcatccgccgcgcccaagcggcaggcgtaaatttggaaaacttcagagagcggctggacaacgcccgcgtctga

SEQ ID NO: 39193 - DNA, 957 bp, Neisseria meningitidis
atgaatataatcgggctggacatctcaaaggataccatagacgcaacattgcataaaacaaacggaagtatccattacattaaatttaagaataatgatgatggattaaaacagtttagattgtggataaagggaaacagaatcagaaaagcctatatcggcatggaggcaacaggcatctattacgaaaaggcagcagatatgctttcttcctactataccgtttacgttatcaatcccttaaaaatcaaggactacgggaaaagcaggtttaaccgtaccaaaaccgacaaagcagattcaaacctgatagcagattacataaaaaggcatcaagatacattgataccgtatcagatacccaaaaacaaagcactgcaaaaactgattaaccttaaaaatcaattacagcaacatcagaagcaaattaaaaaccgtcttcatagcactgaagaagacttcataaggaacatacatcaagacttgatagataccatacaggacaagatggaacaggtaaaaatagccatatccgaacaaatcaaaaaacaaacggacaataaccattaccgcaatcttcaaaccatcccgagcataggcaaagacaccgcatcagttctttatgcgcaactgacagaaaaacattttaaaaccgcaaaccagtttgtatcctatgccggattaagtcccgccatcatacaatcagggacaagcgtaagaggtcggggcagattgagccgatacggaaacagacgattaaaaagtacgctgtatatgcccgccctttgtgcttaccgttttaacgcatttccgaaattaataaataatctgaaaaaagcgggtaagccaaagatggtaatcatcgttgccatcatgcgcaaactggcgaagctcgcctattacattgttaaaaccggccagccttacgatgcggaaagacaccgattgaatcaataa

SEQ ID NO: 39194 - DNA, 774 bp, Neisseria meningitidis
atgtatcaccaaatcggaatgtgggatcaaaaatgggtcatcggcaactggaaaatgaacggccggctccagaacaacaattcgctcatgcaccgcttccgcatcctccccaccgccgaacgcgtcctcatcggactcgccgccccgaccgtttacctgctgcaactgcacaacgccatgcaaatcgtcttaaacaaccgcatcctcacctgcgcccaagacgtgagccgcttccccgacaacggcgcgtacaccggcgaagtgtccgccgaaatgctcgccgacaccggcacagacatcgtcctcatcggacactccgaacgcagcctttatttcggcgaaaaaaacgaaatccaacgccgcaaaatggaaaacgtcctcaacgtcggactcatcccgttattgtgcgtcggcgaaagcctcgaagagcgcgaagccggcaaagaacacgaagtcatcgcccatcagctttccatcctgcaagggctggataccaaaaacatcgccgtcgcctacgaacccgtctgggcgatcggcaccggcaaagtcgccaccgtcgaacagattgccgatatgcacgcattcatctacaaagaaatcttgtctttgtgcggaagcgatgttaaaatccgcgtcctttacggcggaagtgtgaaagcggacaacgcggccgacatcttcgcagtaccttatgtggacggcgcactcgtcggcggcgcgtcattgtcgtacgactcctttaccgccatcatcagtgccgcacaaaatgcgtag

SEQ ID NO: 39195 - DNA, 249 bp, Neisseria meningitidis
atgaatattaaaaatgaaatagttgctttaatttctaaaaaaattgatggggggcaatatagttctttagaaaattttgctttatccgtactaagggaaaaaattataaaaaatactgtttccagtgatgaaaaattattgattattaatgattttttatcaggttttcttgagtttgatcctgagaccgggaaacctgtcggggagacgcttaaaattgagcaaatgattgatttctttttagtctaa

SEQ ID NO: 39196 - DNA, 1008 bp, Neisseria meningitidis
atgagcaccttcttccagcaaaccgcccaagccatgattgccaaacacatcaaccgcttcccgctattgaagttggaccaggtgattgattggcagccgatcgaacagtacctgaaccgtcaaaaaacccgttaccttcgagaccaccgcggccgtcccgcctacccgctgttgtccatgttcaaagccgtcctgctcggacaatggcacagcctctccgatcccgaactcgaacacagcctcattacccgcatcgatttcaacctgttttgccgttttgacgaactgagcatccccgattacagcaccttatgccgctaccgcaactggctggcgcaagacgacaccctgtccgaactgttggaactgatcaaccgccaactgaccgaaaaaggtttaaaaatagagaaagcatccgccgctgtcgttgatgccaccattattcagaccgccggcagcaaacagcgtcagaccatagaagttgacgaagaaggacaagtcagcggccaaaccacaccgagtaaggacagcgatgctcgttggatcaagaaaaacggcctctacaaactcggttacaaacaacatacccgtaccgatggggaaggctatatcgagaaactgcacattacccccgccaatgcccatgagtgcaaacacctgtcgcctttgctggaagggatagccgaaggtacgaccgtctatgccgacaaaggctacgacagtgcggaaaaccggcaacatctggaagaacatcagttgctggacggcattatgcgcaaagcctgccgcaaccgcccgctgtcggaagtgcaaaccaaacgcaaccgatatttgtcgaagacccgttatgtggttgaacagagcttcggtacgctgcaccgtaaattccgctacgcccgggcggcctatttcggactgattaaagtgagtgcgcaaagccatctgaaggcgatgtgtttgaacctgttgaaagcggccaacaggttaagtgcgcccgctgccgcctaa

SEQ ID NO: 39197 - DNA, 2028 bp, Neisseria meningitidis
ttgtccctgtctgaatttatagaacgccgaacgtcatttaatccgatggttattttgacgactttgttttttgtgtgtgttttggtggtattggttttaaccgtgccggatcaggcgcagatgtggctcgatcgggcaaaagaagtcatttttaccgagttcagctggttttatgttttaacgttttccatttttctgggtttcctgctgatactctcggtcagcagtttgggaaacatcaggctcggacgggatgaagatgtgccggaattcggcttcctgtcgtggctggcgatgctgtttgcggccgggatgggcgtgggtctgatgtttttcggcgtggcagagccgttgatgcattatttttcggacattacggccggcacgccggaacacaggcagcagcaggcattgctgcacacggtgttccattggggcgttcacgcttggtcggtgtacggtacgattgcattggctttggcttatttcggtttccgctacaagctgccgcttgccctgcgttcttgtttttaccccctgttgaaagaaaaaatttccggaaggttcggcgatgccattgatattatggcgttgcttgctacttttttcggcatcatcaccacattggggttcggggcttcgcaactgggcgccggattgcaggaaatgggctggattgccgaaaacagcttcagcgtgcaggttttgattatcgccgccgtcatgtccctcgccgtcgtttcggcaatatccggcgtggggaagggcgtgaaggtgttgagcgagttgaacctgagccttgcgtttttgctgctgttttttgttttggcggcgggccccactgtttacctgttgtcggcattcggcgacaacatagggaactacctcgaaaatctggtgcgcctcagttttaaaacttatgcgtacgaacgggaacacaagccgtggtttgaatcttggacggtgctttattgggcgtggtggtgttcttgggcgccgtttgtgggtttgtttatcgcgcgtatttcaaaggggcgcaccatccgcgagtttgtcttcggggttttgctcatccccggcctgttcggcgttttgtggtttaccgtcttcggcaatacggcgatttggctgaatgacggggttgcggggggaatgctcgaaaagatgacctcctctccggaaacgctgctttttaaattctttaattacctccccctgcccgaattgacgagcatcgtcagcctgctggtcatttccctgttttttgtaacttctgccgattccgggatttatgtcctgaacaatattacctctcgggacaagggcttgagcgcaccacggtggcaggcggttatgtggggcgtgctgatgtctgccgttgccgttttgctgatgcgctcgggcgggctaggcaacctgcagtctatgaccctgattgtttccctgccgtttgccctgctgatgctgataatgtgtttcagcctgtggaaaggattgagtgcggataagaaatattttgagacccgggttaaccctaccagtgtattttggacgggcggcaagtggaaagaacggctggtgcagataatgagccagacgcaggagcaggatattttaaaattcctcaaacataccgcatcgcccgctatgcacgagttgcaacgggagctttcggaagaatacggcttgagcgtccgggtcgataagatgtttcatcaggacgagcccgcaatcgagttcgtcattcggaaagagacgatgcgcgattttatgtacgggattaagtctgtcgggcaggatgtatccgaccagttgattaacgacggcaacctgccgcatatccggcatcagacaacttacaaaccctacgcttattttttcgacgggcgcgtcgggtacgatgtgcagtatatgaacaaggacgagctgattgccgacattttgaaaaactacgaacgttatttgatgttgttggatgatgtcggtcaggaactgatggcgcacgagcaggtggaattggcagagtaa

SEQ ID NO: 39198 - DNA, 264 bp, Neisseria meningitidis
atgagcgaaactaaaaatgttcgtactttgcaaggcaaagtagtaagcgacaaaatggataaaaccgtaacagtattggttgagcgtaaagtaaaacatccgctgtatggtaagattattcggttatctactaaaatccatgcccatgatgaaaataatcaatatggaattggtgatgtggttgttatatcggaatcccgtccattgtcaaaaactaaatcttgggttgtcagtgagctggttgagaaagcacgttctatttaa

SEQ ID NO: 39199 - DNA, 1254 bp, Neisseria meningitidis
atgtccgaacaacatatttcgacttggaaaagtaaaatcaacgcattgggtccggggatcatgatggcttcggcggcggtcggcggttcgcacctgattgcctcgacgcaggcgggcgcgctttacggctggcagatcgcgctcatcatcatcctgaccaacctcttcaaatacccgtttttccgcttcagcgcgcattacacgctggacacgggcaagagcctgattgaaggttatgccgagaaaagccgcgtttatttgtgggtattcctgattttgtgcatcctctccgccacgattaacgcgggcgcggtcgccattgtaaccgccgccatcgtcaaaatggcgattccctcgctgatgtttgatgtcggcacggttgccgccttgattatggcatcctgcctgattattttggtgagcggacgttaccgcgctttggatcgcgtttccaaaatcatcatcgttactttgagtatcgccacgcttgccgccgccggcatcgctatgtcgcgcggtatgcagatgcagcccgattttatcgagccgacaccgtggacgcttgccggtttgggcttcctgatcgcgctgatgggctggatgcccgcgccgattgaaatttccgccatcaattctttgtgggtaaccgaaaaacaacgcatcaatccttccgaataccgcgacgggatttttgatttcaacgtcggttatatcgccagtgcggttttggctttggttttccttgcactgggtgcgtttgtgcaatacggcaacggcgaagcagtgcagatggcgggcggcaaatatatcgggcaattgatcaatatgtacgccgttaccatcggcggctggtcgcgcccgctggtggcgtttatcgcgtttgcctgtatgtacggcacgacgattaccgtcgtggacggctatgcccgtgccattgccgaacccgtgcgcctgctgcgcggaaaagacaaaacgggcaacgccgaattctttgcctggaatatttgggtggcgggcagcggtttggcggtgattttctggtttgacggcgtaatggcgaatctgctcaaatttgcgatgattgccgcttttgtgtccgcccccgtgtttgcctggctgaattaccgtttggtcaaaggtgatgaaaaacacaaactcacatcaggtatgaatgcccttgcattggcaggcttgatttatctgaccggttttaccgttttgttcctattgaatttggcgggaatgttcaaatga

SEQ ID NO: 39200 - DNA, 1239 bp, Neisseria meningitidis
atggctttttatgcttttaaggcgatgcgtgcggccgcgttggctgccgccgttgcattggtactgtcgtcttgcggtaaaggcggagacgcggcgcagggcgggcagcctgcgggtcgggaagcaccggcgcccgtcgtcggtgtcgtaaccgtccatccgcaaaccgtcgcgttgaccgtcgagttgccggggcgtttggaatcgctgcgtaccgccgatgtccgcgcccaagtcggcggcatcatccaaaaacgcctgttccaagaaggcagttatgtccgtgccggacagccgctgtatcagatcgacagttccacttatgaagcaggtctggaaagcgcgcgcgcgcaactggcaacggctcaggcaacgcttgccaaagcggatgcggatttggcgcgatacaagcctttggttgccgccgaagccgtcagccggcaggaatacgatgctgcggtaacggcgaaacgttctgccgaggcaggtgtcaaagcagcacaggcggcaatcaaatctgccggcatcaatctgaaccgttcgcgcattaccgcgccgatttccggctttatcggtcactccaaagtttccgaaggtacgctgttgaatgcgggcgatacgaccgtgctggcaaccatccgccaaaccaatccgatgtatgtgaacgttacccagtctgcatccgaagtgatgaaattgcgccgtcagatagccgaaggcaaactgctggcggcggatggtgtgattgcggtcggcatcaaatttgacgacggcacagtttaccctgaaaaaggccgcctgctgtttgccgatccggccgtcaacgaatcgaccggtcagattaccctgcgcgccgccgtaccgaacgatcagaatatcctgatgcccggcctgtatgtgcgcgtgctgatggaccaagtggcggtggataatgcattcatcgttccacagcaggcagtaacgcgcggtgcgaaagataccgtgatgattgtgaatgcccaaggcggtatggaaccccgcgaggtaacggttgcgcaacagcagggtacgaattggattgttacgtcgggtctgaaggacggggacaaggtggttgtggaaggcatcagtatcgccggtataacgggtgcgaaaaaggtaacgcccaaagaatgggcgccgtctgaaaaccaagccgccgcgcctcaatccggcgttcagacggcatctgaagccaaaactgcttctgaagcggaataa

SEQ ID NO: 39201 - DNA, 1893 bp, Neisseria meningitidis
atgcctatccttaccatccgtgaagtgtgcaacattaatcattggggcataggttattatgatgttgacgattccggcgaaatcatcgtctgccccaatccctcgcaacacaatcaaactgtttcactgcaaaaactgactgaagccgtgcaacaaaaacatcaggcgcgcctgcctgttttgttttgttttccgcaaatcctcgaacaccgcctccgcgacattaaccgcgcctttcagacggcacgggaagagtgcggctataagggcggttattgtttggtttaccctatcaaggtcaaccaacaccgccgcgtcatcgaatcgcttatgtcaagcggacaaccgcatggtttggaagctggttctaaagccgaactgatggcggttttggcacacgccggcacccggcaaacattaatcgtctgcaacggctataaagaccgtgaatatatccgtttcgccttgatgggcgaaaaactggggcatcaggtttatttggtgattgagaagctgtccgaaatacaaatggtattggaagaggcggaaaaactcggcatcaagccccgtttgggtgtgcgcgccagactggcttcccaaggttcgggaaaatggcagtcttcgggtggggaaaaatcaaaattcggcttgtcggcttcccaagttttgcaactggtcgatattttgaaacaaaaaaacaggctggattgcctgcagcttttgcatttccatttgggctcgcagcttgggaacatccgtgatgttgccacaggtgtacacgaatcggctcggttttatgttgagttgcacaaactgggggtaaatatccgctgttttgatgtaggcggcgggcttggcgtggattacgaaggaaaccgcacacaatcggattgttccgttaattacagcctcaacgaatatgccgccacagtcgtatggggcatcagtcaggcttgtctcgaacacgggctgccgcatccgacaatcatcaccgagagcgggcgcggcattaccgcacatcacgccgttttggttgctaatgttataggcgttgaacgttacaaaccgcgccggctggatgcgccatcgcccgaagcaccgcgtgtgttgcacagtatgtgggaaacttggacggatatttccgcctcgcgggaaaaacgttccttacgcagctggatacacgaagggcagtttgatcttgctgatgtgcataatcagtataatgtcgggctgttgagtttggcgcaacgtgcgtgggcggagcaactgtatttaaatatctgtcatgaagtcggcgaattgtttaatgaaaaacaccggtctcaccgaaccattattgacgaattgcaagaacgttttgccgataagctgtatgtcaatttctcactcttccaatctttgcccgatgcttggggcatagatcaacttttccctgtttgtcccattaccggtttgaatgaaccgattgcgcgccgcgccgtgttgttggacattacctgcgattcagacggtacgattgaccactacatcgacggagacggcatcgccggtacgatgcctatgcctgattatcccgaagaagagccgccgcttttaggcttttttatggtgggagcatatcaggaaatactcggcaatatgcacaatcttttcggcgacactgccactgccgatgttgttgtaggggaagacggacaatttaccgtcatcgattacgatgaaggaaacaccgttgccgatatgctcgaatacgtttatcaagatccgaaagagctgatgaaacgctatcgcgaacaaatcgaacattcagaccttcctgcctcgcaggctatgtctttcttaaaagaactcgaagcggggcttaatggttatacctatttggaagacgaatag

SEQ ID NO: 39202 - DNA, 1116 bp, Neisseria meningitidis
atgcttaaatttaccttacacaaaaaagacggatacgcccgacgcggcacgctggagttgaaccacggcaaaattgaaacgccggtatttatgcctgtcggtacttacggctcggttaaggcgatgaacccgcaaaacctgcacgacatcaaggcgcaaattattttgggcaacacttatcatttgtggctgcgtccgggcttggaggtcgtcgaacagtttggagggcttcacggctttatcggctgggacaaaccgattttgaccgactcgggcggttttcaggttttttctttgtcggatatgcgcaagctgacggaagaaggctgtacgtttaaaagcccgatcaacggcgacaagctgtttttatcgcctgaaatttccatgaaaatccaaacggttttgaactcggacatcgcgatgcagctggacgaatgcacgccgggcgaagcaacgcgcgaacaggcgaaaaaatcgctgcaaatgagcctgcgctgggcggaacggagcaaaaaagcctttgaagatttgaaaaacccgaacgcgctgttcggcatcgtgcaaggcgcgatgtatgaggatttgcgcgaagaatcgctgcgcggtttggaacagtttgattttcccggccttgccgtcggcggcttgtccgtcggcgaacccaagcccgaaatgtaccgtatgctgcgcgccgtcggtccgatactgcctgaacacaaaccgcattacctgatgggcgtaggcacgccggaagacctcgtgtacggcgtggcgcacggcatcgatatgttcgactgcgtgatgcccacccgcaatgcacgcaacggctggctgttcacccgtttcggcgatttgaaaatcaaaaacgccaaacacaagctcgacaagcgtccgatagacgaaagctgcacctgctacgcctgccaaaacttcagccgcgcctacctgcaccatctgcaccgcgccggcgaaatcttgggcgcacagctcaacaccatccacaacctgcatttctaccaagtcattatggcggaaatgcgcgaagccgtcgaacaaggcaaatttgccgactggcaggcgcaattccacgaaaaccgcgcgcgcggcacagactga

SEQ ID NO: 39203 - DNA, 1080 bp, Neisseria meningitidis; identical to SEQ ID NO: 38335

SEQ ID NO: 39204 - DNA, 1404 bp, Neisseria meningitidis
atggatactacattgaaaaccaccttgacttctgttgcagcagccttcgcattatccgcctgcaccatgattccccaatacgagcagcccaaagtcgaagttgccgaaacgttcaaaaacgataccgccgacagcggcatccgcgccgtcgatttaggttggcatgactattttgccgacccgcgcctgcaaaagctgatcgacatcgcactcgagcgcaataccagtttgcgtaccgccgtattgaacagcgaaatctaccgcaaacaatacatgattgagcgcaacaacctcctgcccacgcttgccgccaatgcgaacgactcgcgccaaggcagcttgagcggcggcaatgtaagcagcagctacaaagtcggactgggtgcggcatcttacgaactcgatctgttcgggcgtgtacgcagcagcagcgaggcggcactgcaaggctatttcgccagcaccgccaaccgcgatgcggcacatttgagcctgattgccaccgttgccaaagcctatttcaacgaacgttacgccgaagaagcgatgtctttggcgcaacgtgttttgaaaacgcgcgaggaaacctacaagctgtccgaattacgttacaaggcaggcgtgatttccgccgtcgccctacgtcagcaggaagccctaatcgaatctgccaaagccgattatgcccatgccgcgcgcagccgcgaacaggcgcgcaatgccttggcaaccttgattaaccaaccgatacccgacgacctgcccgccggtttgccgctggacaagcagttttttgttgaaaaactgccggccggtttgagttccgaagtattgctcgaccgtcccgatatccgtgctgccgaacacgcgctcaaacaggcaaacgccaatatcggtgcggcacgcgccgcctttttcccatccatccgcctgaccggaagcgtcggtacgcgttctgccgaattgggcgggctgttcaaaagcggcacgggcgtttggtcgtttgcgccgtctattaccctgccgatttttacctggggtacgaacaaggcgaaccttgatgtagccaagctgcgccaacaggcacaaatcgttgcctatgaatccgccgtccaatccgcatttcaagacgtggcaaacgcattggcggcgcgcgagcagctggataaagcctatgacgctttaagcaaacaaagccgcgcctctaaagaagcgttgcgcttggtcggcctgcgttacaagcacggcgtatccggcgcgctcgacttgctcgatgcggaacgcagcagctatgcggcggagggtgcggctttgtcggcacaactgacccgcgccgaaaaccttgccgatttgtacaaggcactcggcggcggattgaaacgggatacccaaaccgacaaataa

SEQ ID NO: 39205 - DNA, 1014 bp, Neisseria meningitidis
atgattttctccatcatcgtccctatttacaatgtggaaaaatacctccgctgctgcgtggattccgtgcttgccgaaaattttgccgattatgaaatgattttggtcgatgacggttcgccggacggctgcgggaagatttgcgacgaatatgcaggcaaatatccgcatataaaagtgattcatcaagaaaacggcgggctgtcggatgcccgcaacgccggtatccgggcggcaaaaggcgattacctaatctttttggacagcgacgactattgggccgataccaaccgttcaaaaaacgcggggggggggattctctttgatttacaacaacttgcagacaaaaaggttgatttgatcctgcatccctcgtccttcaattaccgcgacatccccaaaggggcggacttttcggataatgattttgtccgccattttgaaacgctggtggaggggcggtactatatcgccaacgcgtggacaaagattgtcaggcgggaaataatcatcaaaaacaatctgtttttcccaaaaggatacattcacgaggatttcccgtacagtttgcaattggcgcgttttatcaagacttttgccttttacgataaccctttttaccagtaccgcgttctcggcggctctatcagccacaacatcaaatacaaaaatttcagcgatgtgctgacgcatctcgaccggggtgtggattttttagtcgaaaacaaaaattcccccatctacggcggtttgcaaaaatttgtcttcgacaatatcggctatctgaggtctatattggtaaggctttatttttccaaaaacattatcctcatctaccggaaatatttttcatttaaagaaaaatgcagaaagatattcggcgcgaaggcaatccgtccggtttttatcgggaagaccgcattcatcataggattgccgatattgcgcctgctcgtaccgcctatgctgtacccggcaatcaaggccgtttatcagaaatttttttcggaataa

SEQ ID NO: 39206 - DNA, 288 bp, Neisseria meningitidis
atgagcgatatttactatcgatccacgattgatgagcatttcaagattatagaattaatagaaaataatccaaatgaaatttatgatgatggcggtggtcaacaattttgcctagaatttcatcatgataaggtcattttttatcacaatgaatttgatgaagaagatggttatccagtattaagctgttcgctgcatacttttaaaactgctttaattgcttggaatgcttttttgcaattgcctaaaagtattcattcggtggtggagactgtgattgaggaataa

SEQ ID NO: 39207 - DNA, 531 bp, Neisseria meningitidis
ttgacggtttgccgtttcaacgaagttaaaaaccttaaacaacaaaccattccttctccaacacccaaaccacaaacaaaaatcctatgtcgcgttatcgcagaaacttcattgccggcggcacattctgtttcactgtcaaaccctccgccccgaaatcgcgcctgcttgtcgaacatatcgacttcgcgggcggcttatatggatgtgcaaaaacaatatccctttgaaaccgtcgccgtatgcgtgctgccaaaccacattcacgccatttggacgctgccgcccgacgatgcggattattccctactccggcggctgattaaaaccaaattctccgcatattccccttatactaaaaacttatccgccggcaaacagcggcagcacgaacgcggtatttggcaacggcgtttttacggacacaccgtgcgcgacgaaacggatttgcagcgttgcgcggactacatccattctaatcctatcaaacaaaaaatgtcgcgtgctaaaacagaatcctgcaaaaaataa

SEQ ID NO: 39208 - DNA, 855 bp, Neisseria meningitidis; identical to SEQ ID NO: 37208

SEQ ID NO: 39209 - DNA, 729 bp, Neisseria meningitidis
atgaccgcctaccgtatcgcacccagtattttgtcggcagactttgcccgcctcggagaagaggtggaaagcgtcattgcggcaggtgcagatctgatccattttgacgtgatggacaaccattatgtgccgaacctgaccttcggccctatggtttgcgcggcgttgaagccttatgcaagcgtgccgatcgatgtgcatctgatggtcgaacccgttgacgacctgattcagtcgtttgccaaagcaggagcatcgattatcacttttcatcccgaagcgagccgccatatcgaccgcagcttgagcctgattcgtgatatgggctgtcaggcggggctggtgttgaatccggcaacgcccgtatatctgttggaaaacgtattggacaggctggatatggttttgctgatgtcggtcaaccccggattcggcggacaaagcttcatcccgcacacccttgaaaaaatccgccgggtgcgggcgatgctggatcggtacgaagcacaaagcgggcggcacatcgccatcgaagtggacggcggcatcaaaaccgacaatattgccgccgttgcccgagctggtgcggatacctttgttgccggttctgcgattttcggcaaaccagactataaggcggtgattgatgcgatgagggcggaactggaaaaaagcggcaggctgaaccttgcgccaatgattgaaatagaaatgccgtctgaaaattag

SEQ ID NO: 39210 - DNA, 786 bp, Neisseria meningitidis
gtgaaacacatcagttcgaccaataatgaacacatccggcacctgcaccgcctgttgtcgcaaggaaagttcagacggcagtatgcccaaaccgttttggagggcgtgcacctgcttcaggttttcctgcaatccggcgggatgccggtcggggtatatattcccgagggcaaaatgccgtctgaagaaatccgcaggctgagggcggttgtgccggaaggcaggattttttccgtttcagacggcatattgaaaaaaatcagcagcttgagttgtgcagacgatatacttgcactgattgatatcccattgggcggaaccttgccggacaaaggcgactgtgtggttttggacggcgtgcaagatccgggcaatgtcggcaccgtcttacggagtgcggcggcggcaggggtaggtacggtcgttttgggcaggggttgcgcggacgcgtggtcgcccaaggtattgcgcgcggggatgggcgcgcatttcttgtcgggcatttatccgcaggcggatttggaaatatggttggcgagctataaaggccgtgtgtttgccaccgccttgcgcgaggaaaagcaggtggttttgtacggcgaagatttgtgcgaaccgacagcctgggtgtttggcaacgaaggcgcgggggtcggtaaagcggttttggacagggcggacaagtgtgtcaggattccgatgcacgatgcaaccgagtctttaaatgtcgcgatggcggcgacaatctgcctgtttgaacagatgcggcagcggtcggcgtattga

SEQ ID NO: 39211 - DNA, 312 bp, Neisseria meningitidis
atgaaatacaaaagcgaggcattagccgccattcatgaaatgatggaaggggcttacaacatcggcgcaatcgacaaaaagactatgcgcggctttgacaagtcctgcctgaccgaaatcaaaccgttgagcggcggagacatcaaggcaatcagggagaaggaggcactatcgcaagccgctttcgccatctatctcaacgtgggaaaaaatcacgtttcggcttgggagcggggcgttaaaaagccgagcggcgcggcgttgaagctgctgaccatcgtcaaaaacaagggtatcgaagccattgcgtag

SEQ ID NO: 39212 - DNA, 1224 bp, Neisseria meningitidis
atgtcgggcaatgcctcctctccttcatcttccgccgccatcgggctgatttggttcggcgcggcggtctcgattgccgaaatcagcacgggtacgctgcttgcgcctttgggctggcaacgcggtctggcggctctacttttgggtcatgccgtcggcggcgcgctgttttttgcggcggcgtatatcggcgcactgaccggacgcagctcgatggaaagcgtgcgcctgtcgttcggcaaacgcggttcagtgctgttttccgtggcgaatatgctgcaactggccggctggacggcggtgatgatttacgccggcgcaacggtcagctccgctttgggcaaagtgttgtgggacggcgaatcttttgtctggtgggcattggcaaacggcgcgctgattgtgctgtggctggttttcggcgcacgcaaaacaggcgggctgaaaaccgtttcgatgctgctgatgctgttggcggttctgtggctgagtgccgaagtcttttccacggcaggcagcaccgccgcacaggtttcagacggcatgagtttcggaacggcagtcgaattgtccgccgtcatgccgctttcctggctgccgctggccgccgactacacacgccaagcacgccgcccgtttgcggcaaccctgacggcaacgctcgcctatacgctgacgggctgctggatgtatgccttgggtttggcagcggcgttgttcaccggagaaaccgacgtggcaaaaatcctgctgggcgcaggtttgggtgcggcaggcattttggcggtcgtcctgtcgaccgttaccaccacttttctcgatgcctactccgccggcgtaagtgccaacaatatttccgccaaactttcggaaacacccatcgccgttgccgtcgccgttgtcggcacactgcttgccgtcctcctgcccgttaccgaatatgaaaacttcctgctgcttatcggctcggtatttgcgccgatggcggcggttttgattgccgactttttcgtcttgaaacggcgtgaggagattgaaggctttgactttgccggactggttctgtggctggcgggcttcatcctctaccgcttcctgctctcgtccggctgggaaagcagcatcggtctgaccgcccccgtaatgtctgccgttgccattgccaccgtatcggtacgccttttctttaaaaaaacccaatctttacaaaggaacccgtcatga

SEQ ID NO: 39213 - DNA, 693 bp, Neisseria meningitidis
atgaacgaaatcctcaggcagcccagcgttctgcttttcctcacgcttgccgtgtacgcgcttgcgattatcgtgcgcacgcgcacgggcaatatcttctgcaaccccgtactcgtcagcactatcgtgctgattgcctacctgaaaatcctcgacatcgattatgcggtgtaccacaacgccgcgcaattcattgatttttggctgaaacccgccgtcatcgtgcttgccgtgccgctctaccaaaaccgccgtaaaatcttcaaccagtggctgcccgtcatcgtttcacagcttgcgggcagcgttacgggcattgttacggggatgtattttgccaaatggctgggcgcggaacgcgaagtcgtcctctcgctcgcgtccaaatctgttaccaaccccatcgccattgaaatcacccgctccatcggcggcattcccgccattaccgccgccaccgtcatcattgccggtctggtcggacagattgccggttacaaaatgctgaagaacacagtcgtcatgccctcgtccgtgggtatgtcgctcggcacggcttcgcacgcgatggggattgccgcctcgctcgaacgcagccgccgcatggcggcatacgcgggactggggctgacgttcaacggcgtactgaccgcgctgattgcgccgctgctcatccccgttttgggattttga

SEQ ID NO: 39214 - DNA, 1266 bp, Neisseria meningitidis
atgttcagcttcttccgtcgcaagaaaaaacaggaaacgccggctcccgaggaggctcaagttcaggaaactgcagcaaaagcagaatccgaagttactcaaatagttgaaaatattaaagaagaagtcgaatctttaacggaaagcgtcaaagggcaggtcgaatcggctgttgaaaccgtcagcggtgcggttgaacaagtaaaggaagccgttgccgagatgctgtctgaagcagaggaagcggcggaaaaagcagcggaacaagtcgaagcggcaaaagaagccattgccgaaaccgtcggcgaggctgtcgggcaagttcaagaagccgttgcaacaactgaagaacacaagctcggttgggcggcgcgtttgaaacaaggtttgaccaaatcgcgcgacaaaatggcgaaatcgctggcgggcgtgttcggcggcggacaaatcgacgaagatttgtacgaagagctggaaaccgtgctgattaccagcgatatgggcatggaagccaccgaatacctgatgaaagacgtgcgcgaccgcgtcagcctcaaagggctgaaagacggcaacgaattgcgcggcgcgctgaaagaagccttgtacgacctgattaagcctctagagaaaccgctggttttgcccgaaaccaaagagccgtttgtcatcatgcttgctggcatcaacggcgcgggcaaaaccacatccatcggcaaactcgccaaatatttccaagcgcagggcaaatctgtgctgcttgccgccggcgatactttccgcgccgccgcgcgtgagcagcttcaagcttggggcgaacgcaacaacgtaaccgtgatttcgcaaaccacgggcgattccgccgccgtgtgcttcgatgccgtccaagccgccaaagcgcgcggcatcgacattgtgctggccgacaccgccggccgcctgcccacgcagcttcatttgatggaagaaatcaaaaaagtgaaacgcgtgctgcaaaaagccatgcccgacgcgccgcacgaaatcatcgtcgtgcttgatgccaacatcgggcaaaacgccgtcaaccaagtcaaagcctttgacgacgcattagggctgaccggtttaatcgtgaccaaactcgacggcacggcaaaaggcggcatcctcgccgcgcttgcttccgaccgccccgtccccgtccgctatatcggcgtgggcgaaggcatagacgacctgcgcccgtttgacgcgcgcgcgtttgtggacgcactgctggattga

SEQ ID NO: 39215 - DNA, 1257 bp, Neisseria meningitidis; identical to SEQ ID NO: 38254

SEQ ID NO: 39216 - DNA, 1074 bp, Neisseria meningitidis
atgagtatcaccatccaaaacttaaacaaacacttcggcaattttcacgcgctgaaaaacatcaacctcaacgtccccaccggcaaactcgtttccctgctcggcccgtccggctgcggcaaaaccacacttttacgcattatcgccggactggaaaacgccgacggcggcaatatcctgtttgacgggcaagacgtaaccgccaaacatgtgcgcgagcgcaaagtcggcttcgtgttccaacactacgcccttttccgccatatgaacgtgtttgacaacgtcgctttcggtttgaccgtattgcccaagtccgaacgcccgtccaaagaacaaatctgcactaaagtcgaagaattgctgaaactcgtacaactctcgcatttggcaaaatcctatccgcaccaactctccggcgggcaacgccagcgcatcgccctcgcccgtgcgcttgcggtcgaaccgaaactcctgcttttggacgaacccttcggcgcgttggacgccaaagtacgcaaagaattacgcacctggctgcgcgatatccatcacaacctgggtgtaaccagcattctggttacgcacgaccaagaagaagccctcgaagtttccgacgaaatcgtcgtgatgaaccacggcaaaatcgaacaaaccggcagcgccgaagctatttaccgcaaacccgaaaatgccttcgttaccgagttcctcggcgaaaccgacgcttttgaaggacgcatcgaaaaaggcttctggcattataacggcttcgcgtggaaattggacgcacaatacaaatggcaggaacaaaccgccaccggctatatccgcccgcacgaatggcagatcgccgccgaacacgaaacaccgatgatttgtgccgaaatcgaaaaagtccacgccgtcggggcattgacgcatattttggtgaaacacggcaaacaagacgtgcatatcacgctggctggcagcgatgccgcgcgttacccaatcgccgaaggcaaagaattgaagctgattccgaaacaggtttatgtcttctctcaaaacgaactgattgaatattcgatttaa

SEQ ID NO: 39217 - DNA, 186 bp, Neisseria meningitidis
atgtatcactaccaatccgaagccacacaattcctcaaccgtctgattgaagaaaaacctgagttggaacagcagcgtttggaaaaccgggggcttttgtgggatgtcgaactcaatcccgaagaacaggaaaacttcgaggcggcaaaagtagcgaaaaaaccttatacctattaccaagactga

SEQ ID NO: 39218 - DNA, 771 bp, Neisseria meningitidis
atgaaaatcaccacttggaacgtcaattcgctcaatgtgcggctgccgcaggtgcaaaacctgcttgccgacaatccgcccgatattttggttttgcaggaactcaaactcgatcaggacaaatttccggctgccgccttgcagatgatgggctggcactgtgtttggagcgggcagaaaacctacaacggcgtggcaatcgtcagccgcaacgcgccggaagacgtgcatatcgggctgcccgcgctgccggacgatccgcaacggcgcgtgattgcggcaaccgtcggcggcgtgcgcgtcatcaatgtctattgcgtcaacggcgaagccctcgacagcccgaaattcaaatataaagaacaatggtttgccgcgttaaccgaatttgtccgcgatgaaatggcacgccacggcaaactggtgctgttgggcgatttcaatatcgcgcctgccgatgcggactgttacgaccctgaaaaatggtatgaaaaaatccactgttcgaccgtcgaacggcagtggtttcaaaacctgctggatttgggattgaccgacagtttgcgccatatccatcccgaaggtgcgttttacacatggttcgactatcgcggcgcgatgttccagcgcaaactgggcctgcgtatcgaccatatattggttacatccgaaatggcggccgttttgaaggatgtccgtgtcgatttggatacacgcgctttagagcgtccgagcgaccacgcgccggtgacggcagaattcgattggtaa

SEQ ID NO: 39219 - DNA, 207 bp, Neisseria meningitidis
atgaaagcagtcagggatatagccttatggctggcagtaacggtttggatcaactttttccccgacagttaccgctatgataccgttccacagggacggcacggatactggcatgcagaccatccgtggtatccctatgcgcgctttctgctgcctttatttttagcctgtatccttttctaccgtcattttcggaaacggaaatag

SEQ ID NO: 39220 - DNA, 717 bp, Neisseria meningitidis
atgttgttccgtaaaacgaccgccgccgttttggcggcagccttgatgttgaacggctgtacggcaatgatgtggggcatgaacgacccgttcagccaaacgaccgcctataaacacgttgacaaggatcaaatccgcgccttcggtgtggttgccaaagacaatgcccaattggaaaagggcagtctggtgatgatgggcgggaaatactggttcgtcgtcaatcccgaagattcggcgaagctgacgggcattttgaaggcagggctggacaaacccttccaaatagttgaggataccccgagctatgctcgccaccaagccctgccggtcaaactcgaatcgcctggcagccagaatttcagtaccgaaggcctttgcctgcgctacgataccgacaagcctgccgacatcgccaagctgaaacagcttgagtttgaagcggtcgaactcgacaatcggaccatttacacgcgctgcgtctccgccaaaggcaaatactacgccacaccgcaaaaactgaacgccgattatcattttgagcaaagtgtgcctgccgatatttattacacggttacgaaaaaacataccgacaaatccaagttgtttgaaaatattgcatatacgcccaccacgttgatactggatgcggtgggcgcggtgctggccttgcctgtcgcggcgttgattgcagccacgaattcctcagacaaatga

SEQ ID NO: 39221 - DNA, 336 bp, Neisseria meningitidis
atgttcggaaaagccggattaggcggcctgatgaaacaggcgcagcaaatgcaggaaaatatgaaaaaagcgcaagccaaacttgccgaaaccgaaatcgaaggcgaagcaggcaacggcttggtcaaaatcacaatgacctgcgcgcacgaagtacgcaaaatcgacatcagccccgatttgattcaagaagccgccgacgacaaagaaatgctcgaagacctcatcctcgccgccctcaaatccgcccgtgacaaagccgaagaaaccgcaaacaaaacaatgggcgcattcacgcaaggtctaccccccggagtgggcgacttcttccgctga

SEQ ID NO: 39222 - DNA, 990 bp, Neisseria meningitidis
atgaaaattaccgttatcggcgcaggttcgtggggtacggcgctcgccctgcacttttcccaacacggcaaccgcgtatccctgtggacgcgcaacgcagaccaagtccgccaaatgcaggaagcgcgtgaaaacaaacgcggactgcccggcttttcctttcccgaaaccttggaagtgtgtgcggatttggcagacgcgctcaaagacagcggacttgtccttatcgtaacctccgttgccggattgagaagcagcgcagagctgctcaaacagtacggcgcgggacacctccccgtcctcgccgcctgcaaaggattcgagcaggatacagggctgctgacctttcaagtattgaaagaagtattgcccgacaataagaaaatcggcgtactctccggcccgagttttgcacaggaactcgccaaacaactgccctgtgccgtcgtcctcgcctccgaaaaccaagagtggattgaagaactcgtaccgcagctcaacacgactgtcatgaggctttacggcagtaccgacgttatcggcgtggcggttggcggcgcggtaaaaaatgttatggcgattgccaccggattgtccgacggtctagagtacgggcttaacgcccgtgccgcactggttacgcgcggattagctgaaattacccgccttgcctccgcaatgggcgcacagcccaaaaccatgatggggctggcaggcatcggcgacctcatcttgacctgcactggcgcactctcacgcaaccgccgcgtcggcttgggtttggcagaaggcaaggaactgcatcaggtgctggtcgaaatcggacacgtttccgaaggggtcagcacgatagaagaagtcttcaatactgcctgtaagtaccaaatcgatatgccgattacccaaaccctgctgcaactcatccgtaaggaaatgacccctcagcaggtcgtcgaaagactgatggaacgcagcgcgcgtttcgaataa

SEQ ID NO: 39223 - DNA, 1515 bp, Neisseria meningitidis
atgtgttgttctcttagttttgcagaaccagcaagaatagatgatcgaataataaaatttaggccatctaaatcaaagttttttgaatctacaggatatagaaaaatcaataatgaattttctaaattcacagaagcggcaaatgtcgaacatatccccacgggcgcaaaagcccgaatcaacgcaaagataaccgccagcgtatcccgcgccgccgtcttgtcaggagtcggcaaacttgcccgcttaggcgcgaaattaagcacaagggcagttccttatgtcggaacagcccttttagcccatgacgtatacgaaactttcaaagaagacatacaggcacaaggctaccaatacgaccccgaaaccgacaaatttgtaaaaggctacgaatatagtaattgcctttggtacgaagacaaaagacgtattaatagaacctatggctgctacggcgttgacagttcgattatgcgccttatgtccgatgacagcagattccccgaagtcaaagaattgatggaaagccaaatgtataggctggcacgtccgttttggaattggcataaagaagaactgaataaattaagttctttggattggaataattttgttttaaatcgttgcacatttaattggaatggcggagattgtttggtcaataaaggtgatgatttcagaaatggggctaatttttcccttatccgcaatccgaaatacaaagaagaaatggatgccaaaaagctggaagagattttatcgttgaaagtcgatgccaatcccgacaaatacataaaggcaaccggatatcccggttattccgaaaaagtagaagtagcacccggaacaaaagtgaatatggggcctgttacggacaggaacgggaatcccgttcaggttgtcgcaacattcggcagggattcgcaaggcaacaccacagtggatgttcaagtaatcccgcgtcccgacctcacacccggaagcgcggaagcaccgaacgcacagccgctgcccgaagtatcgcccgccgaaaaccccgcaaacaacccgaaccccaatgagaaccccggcacgagccccaatcccgaacccgaccccgatttgaatcccgatgcaaatcccgatacggacggacagcccggcacaagacccgattcccccgcagttccgggccgcacaaacggcagggacggcgaagacggcggccttttgtgcaaattcttccccgacattctcgcttgcgacaggctgcccgagcccaatccggcagaagatttaaatctgccgtctgaaaccgtcaatgtagagtttcagaaatcaggaatctttcaaaattccgcacagtgtcccgcacctgtcactttcacagtgactgtgcttgattccagcaggcagttcgcgttcagctttgagaacgcatgtaccatagccgaacggctaaggtacatgcttctcgcccttgcttgggcggttgccgcatttttctgtatccgcacagtatcccgtgaagtctag

SEQ ID NO: 39224 - DNA, 1179 bp, Neisseria meningitidis
atgacaggcagaacaggcggcaacggcagtacccaagcgcaacccgaacgcgtcatgctggtgggcgtaatgttggacaaagatggtacgggcagcagtgccacccgtctgaacggttttcagacggcattggcggaagctgtcgagctggtcaaagcggcgggcggcgattccgtgcgcgtggagactgccaaacgcgaccgtccgcacaccgcgctgtttgtcggcacgggcaaggcggcggagctgtcagaagcagttgccgcagacggcatcgatttggtcgtattcaaccacgaactcacgcccacgcaggaacgcaaccttgaaaaagagctgaaatgccgcgtattggacagggtagggctgattctggcgattttcgctcgccgcgcccgcacgcaggaaggcaggctgcaagtcgagttggcgcaattgagccatttggcgggacgcttgatacgcggttacggccatctgcagagccagcgcggcggtatcggcatgaaaggccccggcgaaaccaaactggaaaccgaccgccgattgatcgcccatcggatcaatgccttgaaaaaacagcttgtcaacctcaaaaaacagcgcgccctgcgccgcaagccccgcgaatcgggcacaatcaaaacgtttgcgctggtcggctataccaatgtcggcaaatccagcctgttcaaccggctgaccaagtcgggcatatatgcgaaagaccagcttttcgccacactcgacaccacggcgcggcggctgtacatcagtcccgaatgcagcattatcctgaccgataccgtcggattcgtcagtgatttgccgcacaaactgatttcggcattttccgccacgctggaagaaaccgcgcaagccgatgtgctgctgcacgtcgtcgatgccgccgccccgaacagcggacagcagattgaagacgtggaaaacgtactgcgggaaatccatgccggcgatattccgtgcatcaaggtgtacaacaaaaccgacctgctgccgtctgaagaacaaaacacgggcatatggcgcgacgctgcgggaaaaattgccgccgtccgcatttccgttgctgaaaataccggtatagacgcactgcgcgaagccattgccgagtcttgtgccgccgcaccaaacacagacgaaaccgaaatgccatga

SEQ ID NO: 39225 - DNA, 1161 bp, Neisseria meningitidis
ttgagcaaaatgacctgcatcgaagacttgcgccgcgttgccaagcgcaaaatgccgcgtatgttttacgattacatcgattcgggttcgtggacggaaacgacttatcgggaaaatacttcggatttcaaagacatccgcttccgtcaaaaagtattggtcaatatggagggacgcagccttgagactaaaatgatcgggcaggatgtgaaaatgccggtggcgattgcgccgacgggttttaccggcatggcacacgcagacggcgaaattttggcggcgcgggcggcggagaagttcggtattccgtttacgttgtccaccatgtccatctgctcgattgaagacgttgccgagaacaccagcgcgccgttttggtttcagctttatgtgatgcgcgaccgcgagtttatggaaaacctgattaagcgcgcgaaggatgccaaatgttcggcattggtattgaccgccgatttgcaggttttgggtcaacgccacaaagacatcaaaaacggcctgtccgcgccgccgaaaccgaccatcgccaatttaatcaatctggcgaccaaaccggaatggtgcatgaaaatgctgaacacggaacgccgcacgttccgcaatatcgtcggacacgcgaagaacgtcggcgatttgtcttcgctgtcttcatggacttccgaacaattcgacccgcgcctgagctgggacgatgtggcgcgcattaaagatttgtggggcggcaagctgattatcaaaggcattatggaacccgaagacgcggaaaaagcagcgaaaagcggcgcggacgcattgattgtttccaaccacggcggccgacagctcgacgataccgtgtctgccatcaaagccttgcccgacatcgtcagcgcagtgggcagcgacatcgaagtttggatggacagcggcatccgcagcggtcaggatattttgaaggcgtgggctttgggcgcgaaaggtacaatgataggtcgggcgttcctgtatggcttgggcgcgtatggcgaagaaggcgtaacccgtgcgctggaaattctatataaagaaatggatatatctatggcgtttacgggacaccgcgatattcaagatgtcgatgcctcgattttaaggggtaaagattggggtagggaaacggtttag

SEQ ID NO: 39226 - DNA, 963 bp, Neisseria meningitidis
atgcccagtatctctgtccgccggctgtttgacgacaaccaatacaaactgcaacttgcctgggccgccggcaattcgggtgcggacaaccgtatcggcgtagaggcggacaagcccgtcctcgccttggtcggacacctgaatttcatccatcccaaccaaatccaagtggtcggtttggcagagtcggaatatctgaaccgtctcgaatcgggggaaacgggttatcagttcggcgacctgttcgacatttctatgtctttggttattgtggcaaacggcttgccggtttccccgggactgcgcgactactgccacaaaaacgatattccactgctgacttccaaactcgaaagcccctatctgatggacgtgttgcggatttacctgcaacgcaccctggcggcatcgtccgtcaaacacggcgtatttctcgatgtgtttgaaatcggcgtgctgattaccggacattcgggtttgggtaagagcgaattggcgttggagctgatttcgcgcggccacagcctgattgccgacgatgcggtcgagctgttccgcatcggcccggaaacgctggaagggcggtgttcgcctatgctgcgcgattttttggaagtgcgcggcttggggatactcaatatccgccatattttcggcgaaacttccatccgccccaaaaaaatcctgcaactcattatcaatttggtcgaggcggacgacgagtatatgaagcagctcgaccgtttgagtatccgtaccgaaaccgaatccatcctcaacgtcaacgtccgttcggtaacgctgcctgtcgcggtcggacgcaaccttgccgtattggttgaagcggcggtgcgcaattatattcttcagttgcgcggtaaggatagtacgcgcgaatttttggaacgccatcagacgcaacttaaagaaaacgaacagaatcatgaaaatcgtcctgattag

SEQ ID NO: 39227 - DNA, 1503 bp, Neisseria meningitidis
atgagtcgtgaaatgttacagctggcagaagcactggcaagcgaaaaaaacgttgatgcggaagtcgtcttccaagcactggaattcgccctgtctaccgccgccaagaaaaaggcagaccgcgaacacatggatgtccgcgtccaaatcaaccgcgataccggcgaataccaaaccttccgccgctggctgattgtcgccgatgaagactatacctatcccgatgtcgaaaaaaccatcgaggaaatccaagaggaaattcccggcaccgccatccaaatcggcgaatactacgaagagcagctgcccaacgaaggcttcggccgccaagccgcgcaaaccgccaaacaaatcatcctgcaacgcatccgcgatgccgagcgcgagcagaatctgaacgagtttctcgccgtcaaagaagacatcgtgtccggcacggtcaaacgcgtcgaacgccacggcatcatcgtcgaagtcgttgccggcaaactggacgcgctgattccgcgcgaccaaatgattccgcgcgaaaacttccgcagcggcgaccgcatccgcgccctcttcctgcgcgtcgaagaaatcggcaacaccggccgcaaacaagtcatcctgagccgtacttccggcgatttcctcgtcaaactgtacgccaatgaagtacctgaaattgcagacggcatgcttgaaatccgcgctgtcgcccgcgacccgggccagcgtgccaaagtcgccgtcaaagccaacgaccagcgcatcgatccgcaaggcacctgtatcggcgttcgcggttcgcgtgtcaatgccgtcagcaacgaattgtccggcgagcgcatcgacgttgtcctttggtcgcccgagcctgcccaattcgtcatgagcgcgctctcacccgccgaagtcagccgcatcgtgattgacgaagacaaacacgccgttgacgtgattgttgatgaaaaccaactggcgctagccatcggacgcggcggtcaaaacgtgcgccttgcttccgacctgaccggctggcagctcaacatcatgacttccgccgaggcagacgaacgcaatgcggcagaagatgccgccatccgccgcctgtttatggatcacttgaacgtggacgaagaaaccgccgacgtactggttcaagaaggttttgcaaccttggaagaagtcgcctatgttcctgccgccgaactgcttgccattgaaggatttgacgaagaaatcgtcgatatgctccgcaaccgcgcccgcgatgccatcctgaccatggcgattgccgccgaagaaaaactgggcgaagtatccgacgatatgcgcaacctcgaaggcatagatgccgatatgctccgcagccttgccgaagcaggcattaccacccgcgacgacttggcagagcttgctgtggacgaactgattgaaatcaccggtgtaaacgaagaaaccgcaaaagccgtcatcctgaccgcacgcgaacactggtttaccgaagacaaataa

SEQ ID NO: 39228 - DNA, 1281 bp, Neisseria meningitidis
atgaaatccctttttattcggctgctcctgttgggttcggcggcaggcgttttctatcatacccaaaaccaatccctgcccgcgggcgaacttgtctatccgtccgcaccgcaaatcagggacggcggcgatgcgctgcactacctcaaccgcatccgcgcccaaatcggtttgcacaagctggcacacgcgccggttttggaaaattccgcccgcaggcacgcacgctatctcacgctcaatcccgaagacggacacggcgaacaccatcccgacaatccgcactacaccgcacaaaagctgaccgaacgcacacgccttgccgggtatctctacaacggcgtgcatgaaaacatcagcacggaagaggaagccgccgaatcgtccgacagcgacatccgcacgcagcaacgccaagtggacggattaatgagcgcaatctaccaccgcctttccctacttgaccgccatacggatgaggcaggagcggcatttgtgcgcgaaaacggtaaaaccgttctcgtattcaatcagggcaacagcaggtttgagcggcattgcgcccaaggcagaaatcagccggaagcaggacggaaatattaccgcaacgcctgccataacggtgcggtcgtgtacaccgacgaagccatgcccgcacaggagctgctctatacagcctatcccgtcggcagcggcgcactgccttatttccacggcgagcgtccagaccccgtgccggaatatgaaatcacgggcaatcctgccagcattgatttttccgaggcggcaggcaaaattacgatgaaaagtttcaagctgtatcagggtaaaaacgaaatccgccccgtcagggttttaaccgccggcaacgaccccaacggcaggctgaccgcgtaccaattcgcgctttttccgctcaagcctttggaatacggcacgctttatacggcggtattcgactatgtccgcaacggacggcgcgcgcaggcgaaatggcagtttagaacccgaaaacccgattacccttattttgaggtaaacggcggcgagacacttgcggttagaaaaggcgaaaaatatttcatccactggcgcggacgctggtgtttggaagcgtgtacccgttatacctaccggcagcgacccggcagccgcctgtccataggaaggcacgaggcgggcggcatcgtcttcagcgttgacggaatggcgggcagccgcatcacgcttgcaccggaaggagaaacggaacgaggcgtaaccctttatttacaggattga

SEQ ID NO: 39229 - DNA, 564 bp, Neisseria meningitidis
atgaaaaaaatcatcttcgccgcactcgcagcggcagccgttggcactgcctccgccgccacctacaaagtggacgaatatcacgccaacgcccgtttcgccatcgaccatttcaacaccagcaccaacgtcggcggtttttacggtctgaccggttccgtcgagttcgaccaagcaaaacgcgacggtaaaatcgacatcaccatccccgttgccaacctgcaaagcggttcgcaacactttaccgaccacctgaaatcagccgacatcttcgatgccgcccaatatccggacatccgctttgtttccaccaaattcaacttcaacggcaaaaaactggtttccgttgacggcaacctgaccatgcacggcaaaaccgcccccgtcaaactcaaagccgaaaaattcaactgctaccaaagcccgatggcgaaaaccgaagtttgcggcggcgacttcagcaccaccatcgaccgcaccaaatggggcgtggactacctcgttaacgttggtatgaccaaaagcgtccgcatcgacatccaaatcgaggcagccaaacaataa

SEQ ID NO: 39230 - DNA, 1302 bp, Neisseria meningitidis; identical to SEQ ID NO: 39130

SEQ ID NO: 39231 - DNA, 231 bp, Neisseria meningitidis
atgaacatcgttaaaaaatatgctgtaaaagcattgttggcagctggtatcttcacaccggctattgttatggcagatggctttgatgcagccgcgattggtacgcaagtggcgaatgtaatcatgggtttcgttgcgatggtttccgccgtgggtatggcggccattaccgtcattttggcaatccaaggcttcaaaatggcttggagcatgattaaatctgtcaaataa

SEQ ID NO: 39232 - DNA, 285 bp, Neisseria meningitidis; identical to SEQ ID NO: 38289

SEQ ID NO: 39233 - DNA, 1101 bp, Neisseria meningitidis
atgacccgtatcgccatcctcggcggcggcctctcgggaaggctgaccgcactgcagcttgcagaacaaggttatcagattgcacttttcgataaaggctgccgccggggcgaacacgccgccgcctatgttgccgccgccatgctcgcgcctgcggcggaagcggtcgaagccacgcctgaagtcatcaaactgggcaggcagagcatcccgctttggcgcggcatccgatgccgtctgaacacgcacacgatgatgcaggaaaacggcagcctgattgtgtggcacggacaggacaagccattatccagcgagttcgtccgccatctcaaacgcggcggcgtagcggatgacgaaatcgtccgttggcgcgccgacgacatcgccgaacgcgaaccgcaactcggcggacgtttttcagacggcatctacctgccgaccgaaggccagctcgacgggcggcaaatattgtctgcacttgccgacgctttggacgaactgaacgtcccttgccattgggaacacgaatgtgcccccgaagacctgcaagcccaatacgactggctgatcgactgccgcggctacggcgcaaaaaccgcgtggaatgcttctgccgaacacggcagcaccctgcgcggcatacgcggcgaagtggcgcgggtttacacacccgaaatcacgctcaaccgccccgtgcgtctgctccatccgcgttatccgctctacatcgccccgaaagaaaaccacgtcttcgtcgtcggcgcgacccaaatcgaaagcgaaagccaagcccctgccagcgtgcgttccgggctggaactcttatccgcactctatgccgtccatcctgccttcggcgaagccgacatcctcgaaatcgctaccggcctgcgccccacgctcaaccaccacaaccccgaaatccgttacagcctcgcccgacgcctgattgaaatcaacggccttttccgccacggcttcatgatttcccccgccgtaaccgccgccgccgtcagattggcagtggcactggttgacggaaaagacgcgcccgaacgtgatgaagaaagcggtttggcgtatatccgaagacaagattaa

SEQ ID NO: 39234 - DNA, 1170 bp, Neisseria meningitidis
atgagcaaaaaactccatccgcaaacgctcgccatacgcggcggcaaagaacaaaccgaataccgcgaacacaatcaggccttgttcctgaccagcagcttcatgtgggacaacgcccaacacgctgccgatttgttttcaaaaaaaatcaaaggcttcacttatacccgtaccgccaacccgaccacagccgcctttgaaaaacgcatcgccgctttggaaggtgcggaacgcgcggtcgccacttcgacgggtatgtctgcgattcaggcggcgtttttcacctttttgcaggcgggcgaccacgtggtttccagccgcagcctgttcggcacgaccgtcggctttatcaataacatcgttaccaaattcggcatcgaagtgagccacgtgtcgccgactgatataaacgaatggaaagccgccgtcaaagccaacaccaaactgctgtttttggaaacgccgtccaatcccttgggcgaagtggccgacttggaagccttggcggaattggcgcacggcatcggcgcgattttggtggtggacaacagcctgctgtcgcccgtcggctcgcagcctttgaaacacggcgcggatatttccgtttcctccgcgaccaaagccatagacggacacggacgcgtgatgggcggcgtgttggcgggttcggaagaattgatggcgcaggccgccgtttactgcaactcttgcgggctggcgatgtcgccgtttaatgcgtggcagttgttgagcggcgtggaaaccctgtcgctgcgtatggaaaaacagttcgacaacgccctgaaaatcgcacaatggctgcaagcgcagccgcaggttcaagccgtgtactacaccggattgcccgaccatccgcaggcggcgcttatccgcaaacagcaaaacggcggcggcatcgtcatcggctttgaagtcgccgaccaagcagccgcgtggaaagtcgtggacggcgtggaactcttttcccgtaccgccaacctcggcgacgtgcgctcgaccatcacccatccgtggacaaccacgcacggcaggatgcagcccgaagaaaaactcgccgccaacatccgccccggattggtgcgcctgtcggtcggtttggaatatgttggcgatttgattgacgatttgaaacaggcactcgcacgctga

SEQ ID NO: 39235 - DNA, 210 bp, Neisseria meningitidis
gtgattgattttctttctttaaagtctatttttttaaataaatttgcgttaaaatatagtggattaaatttaaatcaggacaaggcgacgaagccgcagacagtacagatagtacggcaaggcgaggcaacgccgtactggtttaaatttaatccactatacagaaaatttatccaatggattgaccgtgaagaaaataaggtcgtctga

SEQ ID NO: 39236 - DNA, 825 bp, Neisseria meningitidis
atgattaagaagacaatcggcggcatcataccgatttttacggcggttttcatccctgcatcagcaggcgcggcggatttgatgctggcgcaggaatacaaaggtcaagagattgcaggctgggcgatgagcgagaaactcgacggcgtgcgcgcgtattgggacggtaaacatttagtcagccggcaaggatatgtatttacaccgcccaaaggctttaccgcgcagtttccgccttatcctttggacggcgaattgtatagcggacgcggtcagttcgagcagatttccgctaccgtgcgttctgcttcttcagactggcgcggtatccgcctgcacgttttcgatgtacccaaggcgcagggcaatctctaccaacgtttggcagtcgcaacgcagtggctgaaaacgcatccgaacgcgccgattaccatcatcccacaaatcaaagtgcgcgaccggcagcacgcgatggactttttaaaacaaatcgaagcgcagggcggcgaaggcgtgatgctgcgtcagcccgaatcccgttacagcggcggcaggagcagccaattattgaagctgaaaagccaatacgacgacgaatgcacggtaacgcggcactatgagggcaaagggcgaaacgccggacggttgggcgcggtcggctgcaaaaaccggtacggcgaattccgcattggcagcggcttcaaagataaagaccgagacaacccgcccaaaatcggcacactgattacctaccgctaccgtggctttacgcagaaaggcacgccgaaattcgccacgtttgtgcgcgtgcgtaccgaccgctga

SEQ ID NO: 39237 - DNA, 1497 bp, Neisseria meningitidis
gtgaaaccgctgcgcagactgacaaacctccttgccgcctgcgccgtagcggccgccgccttcggacagcccgccctcgcggcggacttggcgcaagacccgttcattaccgataacgcccaacggcagcactacgaacccggcggcaaataccacctcttcggcgacccgcgcggcagcgtttccgaccgcaccggtcaaatcaacgtcatccaagactatacccaccagatgggcaacctgctcatccaacaggcaaacatcaacggcacaatcggctaccacacccgcttttccggacacggacacgaagaacacgcccccttcgacaaccacgccgccgacagcgcaagcaaagaacaaggcaacgttgacgaaggctttaccgtgtaccggctcaactgggaaggacacgagcaccatcccgccgatgcctacgacggcccgaagggcggcaattaccccaaacctacgggcgcacgcgacgaatacacctatcacgtcaacggcacagcacgcagcatcaaactcaatccgaccgacacccgcagcatccggcaacgcatatccgacaattacagcaacctcggcagcaatttctccgaccgcgccgatgaagccaacagaaaaatgttcgagcacaatgccaagctcgaccgctggggcaacagcatggagtttatcaacggcgtcgccgccggcgcgctcaacccctttatcagcgcgggcgaagccttgggcataggcgacatactgtacggaacgcgctatgccatagacaaagccgcaatgcgcaacatcgcccccttacccgccgagggcaaattcgccgccatcggcggcttgggcagcgtggcgggctttgaaaagaatacgcgcgaagccgttgaccggtggatacaggaaaaccccaatgccgccgaaaccgtcgaagccctggtcaacgtcctgccgtttgccaaagtcaaaaacctgacaaaggcggcaaaaccggggaaggctgcggttagcggggatttttctgctgcatacaatacaagaacaactagaaaagttactacagaaacagaggggttaaatagaatcagacagaaccagaaaaatagtaatatacatgagaaaaattatggaagagataatcctaatcatattaatgttttatctggaaattctatacaacatatactgtatggagatgaagcaggaggtgggcatctttttcctggcaaacctggtaagacaacattcccccaacattggtcagccagtaaaataactcatgaaattagtgatatcgttacatccccaaaaacgcaatggtatgcacagactggaacaggcggcaaatatattgctaaaggaagaccagctaggtgggtatcatatgaaacgagagatggaattcgtatcagaacagtttatgaacctgcaacaggaaaagtggtaactgcattccccgatagaacctctaatcccaaatataaccctgtaaaataa

SEQ ID NO: 39238 - DNA, 237 bp, Neisseria meningitidis
  misc_feature 218, 219, 220, 221, 222: 'n' is a, c, g or t
atgcaaaaaatccccctgaccgtacgcggtgcggaattgctgaaacaggaattgcagcagctcaaaagcgtggcgcgtcccgaagtaatcgaagcgattgccgaagcccgttcgcacggcgatttgtccgaaaacgccgaatacgaagccgccaaagaacgccaaggctttatcgagggccgcatttccgagctggaacacaaactttccgttgcccnnnnncacacacttaattaa

SEQ ID NO: 39239 - DNA, 1011 bp, Neisseria meningitidis
atgaaccacaccgttaccctgcccgaccaaaccacctttgccgccggcgacggtgaaaccgttttggccgctgccgcccgtcaaaacctcaatctgccccattcctgcaaaagcggtgtctgcgggcaatgcaaagccgaactggtcagcggcgatattcaaataggcggacactcggaacaggctttatccgaagcagaaaaagcgcaaggcaagattttgatgtgctgcaccactgcgcaaagcgacatcagcctcaacatccccggctacaaagccgatgccctacccgtccgcaccctgcccgcacgcatcgaaagtatggttttcaaacacgatgtcgccctcttgaaacttgccctgcccaaagccccgccgtttgccttctatgctgggcaatacatcgatttactgctgccgggcaacgtcagccgcagctactccatcgccaattcgcccgaccaagaaggcattttggaactacacatccgcaggcgcgaaaacggtgtctgctcggaaatgattttcggcagcgaacccaaagtcaaagaaaaaggcatcgtccgcgttaaaggcccgctcggttcgtttaccctgcaggaagacagcggcaaacccgtcatcctgctggcaaccggcacaggctacgcccccatccgcagcatcctgctcgaccttatccgccaagacagcggccgcgccgtccatttctactggggcgcgcgtcatcaagatgatttgtatgccctcgaagaagcacaagggttggcatgccgtctgaaaaacgcctgcttcacccccgtattgtcccgccccggagagggctggcagggaagaaaagggcacgtacaagacatcgcggcacaagaccaccccgacctgtcggaatacgaagtatttgcctgcggctctccggccatgaccgaacaagcaaaaaatctgtttgtgcaacagcataagctgccggaaaacttgtttttctccgacgcattcacgccgtccgcatcataa

SEQ ID NO: 39240 - DNA, 390 bp, Neisseria meningitidis; identical to SEQ ID NO: 38449

SEQ ID NO: 39241 - DNA, 888 bp, Neisseria meningitidis
atgcagaaatccaaattatcttggttcttgaaactgatgttggcactgtcgctggcgtttctgtatatcccgctggttgttttggtcatctattcgtttaacgaatccaagctggtaaccgtttggggcggcttttcgaccaagtggtacggcgcattgctggaaaacgacaccatcttggaagccgcttggctgtcgctgcggattgccgttgtgtcttcgcttgccgccgtcgttttgggcacgctggcaggctatgcgatggcgcggattaaacgttttcgcggcagtaccttgttcgccggtatgatttccgcacctatggtgatgcccgacgtgattaccggtctgtctatgctgctgctgattattcaggtacagatatttttgcagggcagcgaatggttacaacatctctacttcgatcgtggctttttcactattttcttaggacatacgacgctgtgtatggcgtacattaccgttgttatccgttcgcgtctggttgagcttgaccaatcgctcgaagaagccgcaatggatttgggcgcgcgtccgctgaaaatcttttttgtcatcactttgcctttgattgcccctgccatcgcttcaggctttctgctcggcattaccctgtctttggatgatttggtgattacctcattcctctccggccccggttcatccacattgccgcaggtgattttctccaaaatcaagctgggtcttgatccgcagatgaacgttttggcaaccatcctgatcggcatcatcggaacattggtcatcatcgtcaattattggatgatgaggcaggcaaccaagcgtgaccgagaagcggcagaagcctaccgccaagaaaaattggctgccgagaaagcaaattaa

SEQ ID NO: 39242 - DNA, 2058 bp, Neisseria meningitidis
atgcccgaacaaaaccgcatcctctgccgcgaactgagcctgctggcattcaaccgccgcgtgttggcacaggcggaagacagaaacgtcccccttttggaacgcctgcgctttctgtgcatcgtgtcgtccaatcttgacgagttttttgaagtccgcatggcgtggctcaagcgtgaaaacaagctgcacccccggcgcaggctggacaacggcaaaatgccgtctgaaaccatcgccgacgttaccgaagcggcgcgctccctgatacggcaccagtacgacctgttcaacaacgtccttcagcccgagctggcacaagaaggcatccatttttaccgccgccgcaactggacgggcgcgcagaaaaagtggatcgaaagctatttcgaccgcgaattgctgccgattctgacccccatcggactcgacccgtcccaccccttcccgcgaccgctgaacaaatcgctcaacttcgccgtcgaactcgacggcacggacgcattcggcaggccttcggggatggcgattgtgcaggcaccgcgcatcctgccgcgcgtcgttcccctgccgtccgaactgtgtggcggcggacacggcttcgtcttcctgtcgtccatcctccacgcccacgtcggcaaactcttcccgggcatgaacgtcaaaggctgccaccagttccgcctgacgcgcgacagcgacttgaccgttgacgaagaagacctgcaaaacctccgcgccgccatccaaaacgaactgcacgaccgcgaatacggcgacggcgtgcggctcgaagtcgccgacacctgtcccgcctacatccgcgactttctgctcgcgcaattcaaactgaccgccgccgaactctatcaggtcaaaggcccggtcaacctcgtgcgcctcaacgccgtccccgacctagtcaaccgccccgatttgaaatttcccacacacacgccgggcagactgaaagccttgggcaaaaccgcgtccatattcgatttggtgcgccaatcgcccatcctgctgcaccacccctaccaatcgttcgaccccgttgtcgaaatgatgcgcgaagctgccgccgaccccgacgtgcttgccgtcaaaatgacgatttaccgcaccggcacgcgttccgaactcgtccgcgccctgatgaaggcggcactcgccggcaaacaagtaaccgtcgtcgtcgaactgatggcgcgttttgacgaagccaacaacgtcaactgggcgaagcagctcgaagaggcgggcgcgcacgtcgtgtacggcgtgttcggctacaaagtccacgccaaaatggcactggtcatccgccgcgaagacggcgtactcaagcgttacgcccacctcggcacgggtaactaccaccaaggcacatcgcgcatctacaccgacttcggcatcattaccgccgacgaacaaatcaccgccgatgtgaacacattgtttatggaaatcacaggcttgggcaaacccgggcggctgaacaaactctaccaaagcccgtttaccctgcacaaaatggttatcgaccgcatcgcacgcgaaaccgaacacgcaaaagccggcaaaccggcgcggattaccgccaagatgaattcgctcatcgaaccgaccgtcatcgaagccctgtatcgggcaagcgcggcaggcgtacaaatcgatttgattgtgcgcggtatgtgcaccttgcgcccgggtgtaaaaggcttgtccgaaaacatccgcgtccgctccatcatcggcaggcagctcgaacacgcgcgcgtgtattgcttccacaacaacggcgcggacgatacctttatctccagcgcggattggatggggcgcaacttcttccgccgcatcgaaaccgccgcgccgattaccgcgcccgaactcaaaaaacgcgtcatccgcgaaggtttggaaatggcattggcagacaatacgcacgcgtggctgatgcagcccgacggcggctatatccgcgccgcgcccgccgagggcgaatccgaagccgacctgcaaaacgatttgtggacactgctcggaggctga

SEQ ID NO: 39243 - DNA, 957 bp, Neisseria meningitidis
atgattttaacaccgccggacacgccctttttcctccgcaacggcaatgccgacacgattgccgccaaattcctgcaacgccccgcacccacataccgccgcgagctgcttcccgacagcacgggtaaaaccaaagtcgcctacgatttttcagacggcatttcgcccgatgcgccgctggtcgtgctgtttcacggtttggaaggaagcagccgcagccattacgcggtcgaactgatgctcgcggtacgcagccgcggttggcacggcgcagtcgtccatttccgcagctgcggcggcattgccaacaccgctccggtgttctaccacttgggcgataccgccgaaatcgcctttactttggacacgcttgccgcgcgttaccgtgaaatatacgccgtcggcgtatcgctgggcggcaacgcgctggcaaaatatttgggcgaacggggcgaaaacgcgctgccgcaagccgctgccgccgtatccgcccccgtcgatgcagaggcggcaggcagacgcttcgacagcggcatcacgcggctgctctacacgcgctacttcctccgcaccctgatacccaaagcacggtcgctccacggttttcagacggcatttgccgcagggtgcaaaacactgggcgagtttgacgaccgtttcaccgcaccgctgcacggctttgccgatcggcacgactactaccgccaaacttcctgcaaaccgctgctcaaacacgttgccaaaccgctgctcctgctcaatgccgtcaacgaccccttcctgccgcccgaagcgctgccccgcgcagacgaagtgtccgaagccgttaccctgttccagccgacacacggtggtcatgtcggctttgtcggcagcaccggcggcaggctgcacctgcaatggctgccgcagaccgtcctgtcctatttcgacagcttccgcacaaacaggcgttaa

SEQ ID NO: 39244 - DNA, 717 bp, Neisseria meningitidis
atgacagacaccgccgaaaaccaaacacaaaacaactggcaagccgaacatccccgcagcatccgcagcttcgtcctccgccaaagccatatgaccgccgcacagcaacgcgccatcgataccttatgggacagcttcggcatcgattaccaagcaacaccggccgatcttgatgccaatttcggaagcaaccgacccaaaatcctcgaaataggcttcggtatggggacggcaaccgcagaaatcgcccgccgcctgcccgaaaccgacttcctcgccatcgacgtacacggtcccggcgtaggcaatctgctcaaactcatcaacgaaaaccatttggaaaacatccgcgtgatgcggcacgatgccgtagaagttatcgaaaatatgctgcaagacggctcgctcgacggcatccacatattcttccccgacccgtggcacaaaaaacgccaccacaaacgccgtctgatacaagcccccttcatcgccaaactgctgcccaaactcaaaaccggcggctatatccacctggcgacagactgggaagaatatgcacggcagatgcttgaagtcctcagtagcttcgacagcctgcaaaatacggcggcagactacgcccccaccccggactaccgccccgaaaccaaattcgaagcgcgcggcaaacgcctcgggcacggcgtttgggacttggtattcaaacggatgggctaa

SEQ ID NO: 39245 - DNA, 582 bp, Neisseria meningitidis
atgaaacacaccgtatccgcatcggtcatcctgcttttgaccgcttgcgcgcaattacctcaaaataacgaaaacctgtggcagccgtccgaacacatcagcagttttgcagcagaagggcggttggcagtgaaagcggaagggaaaggttcgtatgcaaatttcgattggacataccaaccgcccgtggaaaccatcaatatcaatacccctttgggcagtacgctcgggcagttgtgtcaagacagggacggcgcattggcagtggacggcaaaggaaatgtctatcaggcggaaagtgcggaagaattgagcaggcagctggtcggtttcaaactgccaatccaatatctgcatatctgggcagatggcaggcgtgtggcgggcgcgccttaccgcatcctgccggacggcatattggaacaatacggttggactgtcggcagaaccgccgacagtggggggcaagtccgaacgttgcaactgaataacggaaatttgaacatcaggctggttttcaccgaaatcggtatgccgtctgaaaccgaaaccccggaacgctgtgcggcgcgcacgagataa

SEQ ID NO: 39246 - DNA, 447 bp, Neisseria meningitidis
atggacagattaacccccgaacagcgcaaaaaatgtatgcagtccaacaaaagcaaggggacgaagcccgagcttgcgttggcgaaggcgatgtgggctttggggctcaggtatcggaaaaatagcggaagcatttttgggaagcctgatttttcatttaaaaaatataaagttgccgtgtttgttgatggcgagttttggcacggcaaggattgggaacagagaaaggcggaaataaagggcaaccgcgaattttggattgccaagatagaacgcaatatccgaagggatatggaagtaacaggccgtctgaaggtcgagggctgggcggttttacgtttttggagtaatgatgtcgttaaaaatacaacctgctgtgccgaaaaagtcagacaagccgtccgcgacaaacagggattgtcaaaatttcaaacgagagaaaaataa

SEQ ID NO: 39247 - DNA, 1116 bp, Neisseria meningitidis
  misc_feature 6, 7, 8, 9, 10: 'n' is a, c, g or t
gtgtgnnnnncggtcgtccgcaaactgaaccggggcggtatgcccgacagcgtgcgttcgggcgagggcgcggtcaaatggctgctgctttccatcatccttgtgatgggcatgatgagtcagaacatcatccccatccacattgcctttatcccgatgattgttccgccgctgcttttggtgttcaaccgcctgaaaatcgaccgccgcctgattgcgtgcgtcatcactttcgggctggttacgacttatatgttcctgccttacggcttcggcgcgatttttttgaacgaaatcctgttgggcaacatccattccgccgcgccgcagcttgatgtgaaaaacattaacgtgatggcggcaatggcgattcccgcgttgggaatgctggccggactcctgctggcgtttgtccattaccgcaaaccgcgcctgtaccaaagcaacaatgccgatacggcgggcaacgccgatgcggcaaaccgtccgcagccgtccgcctaccgcagcctggccgccgccgccgccattgccgtatgttttgccatccagttgatgtatgaagactcgctggtgttgggcgcgatgctcggtttcgccgtatttatgatgttgggggtcatcaaccgcgacaaggcaaacgacgtattcggcgaaggtatcaagatgatggcgatggtcggcttcattatgattgccgcgcagggttttgccgccgtgatgaatgcgaccgggcatatccagccgctggtggaaagcagtatggcgatattcggcaacagcaaaggtatggcggcattggcgatgctggtggtggggcttttggtaacgatgggcatcggttcgtccttttccactttgccgattattgccgcgatttatgtgcctttgtgtgtcggtttgggtttttcgccgcttgccaccgtcgccattgtcggcacggcgggggcgttgggcgatgccggttcgcctgcgtccgattccacgctgggcccgacgatggggctgaacgccgacgggcagcacgaccacatccgcgattccgttatcccgaccttcatccactacaatatcccgctgctgattgccggctggattgccgcgatggtgctgtaa

SEQ ID NO: 39248 - DNA, 1998 bp, Neisseria meningitidis
atgaagaaaattacccctcaaaacctgcgccccctgctttcggaaagcttgggacataccgattttgtcaacgtcctcaacgcactgattaaatttttgcgccgtggcggcaaaaaatgtgcgggggaacgtttcgacctgattatcgacacattcaaacaagacagggaattgctgtcccgcttcagccggtgtttttacatctggctcgcgcaaatacacatttatccggcactcatcaaactcggcatcttctcgcgccacagctttgcccgggaaatgggcatacgcatctacgaacgcttcagcccgtcatataaagattttgccaacttgggcgaagtcttcctttatcttttccattccgaaaacgacgacaaatggctgcaaacgctcaatatccgccaatggctggttttatacgaactcatccggagccacgccgaaccgtccaaattgcagacggcgggcatccgccttgccgatgcgcgtttgcgcgccatcgaaatgctgtctgtctggacggcatccgaagccatcgaacccgacctcatccgcatcgccccgcgcctgctggaagccgattcttccttcgtcgccctccaacgcgaaaccgccaaactggtcgaacactaccgcaacggcaccgcgccttacgacaccgcccacctcgaagtgatgttcgaccaatgtttcagccagattgactatttgcgccgcaaagggacgggcgccggctccggttcgtcggtcaaagtcgcccacctgctcgaacggctccggcagaccgtagaccgtctgaagctgctcaccgacatccaaaccggcgccggcaacagcaaccgcctgaccatcgcgctgatgaactccctcatctacgcggcggtcgaacaatacagcacccgccacctgcgccgcagcagcatccgtatgctcgcccgcagcattaccgaaaacaaaagccaccacggcgaacactacatcacccgcaaccgcaaagaatatttcaaaatgttctactcggcggcaggcggcggcgtcatcatcgccctgatggcgctgctcaaaatccgcatcggcacactcggcctcagccccttcctcacttccttgtcggccgggttcaactacggcatcggctttatgatcatccatatgctgcactgcaccgtcgccaccaagcagcccgcgatgactgccgccagctttgccgaacaggtcgatctcaacgaaggcggcaaagcggtggacaacaaactcgccaagctcctcatcgacgtatgccgctcccaaagcgtcgccgtcttcggcaacgtttccatcgccatccttttggcgtgcgccatatcgttcggctatgcccatctgtaccggcagcccatactcgatgcccacaccgccgcctaccagttcaaatccatagacatcatcgcttacccgacgctgtggtatgccgccattgcaggtctgtggctgttctgctccggcatcatcgcaggttttttcgacaaccgcgccgactacctcaacctgcgccaacgcctgcctttcaaccccttgctgcgtaaaatcatgcgccccgggccccgccgcgtcctcgccgcctacatccacaaacactacggctcgttggtaggcaacttcatcttcgggatgctcttgggtatgaccggctatttcggacacctcctcgggctgccgctggacatccgccacgtcgccttttcctccgccaacctcggctatgccgccgtcagcggcaacgtcggtttgggcacgttcgtactcggcattttcagcgtcctcgccatcggcctggtcaacctctgcgtcagtttcagcctcgccctcttcgtcgccctgcgctcgcgcggcacgaaaatcggcagcatccgcaatctgattaaaagtttttggaatcagattaaaagcaatccctgcatacttttcctcccgcccgccaaagaacagggacatcctccttcggacaagccttga

SEQ ID NO: 39249 - DNA, 621 bp, Neisseria meningitidis
atgctgaccccgaaaagttgcgatttgttcaatatcccgtttttccaattttcccagcttaaaaaataccagcctgaaagcattccgcaaatcaaggctgactataaagaaaactggcagatatggcagcagctgattcagcaggttgccgccgaattgggtgcgccgtttgcgccgccgcacatcgaacgctggtgtaacggctggcaggttcgcgcccatttctttgcctacttcaaatacgaacaatataaaaattccgcagcgattttgtcgatactgctcaaccgccgccgtctgagcgtcagcttggattggcactgctataaagccgatgtttcccccatcgcgctgcctgattacaaccgctggttggataattttgataccgaaaaatacgcttctttcgatatgtggcacggtgcggaaagcgaatacgacgactaccgcaccgtcgcgcaacaaaacgagtccgaccgaaagttgcaaaacgacgaagactttttctgcatcggcaaacacatcgaacgcgacgatttgggcaggcaggatgtcgcgaaatggatagcggaaacggtggaagatttgctgccgctttacgaagcctgccacggcaaatga

SEQ ID NO: 39250 - DNA, 2043 bp, Neisseria meningitidis
atgatgtcgcccgaaacccgaaaacagctcaaaatcaccgatgtttccgccaagaagctcgacaaactcaacctccataccgcgtgggatttggtgttgcacctgccgctgcgttacgaggacgagacgcacattatgccgattaaggacgcgccgattggcgtgccgtgtcaggtcgagggggaggttatccatcaggaagtaacgttcaaaccgcgcaagcagctgattgtccaaatcgccgacggctccggcagcgtcctttttctgcgcttcatccacttttacgccagccatcagaaacagacggcgatcggcaaacgcatccgcgccgtgggcgaaatcaaacacggcttttacggcgacgagatgattcatcccaaaatccgcgatgccgagggcggcggtttggcggaaagcctcacgccggtttacccgaccgtaaacggtttgaaccagcccactttgcgccgtattattcagacggcgttggacgttacgccgctgcacgacacgctgcccgatgccctgctgtgccgtctgaagctgccacacctcgccgaaagcctgcgtcttttgcattcgccgccgccgagtttcacgattcatcagctttcagacggcacgctgcctgcatggcaacggctcaaattcgacgaacttttggcgcaacagctttcgatgcgcttggcgcgacagaagcgtatcggcggcacggcggcggcattgggcggcgacggcacattgacccaagccctgcgccaagccctgccgtttgccctgaccgatgcgcaagaaaaagttgtttccgaaatctgccgcgatatggcgcaaacctacccgatgcaccgcctgctgcagggcgatgtcggcagcggcaaaaccattgtggctgctttgtctgctttgacggctatcgaatccggtgcgcaggtggctgtaatggcgcccactgaaatccttgccgaacagcattttattaaatttaaacaatggctcgaacctttgggcattgaagttgtccgcctttttggcagtttgcgtaaaaaagccaaagacgaagccaaagccaaactggctgacggcagcgtcaaaatcgccgtcggcacgcacgccctgttttcagacggcgtggcgtttcacaatttgggcttgaccattgtggacgaacagcaccgtttcggcgttgcccaacgcctcgccctcaaaaacaaagggcgcgaagtccatcagctgatgatgtccgccacgcccatcccgcgcacgcttgcgatgagttttttcgccgatttggacgtgtccgtcatcgacgaattgccgcccgggcgcacaccgattaaaacgcgcctcgtcaacaacgtccgccgtgccgaagtcgaaggcttcgtcctcggcacttgccgaaaagggcggcaggcgtattgggtctgcccattgattgaagaaagcgaaaccctgcaactgcaaaccgccgccgaaaccctcgcccggcttcagacggcattgcccgaactcaatatcggactggtacacgggcgcatgaaggccgccgaaaaggccgaagtgatggcgcggttttcttcgggggggctgaacgtcttggtcgccaccaccgtcatcgaagtcggcgtagatgtgcccaatgccgccctgatggtcatcgaacacgccgagcgcatgggcttggcgcagctgcaccaattacgcggtcgggtcgggcgcggcgcggcagaaagcgtgtgcgtcctcctgtttgccgaacccttgggcgaactcgccaaagcgcggttgaaagtgatttacgaacacaccgacggctttgaaatcgcccgccaagacctcaatatccgcggccccggcgaatttctcggcgcgcgccaaagcggcgtgcctatgctgcgcttcgccaagcttgaagaagacttacaccttttggaacaagtgcgcgaaatcgccccgatgctgattgagcaaaaccccgaaatcgtcgaagcgcatttggcaaggtggctttccggcagggaagggtatttgggcgtgtga

SEQ ID NO: 39251 - DNA, 957 bp, Neisseria meningitidis
atgaacaccgccgccatctaccgccagtaccaaacctatgtccgctccgataaatccggctgggcgttggacggctgttccgacagcgcgctcattgcgcaggcaaaacagcccggtttgcatctggaaatgtgcatcaaccgcttcgactcgggcatcaccttgtcgcggatgcgcggcggcggaacgggcgcgtttcccaccgaaatccacaatttcagccacaactgcgccttgttcgtcatggtgtcggggcagaaccggttacaaatgggcggcagggaataccgcccgtctgccggcgaaatctggctggtacgcggcgagttggcggacgtatccgaaaccctgctgcccgacaacagcggcatgtgcgcgctgcatttggatttttcgctggaaaaactgcgccgctggcacgacgaaggcttgctggacgaacgcctgttttcgccgcaaacgataggccgattcgccctgcaacggctggcgcaaaacgcagcggcactgacggcggcggcctgcccactgctgcaacgctcgttcgaatcggacggcttcggcctgcttgccgacgaagccgccgcgctggaactctccgcccgattattgcgcttcaccttccgccgccacgacaacggttaccgccgtcggcgcatagacgaagccgccgacatcctgcaacacgaattcgcccgtccgctgaccatcgccgaaatcgcccgccgcgtcggactgaacgaatgctacctgaaacgctatttcaaagcgcaaaccggcgaaaccgtcgccggatgcctgcgccgcctgcggctggaacacgcgctcgccctcatcgaatccggcagcaccgtccaagccgccatgcacttttgcggctaccgccacgcgggacggttcaacgaagcgttcagacggcattacggatttttgccttcggatgtgaagaagtgctga

SEQ ID NO: 39252 - DNA, 324 bp, Neisseria meningitidis
atggacaactgtattttctgcaaaatcgccgccaaagacattccggcgcaaaccgtctatgaagacggcgaaatggtttgtttcaaagacatcaaccccgctgctccggttcatctgctgctgattcccaaagtccatttcgattcgttggcacacgccgcgcccgaacatcagccccttttgggaaaaatgatgctgaaagttcccgaaatcgccaaagcggcaggactggcagacggcttcaaaaccctgatcaacaccggaaaaggcggcggacaagaggtcttccacctgcatatacacatcatgggcacacccgtataa

SEQ ID NO: 39253 - DNA, 303 bp, Neisseria meningitidis; identical to SEQ ID NO: 38794

SEQ ID NO: 39254 - DNA, 861 bp, Neisseria meningitidis; identical to SEQ ID NO: 36326

SEQ ID NO: 39255 - DNA, 177 bp, Neisseria meningitidis
atgtgcgcggctattatggcatattttggcggctttgttcgcgctttgttcgatcttggcgtgtttgaacgcggcggcgtgaaaggaagggagaaatggttttcccgcgtttggtggcggtcggaggtgctgtgcctgatgtgcggcggcatattttcggtgaaattgattttatag

SEQ ID NO: 39256 - DNA, 762 bp, Neisseria meningitidis
atggatgcgaataaagagccgaattgggaaaaacgtttggaaaacctgcgtcagacgcgccgtatgaaggcagtgccgacttacgcgccgctgtcccgcccctctgaaaccggaacggacgcgcctgtgccgaaactggacgatgagagccgagcccgtgtgttgaaggcgtatctgaaaaaatggcaggaggaacacaatgccgccgttgccgattgcggcgaggaagtcgaaaccgacccgatgattgtccttcaggaaaactggctcaacgcgcaggcttccctgcaaatgtcggtttcggaaaaacacatcgaatcgcggcggagaatcctgttcgatgccaaaaaagacagtgccgaatttgaaaccggacagattgaaggcggggaaaacgccgatgcggcagaatcgggtacggcggcagacggggttgcggaaaacggcgaaggcggtgcggaagaggcgttgatgcccgtccaaatcaatatcctgaatccgaaagccgtcaaccggcgcgaagtgttctgcctgtccgaacaggagctgaccgaacggctgatcaaacgcctgcgcccccatctgaccgataccgtcaacggcatcatccgaacggcggtgcaaaagcagatggcggttttcacctatcagctccagcagatgctgcacgagcaggcgggggcggtagtcgaagacgtgttggaacacgatgtccgcaaaatcctcaacgacatcaagtacgagttaaaatacaaacgctga

SEQ ID NO: 39257 - DNA, 672 bp, Neisseria meningitidis
atgactttttccgcgattctgttctatatccttgccgccatcgtcctatacggcgcgctgcgtaccgttacagcgaaaaaccctgtccacgccgctttgcatctggtgctgaccttctgcgtgagcgcgatgctttggatgctgatgcaggctgagtttttgggcgtgacgctggtggtggtttacgtcggcgccgtgatggtgttgttcctgttcgtcgtgatgatgttgaacatcgacattgaagaaatgcgtgccggtttctggcggcacgcgcctgttgccggtgtggtcggcacattgttggcggttgcgctgatcctgattctggtcaacccgaaaaccgaccttgccgcatttggtctgatgaaagacattcctgccgattacaacaatatccgcgatttgggcagccgtatttataccgactatctgttgccgtttgaattggcggcggtattgctgttgttgggtatggtggcggcgattgcgctggttcaccgtaaaacggttaatccgaaacgcatggatcctgccgaccaagtcaaagtacgcgccgaccagggccgtatgcgtctggtgaaaatggaagcggtcaaaccgcaagtcgaatctgccgaagaaagcgaagtttcagacgacctcaagccgaaagaggagggcaaagcatga

SEQ ID NO: 39258 - DNA, 852 bp, Neisseria meningitidis
atggcacgacacgtttggcaggcaggacggtttgaaatcggtttggacaaaccgaaaatcatgggtatcgtgaatctcacgcccgattctttttccgacggcggcgcgtattcgcaaaatgcccaaacagctttggcgcacgccgaacggcttttgaaagagggtgcggacattctcgacatcggcggcgaatcgacgcggccgggtgcggattatgtttcgtccgaagaagaatgggcgcgggttgagcctgtattggcagaagtggcggggtggggcgttcccgtcagtttggacacgcgccgcacggtgattatggaaaaagcgttggcactcggcggcatcgatattattaacgatgtggcggcgttgaccgacgaaggcgcggtcgaattgctggcgcgccagacggacatgggtatttgcctgatgcatatgcagggtttgcctgaaaccatgcagattaatccgaaatatcaggatgttgttggtgaagtggcgcggtatttgaaagcgcgggcggcggaatgcatcgcggcaggcatcgccccgcaacgcatcacactcgaccccggtttcggtttcggcaaaaccttacaacacaatatcgcactgatgcggcatttacccgaattgatggcagaaacaggctttccgctgcttatcggcgtatcgcgcaaacgcatgataggcgaactgacgggcgaaaccgacgcggcggcgcgcgtacacggcagcgcggcggcggcgctggcttccgtggcgcgcggcgcgcaaattgtgcgggtgcatgatgtgaaggcgacggcggatgctttgaaggtgtgggaagcgttgggcatcaatctgtaa

SEQ ID NO: 39259 - DNA, 231 bp, Neisseria meningitidis
atgaacatcgttaaaaaatacgctgtaaaagcagccttggcagccggtatcttcacaccggccattgttatggcagatacctttgatgcatccgcgattggtacgcaagtggcgaatgtaatcatgggttttgtggcaatggtttccgccgtgggtatggcggcaatcaccgtaattcttgcaatccaaggcttcaaaatggcttggagcatgatcaaatctgtcaaataa

SEQ ID NO: 39260 - DNA, 474 bp, Neisseria meningitidis; identical to SEQ ID NO: 36318

SEQ ID NO: 39261 - DNA, 1845 bp, Neisseria meningitidis
atgttacctaaccgtttcaaaatgttaactgtgttgacggcaaccttgattgccggacaggtatctgccgccggaggcggtgcgggggatatgaaacagccgaaggaagtcggaaaggttttcagaaagcagcagcgttacagcgaggaagaaatcaaaaacgaacgcgcacggcttgcggcagtgggcgagcgggttaatcagatatttacgttgctgggaggggaaaccgccttgcaaaaggggcaggcgggaacggctctggcaacctatatgctgatgttggaacgcacaaaatcccccgaagtcgccgaacgcgccttggaaatggccgtgtcgctgaacgcgtttgaacaggcggaaatgatttatcagaaatggcggcagattgagcctataccgggtaaggcgcaaaaacgggcggggtggctgcggaacgtgctgagggaaagaggaaatcagcatctggacggactggaagaagtgctggctcaggcggacgaaggacagaaccgcagggtgtttttattgttggcacaagccgccgtgcaacaggacgggttggcgcaaaaagcatcgaaagcggttcgccgcgcggcgttgaaatatgaacatctgcccgaagcggcggttgccgatgtggtgttcagcgtacagggacgcgaaaaggaaaaggcaatcggagctttgcagcgtttggcgaagctcgatacggaaatattgccccccactttaatgacgttgcgtctgactgcacgcaaatatcccgaaatactcgacggctttttcgagcagacagacacccaaaacctttcggccgtctggcaggaaatggaaattatgaatctggtttccctgcacaggctggatgatgcctatgcgcgtttgaacgtgctgttggaacgcaatccgaatgcagacctgtatattcaggcagcgatattggcggcaaaccgaaaagaaggtgcttccgttatcgacggctacgccgaaaaggcatacggcagggggacggaggaacagcggagcagggcggcgctaacggcggcgatgatgtatgccgaccgcagggattacgccaaagtcaggcagtggctgaaaaaagtatccgcgccggaatacctgttcgacaaaggtgtgctggcggctgcggcggctgtcgagttggacggcggcagggcggctttgcggcagatcggcagggtgcggaaacttcccgaacagcaggggcggtattttacggcagacaatttgtccaaaatacagatgctcgccctgtcgaagctgcccgataaacgggaggctttgagggggttggacaagattatcgaaaaaccgcctgccggcagtaatacagagttacaggcagaggcattggtacagcggtcagttgtttacgatcggcttggcaagcggaaaaaaatgatttcagatcttgaaagggcgttcaggcttgcacccgataacgctcagattatgaataatctgggctacagcctgctgaccgattccaaacgtttggacgaaggtttcgccctgcttcagacggcataccaaatcaacccggacgataccgctgtcaacgacagcataggctgggcgtattacctgaaaggcgacgcggaaagcgcgctgccgtatctgcggtattcgtttgaaaacgaccccgagcccgaagttgccgcccatttgggcgaagtgttgtgggcattgggcgaacgcgatcaggcggttgacgtatggacacaggcggcacaccttacgggagacaagaaaatatggcgggaaacgctcaaacgtcacggcatcgcattgccccaaccttcccgaaaacctcggaaataa

SEQ ID NO: 39262 - DNA, 1077 bp, Neisseria meningitidis
atgatttgccgaaaacctatcggacacacaccatattttgatatgaataaaacaatctgccgcactgctgcactattgataagcggtttttcatacgcaaacaccgtcattcccgatgtctcccccgtcgcacaaggtcaacatgtcttcattaacatccctcagcaacgcctgttcctctacaccgacggcaaactgaccaaggtttatcccgttgcagtaggtcgggcgatgacgcaaaccaatctaggcgaacataaaatcggtgcgaaagcctataaccctgtttggtacatccccaaatccatacagaaagaacgcggcgacggcgtaaaaaccatagccgccggcccggacaaccctttggggccggtttttgtccgcttaggcgaccctaaactcggtttgggcatacacgggaccaatgcgccggccagcgtccccggggttcggagtcacggctgcgtccgcatgaaatcgcccgacgcgctcgagtttgccaaaaccatcgccagcggctcgcccgcctccgtcatctatcaaatggcgggtctcaatgaagatgcggatcgcaacctgtggcttgccgccttccgcgacccttacggtaagaacaaccttgacatcgcctctctgaaaaaaagtattgcgcaatgggcaaaaacacagggtaaaaccatcgcgcccgagaaagtcgatgctgtactcaaagaccgcaccggatcggccgtctgcctgacctgcggcaaaaacggcaagatgaagatgccgctcaaatcgctggcgtggatacagggttcttcctcatacagccaagctgaagtcattgaacaaactgaggaaaccaactctgccgaaatatccgagacacgcacgcccgaagtgcctgatgtacacacgcccgaggcacaaccgcatttaaatacccaatccgacggcacgccgactgcctataccgaaccggctgccgattcatcgccgcaagtagaaacacctgatcaggctgcttccgagccggttgatgtattattttcaatagatgtgatacggcagggaaatttgcgtttaggtaattga

SEQ ID NO: 39263 - DNA, 1260 bp, Neisseria meningitidis
atgaaacagaccgtcctcaaaaataacctgcaaaacctgcttgaaagcgcagaaaatatcctgctgcttcaaggccctgtcggcgatttttttctgcgccttgccgactggctgactgcaaacggcaaaaccgtacataaattcaactttaatgcaggcgacgactatttttatccgcccactcaagcgcataccgttgtttttaacgacaactacgatgcctttcctgagtttttgcaagaatacatcactcaacatcacatccaggccgttgtctgctttggcgacacacgcccttatcacgtcattgcaaaacgcattgcaaacgaaaaccaagccagtttctgggcgtttgaagaaggctatttccgcccctactacatcaccttagaaaaagacggcgtcaacgcattttccccgttgccgcgccgtgccgacttttttcttgaacaattccctaagcttgcccagcaagaatataaagcgccaacgccggtacacggcggttttacgcccatggcaaaaaacgctatccgttactatatcgagttgttccgcaatccacgcaaataccccgactacatccaccaccgcgcacccaatgccggccattacctcaaaccgtggtcgctctccatcctcaagcgtttgaactactatattgaagacatccaaatcgccaaacgtgtggaagcaggcaaatacggcaagttttttattgttcccttacaggtattcaacgacagccaagtccgtatccattgcgactttcccagcgtccgcagcttcctgctccatgttttgagttcatttgccgagcacgcgcctgccgataccaacatcatcatcaagcatcatcctatggaccgcggctttatcgactactggcgcgacattaaacgctttatcaaagaacaccccgaactcaaaggccgtgtgatttatgtccatgatgtccccctgcccgttttcctgcgccacggtctcggcatggttaccatcaacagcaccagcggcctgtccggactgattcacaatatgccagttaaggttctcggccgtgcctattatgatattcccggcattactgaccaaaataccttggcagaattttggaatcatccgacaccgcctgacaaagagctgttccatgcctaccgaatgtaccacctcaacgtgacccaaattaacggcaacttctacagtcaggtcttttttcctaacaaaaacacatccgactcttccacaccaacaacctaa

SEQ ID NO: 39264 - DNA, 615 bp, Neisseria meningitidis
atgaacttcacccgactgctcaaccaagtcttaagcacggttcaaaaaaaaggcaacaccttctccgacagcccgctcaattcattcggcggaggcgcgccggttgccggtgccgcgtccatgctgctgaacggtaaaaaccgcaaaaccattaccaaaatcggttcgaccgccgctttgggctacctcgcctaccggggctatcagatgtggcagcaaaacaaagggcgggcaaccgtaacacaaagcgatttccaacctgccggagaaactgaagaaacatacagccgcaccgtattgcgcaccatgatagccgccgccgcttcagacggcatgatagacgaagccgaacgccggactatcgaacaggaaagcggcacagaccccgaaactgccgcatggctcgccgccgaataccgcctgcccgcaagcatcggggacatcgccaccgccgtcggcaacgatgaggcgttggcggcggaggcctatctggcggcaaggttggtctgtgccgatttgtcgcggaaagaaaccgtcttcctcgcccgcctgtcgcaggctttgaaactggatgacaatctggtggagagtttggaaaggcaattggggttttga

SEQ ID NO: 39265 - DNA, 1779 bp, Neisseria meningitidis
atgacggttttgaagctttcgcactggcgggtgttggcggagcttgccgacggtttgccgcaacacgtctcgcaactggcgcgtatggcggatatgaagccgcagcagctcaacggtttttggcagcagatgccggcgcacatacgcgggctgttgcgccaacacgacggctattggcggctggtgcgcccattggcggttttcgatgccgaaggtttgcgcgagctgggggaaaggtcgggttttcagacggcattgaagcacgagtgcgcgtccagcaacgacgagatactggaattggcgcggattgcgccggacaaggcgcacaaaaccatatgtgtgacccacctgcaaagtaagggcagggggcggcaggggcggaagtggtcgcaccgtttgggcgagtgtctgatgttcagttttggctgggtgtttgaccggccgcagtatgagttgggttcgctgtcgcctgttgcggcagtggcgtgccggcgcgccttgtcgcgtttaggtttggatgtgcagattaagtggcccaatgatttggttgtcggacgcgacaaattgggcggcattctgattgaaacggtcaggacgggcggcaaaacggttgccgtggtcggtatcggcatcaattttgtcctgcccaaggaagtagaaaatgccgcttccgtgcaatcgctgtttcagacggcatcgcggcggggcaatgccgatgccgccgtgctgctggaaacgctgttggtggaactggacgcggtgttgttgcaatatgcgcgggacggatttgcgccttttgtggcggaatatcaggctgccaaccgcgaccacggcaaggcggtattgctgttgcgcgacggcgaaaccgtgttcgaaggcacggttaaaggcgtggacggacaaggcgttttgcacttggaaacggcagagggcaaacagacggtcgtcagcggcgaaatcagcctgcggtccgacgacaggccggtttccgtgccgaagcggcgggattcggaacgttttctgctgttggacggcggcaacagccggctcaagtgggcgtgggtggaaaacggcacgttcgcaaccgtcggtagcgcgccgtaccgcgatttgtcgcctttgggcgcggagtgggcggaaaaggcggatggaaatgtccgcatcgtcggttgcgccgtgtgcggagaattcaaaaaggcacaagtgcaggaacagctcgcccgaaaaatcgagtggctgccgtcttccgcacaggctttgggcatacgcaaccactaccgccaccccgaagaacacggttccgaccgctggttcaacgccttgggcagccgccgcttcagccgcaacgcctgcgtcgtcgtcagttgcggcacggcggtaacggttgacgcgctcaccgatgacggacattatctcgggggaaccatcatgcccggtttccacctgatgaaagaatcgctcgccgtccgaaccgccaacctcaaccggcacgccggtaagcgttatcctttcccgaccacaacgggcaatgccgtcgccagcggcatgatggatgcggtttgcggctcggttatgatgatgcacgggcgtttgaaagaaaaaaccggggcgggcaagcctgtcgatgtcatcattaccggcggcggcgcggcaaaagttgccgaagccctgccgcctgcatttttggcggaaaataccgtgcgcgtggcggacaacctcgtcattcacgggctgctgaacctgattgccgccgaaggcggggaatcggaacatacttaa

SEQ ID NO: 39266 - DNA, 1005 bp, Neisseria meningitidis
atgagcaccttcttccggcaaaccgcccaagccatgattgccaaacacatcgaccgtttcccgctattgaaattggaccgggtgattgattggcagccgatcgaacaatacctgaatcgtcaaaaaacccgttaccttagagaccaccgcggccgtcccgcctacccgctgttgtccatgttcaaagccgtcctgctcggacaatggcacagcctctccgttcccgaactcgaacacagcctcatcacccgcatcgacttcaacctgttttgccgtttcgacgaactgagcatccccgattacagcaccttatgccgttaccgcaactggctggcgcaagacgacaccctgtccgaattgctggaactgattaaccgccaactgaccgaaaaaggcctaaaaatagagaaagcatccgccgtcgttggcgccaccattattcaaaccgccggcagcaaacagcgccaggccatagaagtcgatgaagaaggacaagtcagcggccaaaccacaccgagtaaagacagcgatgcccgttggataaagaaaaacggcctctacaaactcggttacaaacaacatacccgtaccgatgcggaaggctatatcgagaaactgcacattacccccgccaatgcccatgagtgcaaacacctgccgccgttgttggaaggggtacctagaggtacgaccgtctatgccgacaaaggctacgacagtgcggaaaaccggcaacatctggaagaacatcagttgcaggacggcattatgcgcaaagcctgccgcaaccatccgctgacggaagcgcaaaccaaacgtaaccgatatttgtcgaaaacccgttatgtggtcgaacagagcttcggtacgctgcaccgcaaattccgctatgcgcgggcagcctatttcggactgattaaagtgagtgcgcaaagccatctgaaggcgatgtgtttgaacctgttgaaagccgccaacaggctaagtgcgcccgctgccgcctaa

SEQ ID NO: 39267 - DNA, 771 bp, Neisseria meningitidis
gtgtccgaaacacaaaacgaacaacccgtccaaccgcttgtcgagcatctcatcgagctgcgccgccgcctgatgtggacggttgtcggtatcttagtctgctttttcggcctaatgccgtttgcccaacaactctatacttttatcgccgacccgctgatggcaaacctgcccaaagacaccagcatgattgccaccgatgtcatcgcaccatttttcgtgccggtcaaagttaccctgatggcggcatttttaatttcgctgccgcatacgctctaccaaatctgggcatttgtcgcgcccgcactctaccaaaacgaaaaacgcctgattacgccgctcgtcctctccagcgtcagcctgtttttcatcggcatggcatttgcctactttttggttttccccgtcattttcaaattccttgccagcgttacccctgtcggtgtcaatatggcgacagacatcgacaaatacctgtcttttatcttaggcatgtttgttgcgttcggcacaacgtttgaagttcccatcgtcgttatcctgttaaccaaaatcagcgtggtaacaaccggacagctcaaacgcgcccgcccctatgtgattgtcggcgcgtttgtcattgccgccatcatcacgccgcccgatgtgatttcacaaaccctgcttgccattccgctgattctcttatacgaagcaggtatttggttcggacgctttttcacgccacgttcagaacaggatggcgacatacggccgcctgcaacaacctga

SEQ ID NO: 39268 - DNA, 1275 bp, Neisseria meningitidis
atgccgtctgaaacctcttccccacgcaaagaaaacgaaacagaagtacacattcctgccgctccttttatcgtcaaacagtccggcagcaacgctttggcagtctgcgccctggtattggcggcattgggtttgggtacaagtggttttttgtttgtccaaggacagaatgtcttgaaaaaccaagagctggcattcaaccaaaaaatcgacaaagccgccttgggcgagtcggaaaacgccgccctgttgaaagacaacctcaaccggcaagccgccatacaatcagagctcgaccgtttggacggaaacgtcaaagcaaacggcgaacaaatcttggaaatgcaaaaatcctatcgcgagttgaccaaaggacgcgccgattggctggtggacgaaaccgagaccatactcaatctggcggcgcaacagctggtgttgactggcaatatccaaacggcagtcggcgtattggagcatatcgacagccgcctgtcccgtttcaatcaggcagagcttctgccgatcaagcaggcggtcagcagcgacttggcggaactgaaaaaccgtccctatgtcgatatttccggcacggcattgcgcctcgacaggctggaaaccgccgtatccggactgccgctgatgctcgacggcgtattgaaaccgggcgtacaggtgaagaacgaagccgcttctgcttcatggtggcagaacgtatgggaaaaatccctcggcacattgaaggggctggtcgaaatccgccgtttggaaaacaacgatgccatgctgctttcaccggaacaggcatattttgtgcgtgaaaacctgcgcctccgccttttggatgcgcgcattgcattaatgcagcgcaacggcgaagtctatcagggcgatttgaacaatgccgaagccgccgtcagacagtatttcgatgccaagtctcccgccacgcagtcgtggctgaaagaactggcggaattgaaggcgttggatgtgcgcatgacggcggatgacggtttgaaaaacagcctaaatgccgtccgcgcctatcgcgacggtacgcgcatgacggcggcggaaaatcaagaagcggaacaggcggcttccgaaccggcaaacgaaaacacagcttccgaaccggctgccgcatcggatgtgaagaccatagaagcaccgtccctgccttcggaacgcaaaccggaacagcctgcaaaaaaacagcccgtaccggaaaaggcagggcgttcgccgtccgctaaaggagaacgcgcatga

SEQ ID NO: 39269 - DNA, 957 bp, Neisseria meningitidis
atgaaagaatttgacttcatcaaacggtatttgcaaacaggcacggataaggatgtcgtattgggcataggcgacgatgcggcgattgtccgcccgcgtgaaggcttcgatttgtgtttcagtgcggatatgcttttgaaggacaggcatttttttgccgatgtcaaacctgaggacttggcttggaaggttttggccgtcaatatttcagatatggcggcgatgggcgcgataccgcgttgggtgttgttaagtgcggctttgcccgaattggatgaggtatggctggaacggttttgcggcagctttttcggtttggcaaaaaagtttggcgtaacgttaatcggcggcgatacgaccaagggcgatatggcgttcaatgtaaccattatcggcgaattgccgaagggtagggcattgcggcgtgatgcggcggttgcgggcgacgatatttgggtgtcggggcgtgtcggtatggcggcggcggctttgaactgccgtctgaaacggtgtgtgttgccggatgatgtgtttgccgaatgcgaacaaaagctgctccgccccgagccaagggttgggctggggcttgcgctgttgccgtttgcccgggcggcgcaggatgtttcagacggcctcgcgcaagatttggggcatatcctgaccgcttccggcgtgggggcggaaatttgggccgattcgctgccgtctttatccgtattgaaagatattttgccccgagcgcaatggctgtcttatactttggcgggcggcgacgattacgagctggtgtttaccgcgccggaaagttgccgcagccgcgtgcttgatgcggcagaacggtgcggcgtgccggtaacgcgcatcggcaaaatcaacggaggatgccgtctgaaggttttagatgccgacggcagggaattggaactacattctttaggattcgatcattttggctga

SEQ ID NO: 39270 - DNA, 1167 bp, Neisseria meningitidis
atgaatttacacgagtatcaggctaaagaactgctggctagctacggtttgcccgtacaaggcggtattttggcacacaacggcgaagaagccgctgcagcttacgacaaattgggcggcaaattcgctgttgtcaaagcacaagtacacgccggcggccgcggtaaagcgggcggcgtaaaagtcgttaaaagccgcgaagaagctaaagaagtggctgaaagcctgattggcaccaacttggtaacttaccaaactgatgccaacggccaacctgtcaacagcgttttggtttgcgaagacatgtatcctgttcaaaccgagctgtacttgggcgcagtggttgaccgttctacccgccgcgttacattcatggcttctaccgaaggtggcgtagaaatcgaaaaagttgctgccgaaactccagaaaaaatcttcaaagtaaccgttgatccgctggtcggcctgcaaccttgccaagctcgcgaagttgccttccaactgggcttgaaagacaaacaaatcaacgagttcgtcaaactgatgaccggcgcgtacaaagcgtttgtcgaaaacgacttcgccctgtttgaagtcaacccgctggcagttcgcgaaaacggcgcactggcttgcgtggacggcaaaatcggcatcgacagcaacgcgctctaccgcctgccaaaaatcgctgaattgcgcgacaaatctcaagaaaacgaacgtgaactgaaagcttctgaattcgacctgaactatgttgccctggaaggcaacatcggctgtatggtgaacggcgcaggtttggcgatggctactatggacatcatcaaactgaaaggcggccaacctgccaacttcttggacgttggtggcggcgcaaccaaagaccgcgtggttgaagcgttcaaactgattttggaagacaaatccgttaaaggagtattgatcaacatcttcggcggtatcgtacgttgcgacatgattgcggaagccatcgtggcagccgttaaagaaatcaacgtcaacgttcctgtcgttgttcgtttggaaggtaacaacgccgaactcggcgcgaaaatcctgaacgaatcaggtctgaaactgacttccgccgacggcctgaatgacgcagccgaaaaaattgttgcagccgtaaacgcctaa

SEQ ID NO: 39271 - DNA, 582 bp, Neisseria meningitidis
atggataatcaagaaatcaacaatggccgccgccgtttcctgacactcgcgacctgcggcgcgggcggagtggcagcattgggtgtggcaacgccgtttgtggccagttttttcccttcggaaaaagccaaggccgccggtgctgccgtcgaggtggatgtcagtaaaatcgaagcgggtcagctgctgaccgccgagtggcaaggcaaaccgatttgggtgctcaaccgtacagatcagcagcttaaagacctgaaaggcctgaacggcgaacttaccgatcccaattccgatgcggaacagcagccggagtatgctaaaaacgagacccgttcgattaagccgaacatccttgtcgccatcggtatctgcacccatttgggctgctcgcccaccttccgtcccgacattgcccccgccgatttgggtgcagactggaaaggcggcttcttctgcccctgccacggttcgaaattcgacttggccggccgcgtatataaaggtgttcctgccccgaccaacctggttgtcccgccatataaatacttgagcgacacaactatcttggtgggcgaagactaa

SEQ ID NO: 39272 - DNA, 474 bp, Neisseria meningitidis
atgtcccgcaataccgaagagctgcaaggcatctcgcttttgggtaatcaaaaaacccaatatccgatcggctacgcgcctgaaattctcgaagcattcgacaacaaacatcccgacaacgactatttcgtcaaattcgtctgcccagagttcaccagcctctgccccatgaccgggcagcccgacttcgccaccatttacatccgctatattccgcacatcaaaatggtggaaagcaaatccctgaaactctacctcttcagcttccgcaaccacggcgattttcatgaagactgtgtcaacatcatcatgaaagacctcattgccctgatggatccgaaatacatcgaagtattcggcgagttcacaccgcgcggcggcatcgccattcatccgtttgccaactacggcaaagcaggcaccgagtttgaagcattggcgcgtaaacgcttgttcgaacacgacagccaataa

SEQ ID NO: 39273 - DNA, 2262 bp, Neisseria meningitidis
ttgaaagtaaccaaacgagacggaagattagaagccattgatttggataagattcaccgtgtcgtcacttgggcggcggacggattggaaaatgtttccgtatctcaggtcgagttgaaatcgcacatccagttctacaacggcatccgcaccgacgacatccacgaaaccatcatcaaagccgctgccgatttaatttcggaagataccccggactaccaataccttgccgcgcgtttggcgattttccatcttcgtaaaatagcctacggcgagtacgagccgccgcacctttacgaccacgttaaaaaacttaccgatgccggaaaatacgacaggcatatccttgaggattacagccgcgaagaatttgacgaactgaacgcctatatcgaccacgaacgcgatatgtccttttcctatgccgctgtcaaacagctcgaaggcaaatatctggtacagaaccgcgttacccgccaaatttacgaaacgccgcagtttttatatgttttggtggcgatgtgccttttcagcaaatacccgaaagaggcgcgcttgggttacgtcaaacggttttacgatgccgtttctacatttaaagtatcgctgccgactccgattatgagcggcgtgcgtacgcctacgcgccagttctcaagctgtgtgctgattgaatgcgacgatagtttggattccatcaatgccactaccagcgcgattgtgaaatacgtttcccagcgtgcgggcatcggcatcaatgccggacgtatccgcggtttggacagcgaaatccggggcggcgaagcgcggcataccggctgcattcccttctttaaaatgtttcaggcggcggtcaaatcctgttcgcaaggcggcgtgcgcggcggcgcggcaaccttgttctaccccttgtggcatatcgaagccgaaagcctgctggtgttgaaaaacaaccgcggtgtggaagacaaccgtatccgtcagcttgattacggcgtgcaaatcaaccgcctgctgtacacccgcctgattaagggcggcaacattacgctgttttcgcccaacgaggttccgggattgtacgaagcgttttttgccgaccaagacgaatttgagcggctctatacgaaatacgagcaagaccctgatatccgcaagcgcatcattccggctgccgacctgttttccacgctgatgcaggagcgtgccggaaccgggcgcatctacattcaaaacgtcgatcactgcaatacgcacagcccgttcgatccgcgcgtcgcgcctgttcatcagtccaacttgtgtatggaaatcgccctgccgaccaaaccgctggacaatatcaacgatccgaacggcgaaatcgccctgtgtacactgtctgcctttaacttgggcgcattaaacagcttggacgaattggaagggcttgccgacttgaccgttcgtgcgctcgatgcacttttagattatcagggatatccggtagaagccgcgcgtacctctactatgggccgccgttcgctcggcatcggcgtgattaactatgcttattatctggcgaaaaacggtgtccgctacagcgacggctccgcgctcggtctgacccaccgtacctttgaagccatacagtattacctgctcaaagcatcggcaaaccttgccaaagaatacggtgcgtgtacgctctttaaccaaaccgtttattcgcaaggcaaactgcccatcgacacctacaaaaaagatttggatgccgtctgcggcgagcctttgcattacgactgggaaagcctgcgtgccgaaatcgtcaaatacggcctgcgtaactctactctaaccgcactcatgccgtctgaaaccagttcgcaaatcgccaacgccaccaacggtatcgagccgccgcgcggattggtaacggtcaaagcatcaaaagacggtattttgaaacaagtcgtaccggaatttgaaaccctgaaagacgcctacgaaaccctgtggcagcttcccggcaacgaaggctacttgaaacttgtcggcgtaatgcaaaaattcgtcgatcaatcgatttccgccaataccgcctacgacccgaacaaattcgaaggcagcaaagtttccatgaaacaaatgctcaaagacttattgaccgcttacaaatacggcgtcaaaaccctgtactaccacaacacccgcgacggcgcggacgatacgcaagccgatattcaggatgacggctgcgcgggcggggcttgtaagatttaa

SEQ ID NO: 39274 - DNA, 966 bp, Neisseria meningitidis
atgttgcgtttgaccgcattgaccctctgcaccgtcctcgccttgggcgcgtgttcgccgaaagattccgactctgccccacaagccaaagaacaggcggtttccgccgcacaatccgaaagcgcgtccgttaccgtcaaaaccgcgcgcggcgatgttcaaataccgcaaaaccccgaacgtatcgccgtttacgatttgggtatgctcgacaccttgagcaaactgggcgtgaaaaccggtttgtccgtcgataaaaaccgcctgccgtatttagaggaatatttcaaaacgaccaaacccgccggaactttgttcgagccggactacgaaacgctcaatgcctacaagccgcagctcatcatcatcggcagccgcgccgccaaggcgtttgacaaattgaacgaaatcgcgccgaccatcgaaatgaccgccgataccgccaacctcaaagaaagtgccaaagagcgtatcgacgcgctggcgcaaatcttcggcaaacaggcggaagccgacaagctgaaggcggaaatcgacgcgtcttttgaagccgcgaaaactgccgcgcaaggcaaaggcaaaggtttggtgattttggtcaacggcggcaagatgtcggctttcggcccgtcttcacgactgggcggctggctgcacaaagacatcggcgttcccgctgttgacgaagccatcaaagaaggcagccacggccagcccgtcagctttgaatacctgaaagagaaaaatcccgactggctgttcgtcctcgaccgaagcgcggccatcggtgaagagggtcaggcggcgaaagacgtgttgaataatccgctggttgccgaaacaaccgcctggaaaaaaagacaagtcgtttacctcgttcctgaaacttatttggcggccggcggcgcgcaagagctgctgaatgcaagcaaacaggttgcggatgcttttaacgccgcgaaataa

SEQ ID NO: 39275 - DNA, 1221 bp, Neisseria meningitidis
atggctgtcaacctgactgaaaaaaccgccgaacaactgcccgacatcgacggcattgccctctacaccgcccaagcaggcgtgaagaagcccgggcataccgacctgacactgattgccgtagccgccggcagcaccgtcggtgcagtcttcacgaccaaccgtttctgtgccgcgcccgtccacatcgccaaatcgcaccttttcgacgaagacggcgtgcgcgccctcatcatcaacacgggcaacgccaacgcgggtacgggcgcacagggcagaatcgatgctttggcagtgtgtgccgccgccgcccggcaaatcggctgcaaaccgaaccaggtgctgcccttctccaccggcgtgattctcgaaccgctgcccgcagacaaaatcatcgccgcgctgcccaaaatgcagcctgccttctggaacgaagcggcacgcgccatcatgaccaccgacaccgtgcccaaagccgcctcgcgcgaaggcaaggtcggcgacaaacacaccgtccgcgccacgggcatcgccaaaggctcgggcatgattcatcccaatatggcgaccatgctcggtttcatcgccaccgatgccaaagtttcccaacccgtcctccaactgatgacgcaggaaatcgccgacgaaaccttcaacaccatcaccgttgacggcgacaccagcaccaacgacagcttcgtcatcatcgccaccggcaaaaacagccaaagcgaaatcgacaacatcgccgacccgcgttacgcccaactcaaagaattgttgtgcagcctcgcgctcgaactcgcccaagccatcgtccgcgacggcgaaggtgcgaccaagttcatcaccgtccgcgtcgaaaacgccaaaacccgcgacgaagcccgccaagccgcctacgccgtggcacgttcgccgctggtcaaaaccgcctttttcgcctccgaccccaacctcggcaggctgctcgccgccatcggttatgccggcgttgccgacctcgatactgacctcgtggaaatgtatctcgacgatattttggttgccgaacacggcggacgcgccgcaagctacaccgaagcacaagggcaggcggtgatgtcgaaggccgaaatcaccgtccgcatcaagctgcatcgcggacaaagtgccgccaccgtctatacctgcgacctgtcgcacggatacgtttccatcaacgccgactaccgttcctga

SEQ ID NO: 39276 - DNA, 813 bp, Neisseria meningitidis
atggaaaatatcggcaggcagcgacccatcggcgtttttgactcgggaatcggcggtttgaccaatgtgcgagcgctgatggaacggctaccgatggagaacatcatttatttcggcgacacggcgcgcgtgccttacgggacgaaatctaaggcgaccatcgaaaatttctcgatgcagattgtcgattttttattggaacacgatgtcaaggcgatggttatcgcgtgcaatacgattgcggcggtggcggggcagaaaatccgtcaaaaaaccggcaatatgcccgttttggacgtgatttccgccggcgcgaaagccgcgctggcaacgacgcgcaacaataaaatcggcattatcgccaccaatacgacagtcaacagcaacgcctatgcgcgcgccatccacaggaacaaccccgatacgctcgtccgcacgcaggccgcgccgctgctcgtccctttggtggaggaaggttggttggaacatgaagttacccgcctgaccgtatgcgaatacctcaaaccattgcttgcggacggcatcgatacgctggtgttgggctgcacgcactttcccttgctcaaacccttaatcggcagggaggcgcacaatgtcgcactggtcgattccgcgattacgactgccgaagaaaccgcacgcgtccttgcgcaggagggattactcaataccgacaacaacaatcccgactaccgtttttatgtcagcgatattcctttgaaattcagaaccatcggcgagcgttttctgggcaggacgatggagcagattgaaatggtgtctttgggttag

SEQ ID NO: 39277 - DNA, 372 bp, Neisseria meningitidis
atgaaacttctctccaccctcttagtcctccttgtcaccgccgaacatttctacatcgcctggcttgaaatgacgcagattcccagcgaaaaagcggcggaaatattcaagctgccttatgaatttatggaacaaaagcgcgtgcagaccctgttcggcaaccaagggctgtataacggctttctcggcatcgggctggtgtggtcgcggtttgccgctccggataacgcggtgtacggcgcaacggtactgtttctcggcttcgtcctgattgccgccgcgtggggcgcgttctcttccggcaacaaaggcatactcgtcaaacaaggtttgcccgcatttttggcagcggcggcggtgttggcggtatga

SEQ ID NO: 39278 - DNA, 1992 bp, Neisseria meningitidis
  misc_feature 8, 9, 10, 11, 12: 'n' is a, c, g or t
gtgtgtgnnnnngaactgacgctccgaggcatgatactcggtgcattgatcactgtaatttttactgcgtccaacgtttacctcggtttgaaagtcgggctgacctttgcctcgtcgattccggcggcggtaatttcgatggcggttttaaagtttttcaaaggcagcaatattttggaaaacaacatggtgcagacccaagcttcggcggcgggtacgctttcgaccatcatcttcgtcctgcccggtttgctgatggcgggctactggagcggtttcccgttctggcagacgacgcttttatgtattgccggcgggattttgggggtgattttcaccattccgctgcgttacgcgatggtggtgaaaagcgatttgccttatccggaaggtgtggcggctgctgaaattttgaaagtgggcggtcatgaagaaggggataaccgtcagggcggcagcggcatcaaagagctggcggccggcggtgcgttggcgggattgatgagcttttgcgccggaggtctgcgcgtgattgccgacagcgcgagttattggtttaaaagcggtacggcgattttccagctgccgatgggcttttcactggcattgttgggcgcgggctatttggtcggactgacgggcggtatcgccatcctgttgggcatttcgattgcttggggcattgccgtgccgtatttctcctcacacattccgcaaccttccgatatggaaatggcggcgtttgcgatgaagctgtggaaggagaaagtgcgttttatcggtgcggggactattggcattgcggcggtttggacgctgttgatgctgctcaagccgatggtggaaggcatgaagatgtcgttcaagagttttggcggcggtgcgcccgctgcggaacgcgccgaacaagatttgtcgcctaaagccatgattttttgggtgctggcgatgatgtttgttttaggcgtgtcgttttaccactttatcggcgattcgcacattacgggcggcatggcttggcttttggtggtcgtttgcacgcttttggcttccgtcatcggctttttggtcgccgccgcctgcggttatatggcaggtttggtcggctcgtcttccagcccgatttccggcgtgggcatcgtgtccgtcgtcgttatttcactggttttgctgctggtaggcgaatccggaggtttgttggcggatgaggctaaccgcaaatttttgctggcactgactttgttttgcggctcggcagtaatctgcgtggcttcgatttccaatgacaacctgcaagacttgaaaaccggctacctgctcaaagccacgccttggcggcagcaagtcgccctgattatcggctgtatcgttggtgcgctggttatttcgcccgtgttggaactgctttacgaagcctacggctttaccggcgcaatgccgcgcgaaggcatggatgcggcgcaggctttggcagctcctcaagcgactttgatgacgaccatcgcgtcgggcattttcgcccacaacctcgaatgggtctacatctttaccggcatcgcgatcggcgcggtattaatcgtcgtcgatttggtgttgaaaaaatcatcaggcggcaaacttgccctgcccgtccttgcggtcggtatgggtatttatctgccgccgtccgtcaatatgcccatcgtggcaggcgcggtgttggcggcggtgttgaaacacatcatcggtaaaaaagcggaaaaccgcgaaggccgtctgaaaaacgccgagcgtatcggaaccttgttctccgccggcctgattgtcggtgaaagcctgatcggtgtgattatggcgtttattattgccttctccgtgaccaacggcggctcggatgcgccgcttgcgttgaatctgcaaaactgggatgccgccgcttcttggttgggtttggcgttcttcgttaccgggatgtttttctttgcacagcgcgtactgaaggcgggcaagtag

SEQ ID NO: 39279 - DNA, 702 bp, Neisseria meningitidis
atgttccgcatcgtcaaatggctgattgccctgcccgtcggcatctttatctttttcaatgcctatgtgtacggcaacatcattacctaccgcgccgtcgcgccccatcagactgcctttatgtcgatgcggatgaagcagtttgaacaggaaggtcgcgatgtcgcactggattaccgctggatgccctacaaccgcatctcggtcaacctgaaaaaagccctgattgcttccgaagatgcccgtttcgccgggcacggcggcttcgattggggcggcattcaaaacgccatcaggcgcaaccggaacagcggcaaagtgaaggcgggcggctcgaccatcagccagcagcttgccaaaaacctcttcctcaacgaaagccgcagctatatccgcaaaggcgaagaagcggcgattaccgcgatgatggaagccgttaccgacaaagacaggatttttgaactgtatttaaactcaatcgaatggcactacggcgttttcggcgcggaagccgcgtcccggtatttttatcaaatacccgccgccaagctgaccaaacagcaggcggcaaaactgacggcgcgcgtccccgccccgctctactacgccgaccatccgaaaagcaaacggctccgcaacaaaaccaatatcgtgctcagacgcatgggttcggcagagttgcctgaaagcgacacggactga

SEQ ID NO: 39280 - DNA, 483 bp, Neisseria meningitidis
atggctatcgtgaaaaattccgtggtttcgctgcattatgagatgtatgatgccaacaatcagcttttggacaaaaccgaagaaccgattgcgtatctgcacggcggttacgacggcattttccctttggtggaagaggcgttgcacggtaaggatgccggcgatacggtcgatgtggcgctgtcgcccgacgatgcgttcggcgagcaggatccggagttggtccgtattgaagatgcgggcgtgttccctgttgaagtcgaagtcggcatgatgtttgaagccgacgatcctgaaaccggcgatgttgtcgtctatcgtgtaaccgatgttgccgacggcaaggcggtggtggacggcaaccatcctttggcaggcatgaaaatccgctttaaggctacggttgaaagcgtgcgcgatgcatccgatgaggaaatcgcacacggccatgtccacggcccgcacggtcatcaccaccactga

SEQ ID NO: 39281 - DNA, 1296 bp, Neisseria meningitidis
atgattcgccctgattttcaagaatatctgccttcttattatttcagttcggttaatcctcatactgtttatccgaaacttcaatgccgtctgaaaaccgatacctgtatcatcggcggcggattgagtggtttgtgcactgcattgcccttggcggagcagggacatgaaacggttgtgttggaagccgcgcgtatcggtttcggcgcgtcgggacggagtggcgggcaggttatcagcgattacgcctgcggtatggaggaaattgaaaaacaggtcggtttggagcaagcgcaatggttttggcaacagtctttgcaggcggtcgaactggtggacgaacgcgtccgcaaacatgccattgattgcgattggcagcgcggttatgccacggttgccatccgttcgcagcattgggaagaattgcaacaatggcatgagcacgcccaaaaatattacggtgcaactcattatcaactctgggataacactgaactgaagcagcagcttgacagcgatatgtaccaaggcgcacagttcgatcccttgtccgggcatctccatccgctcaattacacgttgggcatcgcccgcgccgctgccgaagctggtacgaagatttttgagcattctcccatgatacgcattgaaccttatcaaaacggttggctggtttacacccccgaaggcagcgtcgaatgcaaaaatctggtgtatgccgtcaatacctatgcaggtttgaacccgatattccagcctttggaacgcaaggcgattgccgttagcacctttattattgcgaccgaacccttgggggcgcgcgcaaaagggcttatccgtaacaatatggcagtatgcgacaaccgccatattttggattattaccgcctcagcgcggacggcagactgcttttcggcggtaaggataacgagtttatcgacaatcctgcgcgtatgaccgagcttgtccgccaagatatgcttaaagtttttccgcagcttgacgatgtcaaaatcgaatattcgtggggcggggagtgcgacattaccgccaaccttgtcccgcatttcggacgtttggccgcaaatgttttttatgcacaaggttattccggacacgggatggcgataacaggcattgcaggtctggcggttgccgaagcaattttaggggacgaatgccgtctgaagccgtttgagcggttgcgccagccgaatattatcctgcaaccgtttttgcgcaaactcggttctttcctcggctcgaaatattatcagtggaaagacagccgttaa

SEQ ID NO: 39282 - DNA, 312 bp, Neisseria meningitidis
atgaaaatgcacaatcctgcccacccgggccttgttttaaaagagtatattaacggtgcaagcattaccgatatagcgaaacgcctgggtgtcagccgggttgccttatcgcgcattgtcaacgcccaatcttcgattacgcccgagatggcggttcgtttaagccaactgctcaatacttcgcctgatttttggctgaatatgcaggccggttatgatttgtggcaaatcaggcaacgcaaaacttttgatattgcgcccttatttcccgaaccgcctttgtcttcgatgcaaacaggtgcaagggcttaa

SEQ ID NO: 39283 - DNA, 549 bp, Neisseria meningitidis; identical to SEQ ID NO: 36303

SEQ ID NO: 39284 - DNA, 669 bp, Neisseria meningitidis
atgaaaaacctcgccatcttcgacctcgacaacaccctcatcaacaccgattccgaccacgcctggccgcaatacctcatcaaaaaaggcttggttgacgctgccgaaaccgaagcgcaaaacgaaaaattctaccgcgactaccaaaacggctgcctcgacatcgacgcattcctcaaattccacctcgccccgctcgcccgttacagcaaagaagagctggcggaatttcaccgcgaatttatggcggaatacatcatcccccacatctcgcctatgcagcgtatgctagtgcagagccaccaaatggcaggcgacgaaacccttgtgatttcctcaaccaacgagttcatcatcacccccgtctgccaccttttcggcattaccaacatcatcggcacacaactcgaatccggttccgacggccgctacaccggcaattacatcggcacgcccagcctcaaagaaggcaaaatcacccgcctgaaccaatggctcgccgaacgcggcgaaacgctcgaaagctacggcaaaacctatttttacagcgactccaaaaacgacctgccgctgctgcgcctcgtcgacgaacccgtcgccgtcaaccccgatgccgagctggaagaagaagccaaagaaaaaggctggccggttttaaatttcaaatga

SEQ ID NO: 39285 - DNA, 480 bp, Neisseria meningitidis
atgaaacacatactccccctgattgccgcatccgcactctgcatttcaaccgcttcggcacatcctgccagcgaaccgtccacccaaaacgaaaccgctatgaccacgcataccctcacctcaaaatacagttttgacgaaaccgtcagccgccttgaaaccgccataaaaagcaaagggatggacatttttgccgtcatcgaccatcaggaagccgcccgccgaaacggcttaacgatgcagccggcaaaagtcatcgtcttcggcacgcccaaagccggtacgccgctgatggtcaaagaccccgccttcgccctgcaactgcccctgcgcgtcctcgttaccgaaacggacggcaaagtacgcgccgcctataccgatacgcgcgccctcatcgccggcagccgcatcggtttcgacgaagtggcaaacactttggcaaacgccgaaaaactgatacaaaaaaccataggcgaataa

SEQ ID NO: 39286 - DNA, 1008 bp, Neisseria meningitidis
atgtatccacttgcccgccgcatcctgtttgcactcgatgccgagaaagcccaccacttcacgctcgacgcgctcaacatggtttataaattgggtctgattcccgtaaccggcaaccgtaccaaacctgtaaaactgatgggtttggatttgcccaaccctgtcgggcttgccgccggactcgataaaaacggcgaatatatagacgcattgggcgcgctcggcttcggtttcatcgaaatcggcacggtaacgcccaacccgcagcccggcaacccgcagccgcgcctcttccgcgttcccgaatatcaaggcatcatcaaccgcatgggcttcaacaaccacggcatcgatgccatgattcaaaacatcgaaaaaagtaaattcagcggcgtattgggcatcaacatcggcaaaaacgctgtaacaccgattgaaaacgctgccgatgattatttaatctgcctcgaaaaagcctacgcacacgcaagttacattaccgtcaatatttcctcgcccaacactaaaaacctccgcgcgctgcaaggtggcgacgagttgagcgcattgcttgaggctttgaaaaacaaacaggcacagcttgcctctgtacacgggaaatacgtcccgctcgccgtcaaaatcgcccccgatttggatgaagcacaaatcgaagacatcgcccacgttgtcaaatccgtcgaaatggacggcatcatcgctaccaataccaccatcgacaaatcaagtctcggcagccatccgctcgcaggcgagcagggcggtttgagcgggctgcccgttcatgaaaaaagtaatcgggtgttgaagctgttggcagaccacatcgacggcaagctgccgattatcggcgtaggcggcattatggaaggcagggacgcggcagagaaaatccgcttgggcgcaactgccgtccaggtgtacagcggattgatatacaaaggtccggcattggtcaaagaatgtttgaaggctttggcgcaatga

SEQ ID NO: 39287 - DNA, 1110 bp, Neisseria meningitidis; identical to SEQ ID NO: 38106

SEQ ID NO: 39288 - DNA, 648 bp, Neisseria meningitidis
atgaaaacaaaattttacaatcatcaaggcgaacatttaatcctgtattttgcaggttggggaacgccgcccgatgctgtaaatcatttgattttgccggaaaatcacgatttattgatttgctatgattatcaagatttaaatttggattttgatttttccgcctatcggcacatccgtttggtggcgtggtcaatgggcgtttgggcggcagagagggcattgcaaggaataagattaaaatccgcaacggcagtgaatggcacaggtttgccttgcgatgataatttcggtatcccttgcgccgtttttaaaggcacattggagaacctcacggaaaacacccgtttaaaatttgaacgcagaatgtgtggcgataaagtatcttttgaagattaccaacaatttcccgcacgcccgtttgacgaaattcatcaagaacttaccgcactttttgagatgatcgggcaagataggcgcgcagatttgattcgctggacaaatgccttggtcggatcaggcgataaaatttttatgcctgccaatcagcaccgatattggacaccgcgttgcaccgttcgggaaattgacggcggacattacctgttttcaagattcacccattggtcggcactatggaatcactga

SEQ ID NO: 39289 - DNA, 1836 bp, Neisseria meningitidis
gtgaacactactcctatccactccaaactcgccgaaatcaccgggcgcattattgaacgcagccgtccgacgcgtgaaaaatatctggcgaaaatccgtagtgccaaacagatgggacgcttagagcgcaaccaactcggctgcagcaatttggcgcacggctacgcctccatgcccaaaagcatcaaaatcgaaatgcttcaggacaccgttcccaacttaggcatcatcaccgcctacaacgacatggtttccgcacaccagccgtttaaagacttccctgaccaaatcaaagacgaagcgcagaaaaacggcgcaaccgcgcaagttgccggcggtacgcccgccatgtgtgacggtattacccaaggctatgccggcatggaattgtcgctgttctcccgcgacgtaattgccatgagtactgctgtcggtctgtctcatcaaatgtttgacggcagcctgtttatgggcgtgtgcgacaaaatcgttcccggtttgatgatcggtgcgttgtctttcggccatattccgggtatcttcgtccccgcaggcccgatgtccagcggtatcggcaacaaagaaaaagcccgcacccgccagcttttcgccgaaggcaaggtcggacgcaacgaacttttgaaaagcgaaatgggttcttaccacagcccgggcacctgcactttctacggcacggcaaactccaaccaaatgatgatggaaatgatgggcgtgcacctgcctgccgccgccttcgtccacccttacaccgacctgcgtgaagccctgacccgctatgccgccggacacctcgcacgcggcatcaaaaacggcacgattaaaccattgggcgaaatgttgaccgagaaatccttcattaacgccctaatcggcctgatggcaaccggcggctcaaccaaccacaccatgcacctcgttgccatggcacgcgccgccggcgtgattttgaactgggacgactttgacgaaatttcttccatcatcccattgctgatccgtgtgtaccccaacggcaaagccgacgtaaaccactttaccgctgccggcggtctacctttcgttatccgcgaattgctggacgcaggcctgttgcacgacgatgtcgataccgttgtcggacacggtatgcgccactacaccaaagagcctttccttatcgacggcaaactcgaatggcgcgaagcccccgaaaccagcggcaacgacgacatcctgcgcaaagccggcaacccgttctcccccgacggcggtctgcgcctgatgaaaggcaacatcggtcgcggcgtgattaaagtgtccgccgtgcgcgaaggctgccgcatcatcgaagcacctgccatcgtgttcaacgaccaacgcgaagtattgtccgcatttgaacgcggcgagttggaacgcgatttcgtctgcgtcgtccgctaccaaggcccgcgtgccaacggtatgcccgaattgcacaaactgaccccgcctttgggcatcctgcaagaccgcggcttcaaagtggcactgctgaccgacggtcgtatgtccggcgcgtccggcaaagttccagcctccatccacatgacacccgaagccctgatgggcggcaacatcgccaaaatccgtaccggcgacctgatccgcttcgactccgttagcggcgaactcaacgtcctgattgacgaagccgaatggaacgcccgcgaagtcgaacacatcgacttgggcgcgaaccaacaaggctgcggtcgcgaactcttcgccggcttccgcagtttgaccggcggcgcggaaaccggcgcgatgagcttcggcggcgaatttgcctga

SEQ ID NO: 39290 - DNA, 474 bp, Neisseria meningitidis
atgaaaaaattattggcagccgtgatgatggcaggtttggcaggcgcggtttccgcggccggagtccacgtcgaggacggctgggcgcgcaccaccgtcgaaggtatgaaaataggcggcgcgttcatgaaaatccacaacgacgaagccaaacaagactttttgctcggcggaagcagccccgttgccgaccgcgtcgaagtgcatacccacatcaacgacaacggcgtgatgcggatgcgcgaagtcaaaggcggcgtgcctttggaggcgaaatccgttaccgaactcaagcccggcagctatcacgtgatgtttatgggtttgaaaaaacaattaaaagagggcgacaagattcccgttaccctgaaatttaaaaacgccaaagcgcaaaccgtccaactggaagtcaaaaccgcgccgatgccggcaatgaaccacggtcatcaccacggcgaagcgcatcagcactaa

SEQ ID NO: 39291 - DNA, 1110 bp, Neisseria meningitidis; identical to SEQ ID NO: 38106

SEQ ID NO: 39292 - DNA, 1056 bp, Neisseria meningitidis
atgacacaccattaccccacagacgatattaagattaaagaagttaaagagttgttgccgccgattgcccatctttacgagctgccgatttccaaagaggcttcgggcttggttcaccgcacccgtcaggaaatttccgatttggttcacggcagggacaagcggctgttggttattatcgggccgtgttcgattcacgatccgaaagcggcgttggaatatgcggagcgtttgttgaaactccgcaagcagtatgaaaacgagcttttgattgtgatgcgcgtttatttcgagaagccgaggacgacggtgggttggaaaggtttgattaacgacccgcatttggacggtacgttcgatatcaatttcggtttgcgtcaggcgcgcagcctgttgttgtcgctgaacaatatgggtatgcctgcctctaccgagtttttggatatgattacgccgcaatattatgcggacttgatttcttggggggcaatcggtgcgcggacgaccgaaagccaagttcaccgcgaattggcaagcgggctgtcctgccccgtcggctttaaaaacggtacggacggcaatttgaagattgccatcgacgcaatcggtgcggcgagccattcgcatcatttcttgtctgtaaccaaggccggacattccgccattgtccataccggcggcaatcccgactgtcatgtcattttgcgcggcggaaaagagccgaattatgatgcgggacacgtcagcgaggcggcggaacaactgcgtgcggcaggggtaaccgataagctgatgatagattgcagccacgccaacagccgcaaggattacacccggcagatggaagtggcacaagatattgctgcccaattggaacaggacgggagcaatattatgggcgtgatggtggaaagccatttggtcgaaggcagacaggataagccggaagtgtacggcaaaagcattaccgatgcgtgtatcggttggggcgcgactgaagaactgttggcattgttggcaggtgcaaacaaaaaacgtatggcgcgcgccagttga

SEQ ID NO: 39293 - DNA, 564 bp, Neisseria meningitidis
atgaaactcatcattctcgaccgcgacggcgtcatcaatcaggaccgcgacaacttcgtcaaatccgttgacgagtggatacctgtcgaaggcagcatggatgcggtggcatttctgacgcaggcaggctacaccgtcgccgttgccaccaaccaatccggcatcgggcgcaaatattttaccgttcaaaaccttaccgaaatgcacgccaaaatgcaccgcctcgtccgtcaggcaggcggcgaaatcaacggcatctggttctgcccgcacaccgatgccgacaactgcaactgccgcaagcccaaaccgggtatgattgaagacatcatcggacgcttcaacgcccaagcctcggaaacctggctggtcggcgacagcctgcgcgatttgcaggcaatcgatgccgtcggcggaaaacccgcgctggttctgaccggaaaaggcaaaaaaacgctctcccaacacggacacgaattacccgaacacacacaggttttcgataccttgctcgatttctcacaatacatcatgcaggaaaacgccgcaccgcaagccgactga

SEQ ID NO: 39294 - DNA, 813 bp, Neisseria meningitidis
atggacaaaatcagagttgccgccgtgcagatggtgtcgggcgtgtcgccggaaaccaacgtcgctgccatgaaacgcctggtcgcacgggcggcggagcagggtgtggattgggtgctgctgcccgaatattgggtgctgatgggcgcaaacgataccgacaaactcgcgcttgccgagcctttgggcggcggacgctttcagacggcattgagcgaaacggcgaaagaatgcggcgtggtgctgttcggcggaaccgtgccgctgcaaagccccgaggcgggcaaggtcatgaatactttattggtgtacgggcgcgacggcaaacggacggggctgtaccacaaaatgcacctcttcggcttttccggtttgggcgaacgctatgccgaagccgataccatccgcgcgggcggggatgtgccgcacttgtcggcagaaggcgtgtcggtggcggcgggcatttgttacgatgtccgctttcccgaatttttccgccgccagctgccgtttgacgtattgatgctgcccgctgcgtttacgcacacgacgggcaaggcgcattgggagctgctgctgcgcgcgcgtgccgtcgaaaaccaatgttacgtcgtggcggcggcacagggcggtttgcacgaaaacggacggcgcacgttcggacacagcatgattgtcgatccgtggggcgacgtgttggacgtattgcccgaaggcgaaggcgttgttacggcagacatcgatgccaatcgcctgaacagcgtccgcaaccgcctgctcgccttgaaataccgggttttggatgccgtctga

SEQ ID NO: 39295 - DNA, 186 bp, Neisseria meningitidis; identical to SEQ ID NO: 37143

SEQ ID NO: 39296 - DNA, 1578 bp, Neisseria meningitidis; identical to SEQ ID NO: 39126
  misc_feature 6, 7, 8, 9, 10: 'n' is a, c, g or t

SEQ ID NO: 39297 - DNA, 2295 bp, Neisseria meningitidis
  misc_feature 4, 5, 6, 7, 8: 'n' is a, c, g or t
gtgnnnnncgaattggaacagattttgcagcagctttaccgcgaggcgcgtaaggctcattatgaatttatcagcctcgagcatctgcttttggtactcatcgaagaagatgcctccgtgccgaacgtcttaaaactatgcggcgcggatttgaaagtggtgtccgaacagctcgccgccagcgttgccgaaaacacccccctgattcccgaacaccttttagacacggtcgaaacacggcccacgctcggcttccaacgcgtgatgcaacgggcgatggtgcatacccaatcggcaggcaaagccgcagtcgaaccgttggacgttttggtcgcgctgatgagcgaaaccgacagccacaccgtctatttcctcaagctgcaatcggttacgcgttttgaagttttgcgctgtattgcccacggctctcccgatgaagatgaagatgaagacgatggcaactattcttcagacggcatggacgacgataatggaaaccgcaccaaaccgggcaaaaaccctttatcggcgtacaccgtcaacctcaacaccgaagtcaaagccggccgtatcgaccctttgattggtcgcaaacacgaaatggaacggctggtgcaaatcctatgccgccgccgcaaaaacaatccgcttttggtcggcgaagcaggcgtgggcaaaaccgcgctggcggaaggtttggcacatcaaatcgtcaacggcggcattccagacgcgcttaaagatgccgaagtgtacgcgctggatatgggctcgctgttggcgggcacgaaataccgtggcgactttgaagcgcgggtcaaatccgtcttgaaacagctcgaaaaaatcccgcacgccattttgtttatcgacgaaatccacaccatcatcggcgcaggcagcaccagcggcggcaccatggacgcgtccaacctgctcaaacccgcgctggcaaaaggttcgctgcgctgcatcggcgcaaccacctacgacgaataccgcaccattttcgacaaagactatgccttaagccgccgcttccaaaaaatcgacgtggtcgaacccaccgtttccgaaaccgttcaaatcctgcgcggcttgaaaccgatgtttgaagccttccaccaagtccgctacactcaaggcgcactcgaagccgccgccgaactctccgcacgctacatcaacgagcgtttcctgcccgacaaagccatcgacgtaatggatgaagcaggcgcggcgcaacggattctgcccaaatccaaacagaaaaaagtcatcggcaaagcacaaatcgaaaccgtcatcgccaaagtttcgcggattcccgaaaaaaccgtgtcgcacgacgacaaacaagtgctgcaattcctcggtcgcgatttgaaaaacatggtttacggtcaagaaaacgccatcgacgcgctggttgccgccgtcaaaatgtcgcgttccggccttgccctgcccgacaaaccgataggcagcttcctcttctccggcccgaccggcgtgggcaaaaccgaagccgccaaacagcttgcctactcgctgggcgtaccgctgcaacgctttgatatgtccgaatacatggaacgccatgccgtatcgcgcctcatcggcgcgccaccgggctacgtcggctttgaacaaggcggccttttgaccgaagccgtcaacaaacagccgcattgcgtattgctcttggacgaaatcgaaaaagcccaccccgacattttcaacgtcctcctgcaagtcatggacgcaggcaaactgaccgacaacaacggcaagagtgccgatttccgcaacgtcatcctgattatgaccaccaacgcaggcgcggaaagcctcagccgccccagcctcggctttaccgccaagcgcgaacgcggcgacgaaatgcaggcaatcaacaagctcttcacgcccgagttccgcaaccgcttggacgcgattatcccgtttgcacccttgtccgaacccatcatcgtcaaagtcgtggacaaattcctgctccagctcgaacaccagctcctcgacaaaaaagtcgaagccgaattcacgtcggcattgcacaaatatctggcggaaaaaggtttcgacccgcaaatgggcgcgcgcccgatgcaccgcctgattcaggaaaaaatccgcaaaccgctcgccgacgaactcctgttcggcaaactatccgacggcggcttcgtgcggatagactgggatgcggtaaaagaagaagccgtgttgaagtttaagaaaagcaaggtcaaaataaaaaccgcctccgcgtaa

SEQ ID NO: 39298 - DNA, 3204 bp, Neisseria meningitidis
atggctaaattttttatcgaccgccctatttttgcgtgggttatttcgattttcattattgcggcgggtattttcggcatcaaaagcctgcctgtttcgcaatatccgtctgtcgccgccccgaccattactttgcacgccacttatccgggcgcgtccgcacaagtgatggaagacagcgtactttccgttatcgagcggaatatgaacggcgtggaaggtttggattatatgtccacttccgccgattcgagcggcagcggcagcgtgagcctgacctttacgcccgataccgacgagaatctggcgcaggtggaagtgcagaacaagctttccgaagtattgagcacgctgccggcaaccgtccagcaatacggcgtaaccgtatccaaggcgcgttccaatttcctgatgattgtgatgctttcgtcggatgtgcagtcaaccgaagagatgaacgactacgcgcagcgtaatatcgttcccgaactgcagcgtatcgaaggcgtggggcaggtacgcctgttcggcgcgcaacgcgcgatgcggatttgggttgatcctaagaaactgcaaaactacaatttgtcgtttgccgatatcggcagtgcgctgtccgcccagaacgtccagatttcagcgggttctatcggttcgcttcctgccgttcgcggacagacggttacggctaccgtaacggcgcaagggcagttgggtacggcagaagaattcggcaacgtcatcctccgcgccaataccgacggttctaatgtttacctgaaggatgtggcaagggtcggactgggtatggaagactattcttcctcaacccgtctgaacggtgtaaataccaccggtatggcggtgatgctgtccaacagcggcaatgcgatggcgacggcaaaggcggttaaagaacgcatggcgacgttggaaaaatactttcctcagggtatgagctggaaaaccccttacgatacttccaaattcgtcgaaatttcgattgaaaaagtgattcacactttaatcgaagcgatggtgctggtgtttgtcgtaatgtatctcttcctgcaaaacatccgttatacgctgattccgaccatcgtcgtaccgatttcgctgttgggcggtttcgccttcatctcttatatgggcatgtcgattaacgtactgaccatgtttgcgatggttttggtcatcggcatcgtggtcgatgacgcgattgtggtggttgaaaacgtcgagcgcattatggcgggtgaaggcttgccgcccaaagaagcgaccaaaaaagcgatgggtcagatttcgggcgcggtcatcggtattaccgccgttctgatttccgtgttcgtaccgttggcgatgttcagcggggcgacgggcaatatttacaaacagtttgccctgacgatggcgtcatcaatcgcattctccgccttccttgcgctgacccttacccctgctttgtgtgccacaatgttgaagacaatcccgaaagggcatcacgaagagaaaaaaggtttcttcggctggtttaacaagaaattcaacagttggacgcacggttacgaaggccgggttgccaaagtgctgcgtaagactttccgcatgatggttgtctatatcggcttggcggttgtgggcgtgttcctgtttatgcgcctgccgacttcattcctgccgaccgaagaccaaggcttcgtcatggtcagcgtgcaactgcctgcaggagcgacccaagagcgcaccaatgcgactttggcgcaagttacccaactggcgaaaagcattcctgaaatagaaaacatcattaccgtttccggcttcagcttttcgggcagcggtcagaatatggcgatgggttttgccatattgaaagattggaacgagcgtaccgcgcccggcagcgatgccgttgcgattgccggcaagctgacgggtatgatgatggggacgcttaaagacggttttggcatcgccgtcgtcccgcctccgattctggagttgggcaatggttcgggcctgagcatcaacctgcaagaccgcaataataccggccataccgcattgctggcgaagcgcaacgagttgattcagaaaatgcgtgccagcggtttgtttgaccccagcaccgtccgtgctggcggtttggaagactcgccgcagttgaaaatcgacatcaaccgtgccgccgcggcggcgcaaggcatttcgtttgccgacatccgcaccgcattggcaagtgcgctgagttcgtcttatgtcagcgacttcccgaaccaaggccgtctgcaacgcgtgatggtgcaggccgacgaggatgcccgtatgcagcctgccgatattttgaacctgaccgtgccgaacaaatccggcgtcgccgtaccgctttccaccattgctactgtttcttgggaaaacggtacggaacagagcgtacgcttcaacggttatccttcgatgaagctgtccgcttcgcctgcaaccggcgtttccaccgggcaggctatggcggcggttcaaaaaatggttgacgaattgggcggcggttacagcctggagtggggcggacagtcgcgcgaagaggcaaaaggcggctcgcaaaccctgattttgtacggtttggcggttgcagccgtatttttggtacttgccgcgctttatgaaagctggtcgattccgctggcggtcatccttgtgattccgttgggtttgatcggtgcggctgcgggcgtaaccgggcgcaacctgtttgaaggactgttgggcagcgttccctcgttcgccaacgacatctactttcaagtcggtttcgttaccgtgatgggtttgagtgcgaaaaacgcgattttgattatcgagtttgccaaagaccttcaagcgcaagggaaaagcgcggttgaagccgctttggaagcagcccgcctgcgtttccgtccgattatcatgacctcgttcgcctttattttgggcgtggttcccctgtatattgccggcggtgcaagttctgccagccagcgcgccattggtacaaccgtattctgggggatgctcatcggcacgctcttgtccgtgttccttgttccgcttttctatgtggtggtgcgcaaattcttcaaagaaactgcacacgagcatgaaatggcgatcagacatgcatcagaagcgggcataaccggttcgaacgacagccaacattaa

SEQ ID NO: 39299 - DNA, 687 bp, Neisseria meningitidis; identical to SEQ ID NO: 36558

SEQ ID NO: 39300 - DNA, 798 bp, Neisseria meningitidis
atgaaccgtctttacccccacccgattatcgcccgtgagggctggccgattattggcggcggtttggctttgagcctgctggtgtcgatgtgttgcggctggtggtctttgccgttttgggtgtttaccgtatttgccctgcagtttttccgcgaccctgcgcgtgagattccgcaaaatcctgaagcagtgttgagtccggttgacggccgtatcgtggtggtcgagcgcgcacgcgatccgtatcgtgatgtcgatgctttgaaaatcagtatttttatgaacgtgttcaacgtgcattcgcaaaaatcgcctgccgattgtacggtaacgaaagtggtctataacaaaggcaaattcgtgaatgcggatttggacaaagccagcacggaaaacgaacgcaatgcggtgttggcgactacggcttcaggtcgtgaaattacttttgttcaagtggccggtttggtggcgcgccgtattttgtgctacacccaagcaggtgcgaaactgtctcgcggcgaacgctatggctttatccgttttggctcgcgcgtggatatgtatctgcctgtcgatgcgcaggcgcaagtggcgattggcgataaagtaaacggtgtcagcactgtattggcgcgtttgccgctgactgcgccgcaaatcgaatccgagcctgaatctgagcctgctttacaaactgctccggttgaaacagcggcaaacccatctgccgaacaacggcaaatcgaggcagtggcggctaagattcaggcggctgtgcaagatgtgttgaaagattaa

SEQ ID NO: 39301 - DNA, 738 bp, Neisseria meningitidis
atgggcggacaaaaaacgcatttcgggtttagcacggtcaacgaagatgaaaaagccggcaaagtggcggaagtgttccactccgtcgccaaaaactacgacattatgaatgatgtcatgtcggcagggctgcacagggtgtggaagcatttcaccatcaacacggcgcacctgaaaaaaggcgataaagtgttggacattgcgggcggtacgggcgatttgtcgcgcggttgggcgaaacgggtcggcaaggaaggcgaggtttggctgaccgatattaattcctctatgctgaccgtcgggcgcgaccgtctgttgaacgaaggcatgattttgcccgtgtcgcttgccgatgcggaaaaactgcctttccctgacaattatttcaacttagtttccgtggcgttcggcttgcggaacatgacgcataaagatgccgcgctgaaagagatgtatcgtgttttgaaacctggcggcacgttgctggtgttggagttttccaaaatctacaagccgctcgaaggcgcgtatgatttctattcgttcaagctgctgccggtcatgggcaaactgattgccaaagatgcggagagttatcaatatctcgccgaatccatccgtatgcaccccgatcaggaaactttgaaacagatgatgctggatgcgggctttgacagcgtggattatcacaatatgagtgcgggcatcgtcgcgctgcataagggcgtgaaattttaa

SEQ ID NO: 39302 - DNA, 1404 bp, Neisseria meningitidis
atgaacaatcccgacttaccctatcggcaggccttggaacgcctgtctcaaaaacaatataactttaccgaagtccgccgactgctgacagaagcggcctcggcaggtcatcccgccgccgcattcgagttggcaaaacacctgatggacgcggacagcccctaccaagaccgcgaacaaggtatggaaatgctccgcatcgccgccgaacaggggcatccctatgcgcgttacaatctggcatatatccaagaattggaaggcgcgcccccggaaaccctgataccgctttacagaccgttggcagaagaaagactgcctgaagcacaagtccgcctgatgtacctgctgtatgcgtcccgacattttgaagaagccttggaatgggcaaaaacaagcacaaaaaacaacaatccccacgggcaatacctgctcgcccaatactgccggtacggcacaccgccggattttgaaacggcgcacctgctctaccgaaaagcggcggcacaaggcttgccggaagcacattggcagctcgggctgcaataccgtttcgggcaagggacgaaagtcgacacggcacaggccgtcaatcatttgcgcgccgccgcgcaacaaggatacattcccgcctacaccccgcttgccgaactcatcctacctacggctcccgatgaagccgtttaccggttccaacaggcggcacaggaaaatgaccccgatgcccatgccgcactggccgacatctacctacaaggcaaatatcaggaaagaaaccacaaacttgccctgcatcatgccgaagcagccgcagcagaacgccatcccgaaggtttgcggatactgggcgacatctgccgctacggtttgggcatagcccccgatacggaaaaagcccggcattattaccggcaggcagccgaagccggcagcctttccgcctatcagaaactcatatccgacagcgcgttaaaccatcccgaccaatacggcggcatcaaagattccgccatcaggcggcaaagggcagaacagctttatcaaaaagcccaagccctgcattacggattacaatgtgcgcccgaatacgcagccgcgctcaaactctacacagaagccgcagaactcggacacagcaaagcccaaaccaatctgggcagtatgtactacttcggacagggcatagccgccgactacggcaaagcccgcaaatggtttgaacaagccgccgcgcaaaaagacagtatggcgttctacaacctcgcctgcatccattacagcggacacggtgtcgggccggacaaagaaaaagcctgccgctacctgcaagaagccataaacaacggatacgggcaaaaaagcgtcctgcaagaactgctgcaacaatggcaaaatgccgtctga

SEQ ID NO: 39303 - DNA, 1134 bp, Neisseria meningitidis; identical to SEQ ID NO: 38916

SEQ ID NO: 39304 - DNA, 1065 bp, Neisseria meningitidis
atggcactcgtatccatgcgccaactgcttgatcatgctgccgaaaacagctacggcctgcccgcgttcaacgtcaacaacctcgaacaaatgcgcgccattatggaagccgccgaccaagtcaacgcgcccgtcatcgtacaggcgagtgcaggtgcgcgcaaatatgcgggcgcgccgtttttgcgccacctgattctggcggcagtcgaagaatttccgcacatccccgtcgtgatgcaccaagaccacggcgcatcgcccgacgtgtgccaacgctccatccaactgggcttttcctccgtgatgatggacggctcgctgatggaagacggcaaaaccccttcttcttatgaatacaacgtcaacgccacccgtaccgtggttaatttctcccacgcttgcggcgtatccgtcgaaggcgaaatcggcgtgttgggcaacctcgaaaccggcgaagccggcgaagaagacggtgtaggcgcagtgggcaaactttcgcacgaccaaatgctcaccagcgtcgaagatgccgtgcgtttcgttaaagataccggcgttgacgcattggcgattgccgtcggcaccagccacggcgcgtacaaattcacccgtccgcccacaggcgacgtgttgcgtatcgaccgcatcaaagaaatccaccaagccctgcccaatacacacatcgtgatgcacggctccagctccgttccgcaagaatggctgaaagtcatcaacgaatacggcggcaatatcggcgaaacctacggcgtgccggttgaagaaatcgtcgaaggcatcaaacacggcgtgcgtaaagtcaacatcgataccgacttgcgccttgcttccaccggcgcggtacgccgctaccttgccgaaaacccgtccgacttcgatccgcgcaaatatttgagcaaaaccattgaagcgatgaagcaaatctgcctcgaccgctacctcgcgttcggttgcgaaggtcaggcaggcaaaatcaaaccggtttccttggaaaaaatggcaaaccgttatgccaagggcgaattgaaccaaatcgtcaaataa

SEQ ID NO: 39305 - DNA, 363 bp, Neisseria meningitidis
atggatatccgatatttcggcacaacgccccgctattccgaagccgtcggcgcaaacggcttgattttcctctccggcatggttcccgaaaacggtgaaacggctgccgaacagactgccgacgtgcttgcccaaatcgaccgctggctggcggaatgcggctcggacaaagcgcacgttttggatgcggtcatctatctgcgcgatatgggcgactatgcggaaatgaacggcgtgtgggacgcttgggttgccgccggcagaacgcccgcccgcgcctgcgtggaagctcggctcgcccgtccggagtggtgcgtcgaaatcaaaataaccgccgtgaagaaagatgcggcaaccgcataa

SEQ ID NO: 39306 - DNA, 210 bp, Neisseria meningitidis
atgaactacttcggcatggtagagtttctgcgcctgatggcaatggtgcggccgccatttgtcttcttctccggcacccgcagcgaactgcctacttatcttgacctcgtggcagaactgcgcctgaccggatgggagcgttttgcaggcagccaaaccttgactgtgagcagcacatcaacagcaattcaagctacgacgaccacctga

SEQ ID NO: 39307 - DNA, 1407 bp, Neisseria meningitidis
atgaacgattacgcagccatgccgtctgaagaccgtgaggtcggcgcattgtcgctgcctccacattcgatggaggcggaacaatccgttttgggtgggttgatgctggaaaatccggcttgggacaggattgccgatgtggtttccggtgaagacttctaccgccacgaacaccgcctgattttccgatccattgccaaattaatcaatgagagccgtcccgcagatgtgattacggttcaggaagatttgcagcggaacgaagaattggaagcggcaggcggatttgaatatctgattacgctggcgcaaaacaccccgtctgccgccaacatccgccgctatgccgaaatcgtgcgcgagcgttccatcatgcgccagctcgccgaagtggggacggaaatcgcacgcagcgcatacaatccgcaaggcagggacgcggggcagcttttggacgaggcggaaaacaaagtattccaaatcgccgaaagcacggccaaatccaagcagggctttttggagatgcccgatttgctgaaagaagtcgtacagcgcatcgatatgctctactcgcgcgacaatcccgatgaagttaccggcgtgccgacggggttcatcgacctcgacaaaaaaacctcgggccttcagcccggcgacctgattattgttgccggtcgtccgtctatgggtaagaccgccttttccatcaatatcgccgaacacgttgccgtagaaggcaagctgccggttgccgtcttctcaatggagatgggcggggcgcaactggtcatgcgtatgctcggctcggtcggacgcttggatcaaagcgtcctgaaaaccggcaggctcgaagacgaacactggggtcgtctgaacgaagcagtcgtcaaactctccgacgcgcccgtgtacatcgacgagaccccgggtttgactgcgctcgaactgcgcgcccgcgcccgtcgtctcgcccgtcaatttaacaataagcttggattgatcgtcatcgactacctgcaactgatggcgggatccggccgttccgacaaccgagcttcagagctgggcgaaatttcacgttcgctcaaagcgttggcgaaagaattgcaagtccccatcatcgccctgtcgcaattgagccgtaccgtcgaatcgcgtaccgacaaacgcccgatgatgtccgacctccgcgaatccggtgctatcgaacaagatgccgacctgattatgttcatgtaccgcgacgaatactacaaccaggactcacccatgaaaggccttgccgaatgtatcatcggcaaacaccgcaacggtcccgtcggtaaaatcttcctcacatggacgggacaattcaccaaattcgacaatgctgcctatattcccgaggaggcaaagatagaagattaa

SEQ ID NO: 39308 - DNA, 369 bp, Neisseria meningitidis
atgatagacggcgaactggtcgcgcttatccatcaaaccgtattggcggatgaagcgggtttgaaagggcgggcggatatggcgcgcttggacggcgcattgtcgcggattgccaactggcggcagtatgaaaaccttgaggacatctacgaaatcgccgccctctatgcacaagccatagccaaagcccacgcctttcccgacggcaacaagcgcaccgcgcttttaacaatgttgacctatctggatttgcagggcatcagcattgccgccgaccaagggcttgacgacttgattgtcagtttggcggcgggagaaaccgacttcaaacagctcgccgaaaccctgcgccggctggataaggaatag

SEQ ID NO: 39309 - DNA, 531 bp, Neisseria meningitidis
atgatacaaaagatatgtaagctatttgttttaatagcatttttttcggcgtcccccgcttttgcccttcaaagcgacagcaggcagcctattcagattgaggccgaccaaggttcgctcgatcaagccaaccaaagcaccacattcagcggaaacgtcgtcatcagacagggtacgctcaatatttccgccgcccgcgtcaatgttacacgcggcggcaaaggcggcgaatccgtgagggcggaaggttcgccagtccgcttcagccagacattggacggcggcaaaggcacggtgcgcggacaggcaaacaacgttgcttattcatctgcaggcagcaccgtagtcttaaccggtaatgccaaagtacagcgcggcggcgatgtcgccgaaggtgcggtgattacatacaacaccaaaaccgaagtctataccatcagcggcagcacaaaatccggcgcaaaatccgcttccaaatccggcagggtcagcgtcgttatccagccttcgagtacgcaaaaatccgaataa

SEQ ID NO: 39310 - DNA, 498 bp, Neisseria meningitidis
atgactgcgcttacccttccggaagacatccgccaacaagagccatccgccctgctctataccctcgtttccgcctacctcgaacacaccgcccaaaccggcgacgaatccctctcctgcctgtccgacgaccagcacacgctgaccgcattctgctacctcgacagccaagtcgaagaaggcggcttcgtgcaactcatcgcctccggttacggcgaatatattttccgcaacccgcttgccgacagcctgcgccgctggaaaatcaaagccgtgccgaaagtcttggacaaagccaaagccctctacgaacaacacggcaaaaccatcgaaacgctcgccgacggaggcgcagacatcgaatccctgcgcaaacagttccccgactttgaagaatgggacggcgcatactacgaagccgccgaacaagacctgcccctgcttgcagaacacatacagtcaaactgggaaaccttcgcccatatcgggcaggcgtga

SEQ ID NO: 39311 - DNA, 993 bp, Neisseria meningitidis
atggaaaatgtaaaccgcatcgttgcagaaggcattgccgcagtagaagctgcgcaagacttcaacgctctagaacaaatcaaagcccgttatcttggcaaaactggcgagttgaccggacttctgaaaaccttaggtcaaatgtcgcctgaagagcgcaaaaccataggtgcgcatatcaatgaatgcaaaaaccggtttcagacggcttttaatgccaaacgcgatgccctcaacgaagccaagctgcaagcccgacttgccgccgaagccctcgacattaccctgcccggacgcgctcaggaaggcggcagcctgcatcccgtaaccctgaccttgcaacgtgtggtcgaactctttcacggaatgggtttcgaagtggcggacgggcctgaaatcgaagacgattttcacaatttccaagccctgaacatccctgcaaaccatcctgcccgtgcgatgcaggatacgttttacgttgaaaacggtgatgttttgcgtacgcacacttccccgattcaaatccgctatatgctcgataaaaaagagccgcccatccgcattatcgcccccggccgcgtttaccgtgtggacagcgatgccacgcactcgcctatgttccatcaggcggaaggtttgtgggtagaagagggcgtaacttttgccgatttgaaagcagtgttcacggattttatccgtcgcttctttgaacgcgatgatttgcaagtacgtttccgcccgtctttcttcccgttcaccgaaccgtctgccgaaatcgacattatgggcgaaaacggcaaatggctggaagtcggcggctgcggcatggtgcatcccaacgtgttgaaaaatgtgaatatcgattctgaaaaatacaccggtttcgctttcggtatcggtctcgaccgtttcgcgatgctgcgttacaacgtgaacgatttgcgcttgttttttgataacgatttgaattttttgaagcagtttgcgaaataa

SEQ ID NO: 39312 - DNA, 723 bp, Neisseria meningitidis
atgaatccgcgtataaaggccatgtcgggtgtgatgctgcaagccttgtctgccgcgcagcaggatgttttggtcgatttgtggcaagtggacttgcggccgctgggcggtcgggttttctatttctgcaatcaggtcaacgagcggggtacggcggttgtctggcagggacaggcatatgagccttatccgattaaggctgacgactttgaatcaacttcgcaaggcgcgggtaaccgtccgacgctgacggtatcgaatctcttgggtttgattacgggcgcggcggatcagttcggtcagctcgtcggcgtgctggttgtgcgccgtcaaacctatgccaagtttttagatgcggtcaatttccagtccgggcgcaatccgaccgcagacccgatgcaggaagtcgtcggcaaatatttggttgaacggatgacggcattgaatgcagaaacggcaaccttcgaacttgccgcgccgtccgaatcggatggttcggtcattcccgcccgtattatgctggcaaatacctgctgctggcagtatcgcggcgaagggtgcggttatacggggcgtgcggttgccgaccgtttcgatatgcccacggacgatgcgtccaaagacgtatgcagcaaaacactgacaggatgtagggcgcggtttggcgcgacggcagttttgccgttcggcggtttcccatctagtgataaggtaacgacatga

SEQ ID NO: 39313 - DNA, 1092 bp, Neisseria meningitidis
atgtcccatatttcccccatccccgaaatcctagccgacatcaaagccggcaaaatggtcatcatcaccgatgccgaagaccgagaaaacgaaggcgacctgctgatggcggcgcaattcgtcacgcccgaagccatcaacttcatgattaaacacgcgcgcggcttggtctgcctgccgatggacggcgaaatggtcgaaaaactcgggctgccgatgatgacccaaaaaaacggcgcgcaatacggcaccaactttaccgtctccatcgaagccgcacacggcattaccaccggcatttccgccgccgaccgcgccctgactattcaaaccgccgtttccccgaccgccaaacccgaagacatcgtccaacccggtcatatctttccgcttcgcgcccaaaaaggcggcgtactcgtccgcgccggacacaccgaagccggcgtcgacctggcgcaaatgaacgggctgattcctgccgccgttatttgcgaaatcatcaacgacgacggcacgatggcgcgtatgcccgaactgatgaagtttgccgaagaacacaagctcaaaatcggcaccattaccgacctcatcgaataccgcagccgtaccgaaagcctgctcgaagacatgggcaatgcgcctgtacaaaccccgtggggcgagttccaacaacacgtttacgtcgacaaactctccggcgaaacccacctcgccctcgtcaaaggcacgcccgccgccgacaccgaaaccctcgtccgcgtccacgaacccttcagcgtgatggacttcatccaagccaatccgcgccattcatggtcgctgcccaaagcccttgagcgcatccaacaagccgaaagcggcgtcgtcatcctcttacaccgcgccgaagacggcgcatccctgctcgaccgcaccctgcccaaaggtgcaaaccaagcctacaaatgggacagcaaaagctacggcatcggcgcacaaatcctcgtcggcctcaacgtcaaaaaactgcgcgtcctcgggcagccctcatctttcaccggcctgaccggcttcggtttggaagtcgtcggctttgaagaagcggaaaaataa

SEQ ID NO: 39314 - DNA, 198 bp, Neisseria meningitidis; identical to SEQ ID NO: 36305

SEQ ID NO: 39315 - DNA, 279 bp, Neisseria meningitidis; identical to SEQ ID NO: 36597

SEQ ID NO: 39316 - DNA, 1083 bp, Neisseria meningitidis; identical to SEQ ID NO: 38655

SEQ ID NO: 39317 - DNA, 915 bp, Neisseria meningitidis
atggatgccgtacaattaaaatcatttgtcgccgtcgcgcacgagggcaaccttacccaagccgccaaacgacttttcctttcccagcctgccgtttctgcccaaattaaagcccttgaagaatatgtcggcacgccgctgttcaggcgcacggggaaaggcatggtattgacgcgggcgggcgaaatactgttgcccgaagcggaatccctgctgcaatacaaacacaagctggagcattttgccaaaacgctggcaggcgattattcggaagagaccagtttgggcattatccaccccatcgattcggcaaaactcgtcgcgctgacggacaatatcggtcaaacagcccccaaaacgcgcctgcacatccaatacggaatgagcggcgaaatcctctcgcgcatccaacacaaaaccctgcacggcggctttatactcggcaacgccgcccaacgcggcatccgcagcgtattcctgcaaaacctgacctacgcgctgatttgcccgcaaagccaatatccccatctgacccgctcccttccgcagagcctgcaagaatgcgtatggatagaaatgtcgggcgtgtccggaagtaggaagcacctgcaccagttttggcgcagcaaccggctctcacccaaaaaacagatcttgtgcgactacccccaaaccattatcgatttggttgcaggcggtataggtgtggcaatggtgccgggaaacaaagccgaagcggcggcaaaagaaggcgcgggcgtggctattatcgaatcgtgccgccacagtatgccgctcaatttcatttatgcggaagaatacgaggataatccccacgtctcactcctgctcgagtgcattgaaaaagtatggggagtgcaggcggtgcagccgcccgttgtctcggacaactga

SEQ ID NO: 39318 - DNA, 663 bp, Neisseria meningitidis
atgatacacgccgtactcttcgacctcgacggcacgcttgccgacaccgccctagacctcggcggcgcactcaataccctgctcgcccgccacggactgccgcccaaaagcatggacgaaatccgcacccaagccagccacggcgcggcaggactgctcaaactcggcgcaggcatcacccccgaacaccccgactatgcccgatggcgcaccgaataccttgacgaatacgacagccgctacgcccaagacaccaccctcttcggcggcgtaaacgaactcatcgccgaactcgacagacgcggcatcaaatggggcatcatcaccaacaaacctatgcgcttcaccgacaaactcgcccccaaactcggcttcatcatcccacccgccgtcgtcgtcagcggcgacacctgcggcgaacccaagcccagcgtcaaacccatgctgtatgcgtgcggacaaatccacgccgacccgcaacacacactctacgtcggcgatgccgaacgcgacatccaagcaggccgcaacgccggcatgaaaaccgtcctcgccgaatggggctacatcgctcccgaagacgataccggctcatggcaggcggatttccacatccgcacgccgctcgatctgctcgaatgtctggacaaaatacagccctga

SEQ ID NO: 39319 - DNA, 1254 bp, Neisseria meningitidis
atgcagacttacctcgtcggcggcgccgtccgcgattatcttttgggcttgcccgtcaaagaccgcgattgggtggtcgtcggcgcagacgcacaaaccatgctggcgcaaggcttccagccggtcggcaaagattttcccgtgtttctccatcccgaaacgcacgaagaatacgccctcgcccgcaccgagcgcaaaaccgccaaaggttacgtcggtttcagtttccacgccgacaaagacgttacgctggagcaggacttgatgcgccgcgacctgaccatcaacgcgatggcgcaagatgcggacggcaagattatcgaccctttcggcggacaacgggatttggcggcaggcattttgcgccacgtttccccggccttcgccgaagaccccgtccgcatcctgcgtactgcccgctttgccgcgcgttacaggtttgaaatcgccgaagaaaccataaagctgatgcggcagatggtggaaaacggcgaagcggacgcattggttgccgaacgcgtctggcaggagtttgcgaaaggtttgatggaaaaaaatccgcgcaaaatgattgaagtgttgcgcgaatgcggcgcgctcaaagtcttgctgcccgaagtcaatgccctcttcggcgtgccgcaacgcgccgactaccatcccgaaatcgacagcggcatccataccctgatgacgctgcaacgcgccgccgatatgggtttgagcctgcccgaacgctatgccgccctgctgcacgacttgggcaaagccaaaacaccgtccgacatcctgccgcgccaccacggacacgacctcgccggtgtcgaacccgtgcgcgaagtcaatcagcggctgcgtgcgccgaaacattgcgccgagcttgccgaattggtttgccgttggcacattattttccaccaagtcggacagcttaaaagccaaaccattctgaacgtattgaaaaaaaccgatgccttccgccgtcccgaacgctttcagacggcattgaacgtctgcattgccgacacgcaaggccgtctgaaccgcgaacacacgccctacccgcaacgcgcacactggttcgccctgctcgaagccgccaatcaggcggattcgggcaaaatcgccgccgaatgccgtgcgcagggaaaagcgcaccttatcgccgaacaaatcgaccgggcgcggctggcacaaatcgccccattgcaaaaaacgtttcgagcggcgcaagacaaaacagaaaaacattaa

SEQ ID NO: 39320 - DNA, 381 bp, Neisseria meningitidis
atgaatatcaggtttttcgcgctgaccgtaccggttttgtctttggcggcctgtgccgtgccggaggcgtatgatgacggcggacgagggcatatgtcgtccgttcaaaaccaagcccgcccggcagattttcgggcgttttcatgcgagaacggtttgtctgtgcgcgtccgccatttggacagcggcaaagtcgcgttgcggctggacggcaggcgtgccgtcctctcttccgacgttgccgcatccggcgaacgctataccgccgaacacggtttgttcggaaacgcaaccgagtggcaccagaaaggcggcgaagcctttttcggctttaccgatgcctacggcaattcggtcgaaacttcctgccgcgcccgttaa

SEQ ID NO: 39321 - DNA, 924 bp, Neisseria meningitidis; identical to SEQ ID NO: 37161

SEQ ID NO: 39322 - DNA, 984 bp, Neisseria meningitidis
  misc_feature 6, 7, 8, 9, 10: 'n' is a, c, g or t
gtgtgnnnnntcgagttaatccccaccggcgaatactccatcgaaatcgacccgcgcaaagtcagccgcgacaccgtcctcatgctcggcagactcggcttcaaccgcatgagcatcggcattcaggatttcgaccccaaagtgcaggcagcggtcaaccgcatccaaagttacgaagaaaccaaagaagtcatcgatgcggcgcgcgaagcggggttcaaatccgtcagcgtcgatttgatttacggcctgccgcaccagacttcggaaagcatcaaaaccaccatcgataccgttttgtcgctcgatcccgaccgcctcgccctttatcactacgcccacctgccgcacgtgttcaaaccgcaacgccgcatcgataccgcctccgtccccgacagcgaagagaagctcgatatgctgcaatactgcgtccaaaccctaaccgaacgcggctacgtcttcatcggcatggatcatttcgccaaacctgacgacgaactctccatcgccctcaaagaaggcttcctccagcgcaacttccaaggctattcgacctacgcggattgcgatttggtcgccatcggcgtgtcgtccatcggcaaaatcggcagcacctattcccaaaacgaacgcgacatcgatgcctactatgccgccatcgacgaaggcagactgcccatcatgcgcggttatcagctcaatcaggacgacatcctgcgccgcaatatcattcaggatttgatgtgccgcttcgcgctcgactaccggatttacgaaagtatgttcggcatcccgttcgaccgctacttcaaagacgaactggcggatttggaaaaactcgccggtttgggattggtgcgcctgaacagccacgggctgaccgttaccccgaaaggacgcttcctcatccgcaacatcgccatggtgttcgactaccacctgcgccacaaggaaaccaaggcgaaatattcgcaaacggtgtga

SEQ ID NO: 39323 - DNA, 1866 bp, Neisseria meningitidis
atgatagaaaaactgactttcggactgtttaaaaaagaagacgcgcgcagctttatgcgcctgatggcgtacgtccgcccctacaaaatccgcatcgttgccgccctgattgccattttcggcgttgccgccaccgaaagctaccttgccgccttcatcgcccccctgattaaccacggcttttccgcacctgccgcgccgcccgagctgtctgccgccgccggcatcatttccaccctgcaaaactggcgcgaacagtttacctatatggtttgggggacggaaaacaaaatctggaccgtcccgctctttctcatcattctcgtcgtcatccgtggcatctgccgctttaccagcacctatctgatgacttgggtctccgtgatgaccatcagcaaaatccgcaaagatatgtttgccaaaatgctgaccctttcctcccgctaccatcaggaaacgccgtccggcaccgtactgatgaatatgctcaacctgaccgaacagtcggtcagcaacgccagcgacatcttcaccgtcctcacgcgcgacacgatgatcgttaccggcctgaccatcgtcctgctttacctcaactggcagctcagccttatcgtcgtcctgatgttccccctgctctccctgctctcgcgctactaccgcgaccgtctgaaacacgtcatttccgactcgcaaaaaagcataggcacgatgaacaacgtgattgccgaaacccatcagggacaccgcgtcgtcaagctgttcaacgggcaggcgcaggcggcaaaccggttcgacgcgatcaaccgcaccatcgtccgcctcagcaaaaaaatcacgcaggcaacggcggcacattccccgttcagcgaactaatcgcctcgatcgccctcgccgtcgtcatcttcatcgccctgtggcaaagccaaaacggctacaccaccatcggcgaatttatggcattcatcgtcgcgatgctgcaaatgtacgcccccatcaaaagccttgccaacattagcatccctatgcagacgatgttcctcgccgccgacggcgtatgtgcatttctcgacaccccgcccgaacaggacaaaggcacgctcgcaccgcagcgtgtcgaagggcgcatcagcttccgcaacgtcgatgtcgaataccgttcggacggcatcaaagccctcgacggcttcaacctcgacatcagacaaggcgaacgcgtcgccctggtcggacgttccggcagcggcaaatccaccgtcgtcaacctgctgccccgctttgtcgaaccgtctgccggcaacatctgcatagacggtatcgacatcgccgacatcaaactcgactgcctgcgcgcccaatttgccctcgtctcccaagacgtattcctgtttgacgacaccctgtttgaaaacgtccgatatagccgtcccgacgcgggcgaagccgaagtcctatccgccctccaagccgctaacctgcaaagcctgatcgacgcatcaccgctcggactgcaccagcccatcggatcgaacggcagcaacttatccggcggacagcggcaacgcgttgccattgcccgcgccattttgaaagacgcgccgatattattattggacgaagccaccagcgcattggacaacgaatccgaacgcctcgtccaacaggcgctcgaacgcctgatggaaaaccgcaccggcatcatcgtcgcccaccgcctgaccaccatcgaaggggccgaccgcatcatcgtaatggacgacggcaaaatcatcgaacaaggcacacacgaacaactgatgtcccaaaacggctactacacgatgttacgcaatatctcaaacaaagatgccgccgtccggacggcataa

SEQ ID NO: 39324 - DNA, 2751 bp, Neisseria meningitidis
atgaccgacgcaaccatccgccacgaccacaaattcgccctcgaaaccctgccggtaagccttgaagacgaaatgcgcaaaagctatctcgactacgccatgagcgtcattgtcgggcgcgcgctgccggacgttcgcgacggtctcaagccggtacaccgccgcgtactgtacgcgatgcacgaattgaaaaacaactggaatgccgcctacaaaaaatcggcgcgcattgtcggcgacgtcatcggtaaataccacccccacggcgataccgccgtatacgacaccatcgtccgtatggcgcaaaatttcgctatgcgttatgtgctgatagacggacagggcaacttcggatcggtggacgggcttgccgccgcagccatgcgctacaccgaaatccgcatggcgaaaatttcccacgaaatgctggcagacattgaggaagaaaccgtcaatttcggcccgaactacgacggtagcgaacacgagccgcttgtactgccgacccgtttccccacactgctcgtcaacggctcgtccggcatcgccgtcggcatggcgaccaatatcccgccgcacaacctttccgataccgtcaatgcctgcctgcgcctgctcgatgcacccgacaccgaaatcgacgaactgattgacattatccaagcccccgacttcccgaccggggcaaccatctacggcttgagcggcgtgcgcgaaggctataaaacaggccgcggccgcgtcgttatgcgcggtaagacccatatcgaacccataggcagaaacggcgaacgcgaagccatcgttatcgacgaaatcccctatcaggtcaacaaagccaagctggtcgagaaaatcggcgatttggttcgggaaaaaacactggaaggcatttccgagctccgcgacgaatccgacaaatccggtatgcgcgtcgttatcgagctgaaacgcaacgaaaatgccgaagtcgtcttaaaccaactctacaaactgactccgctgcaagacagtttcggcatcaatatggtggttttggtcgacggacaaccgcgcctattgaacctgaaacagattctctccgaattcctgcgccaccgccgcgaagtcgttacccgacgtacgcttttccggctgaagaaggcacgccatgaagggcatattgccgaaggcaaagccgtcgcactgtccaatatcgatgaaatcatcaagctcatcaaagaatcgcccaacgcagccgaggccaaagacaaactgcttgcgcacccttggcgcagcagcctcgttgaagaaatgctgacgcgttccggtctggatttggaaatgatgcgtccggaaggattggctgcaaacatcggcttgaaagagcaaggttattacctgagcgagattcaggcagatgctattttacgcatgagcctgcgaaacctgaccggcctcgatcaagaagaaattgtcgaaagctacaaaaacctgatgggtaaaatcatcgactttgtggatatcctctccaaacccgaacgcattacccaaatcatccgcgacgaactggaagaaatcaaaaccaactatggcgacgaacgccgcagcgaaatcaacccgttcggtggcgacattgccgatgaagacctgattccgcaacgcgaaatggtcgttaccctgacacatggcggctatatcaaaacccagccgaccaccgactatcaggcgcagcgtcgcggcgggcgcggcaaacaggcggctgccaccaaagacgaagactttatcgaaaccctgtttgttgccaacacgcatgattatttgatgtgctttaccaatttgggcaagtgtcattggattaaggtttacaaactgcccgaaggcggacgcaacagccgcggccgtccgattaacaacgtcatccagttggaagaaggcgaaaaagtcagcgcgattctggcagtacgcgagttccccgaagaccaatacgtcttcttcgccaccgcgcagggaatggtgaaaaaagtccaactttccgcctttaaaaacgtccgcgcccaaggcattaaagccatcgcgctcaaagaaggcgactacctcgtcggcgctgcgcaaacaggcggtgcggacgacatcatgctgttctccaacttaggtaaagccatccgcttcaacgaatactgggaaaaatccggcaacgacgaagcggaagatgccgacatcgaaaccgaaatttcagacggcatcgaagatgaaaccgccgacagcgaaaacgcactgccgagcggcaaacacggtgttcgcccgtccggtcgcggcagcggcggtttgcgcggtatgcgcctgcctgccgacggcaaaatcgtcagcctgattaccttcgcccctgaaaccgaagaaagcggtttgcaagttttaaccgccaccgccaacggatacggaaaacgcaccccgattgccgattacagccgcaaaaacaaaggcgggcaaggcaatattgccattaacaccggcgagcgaaacggcgatttggtcgccgcaaccttggtcggcgaaaccgacgatttgatgctgattaccagcggcggcgtacttatccgcaccaaagtcgaacaaatccgcgaaaccggccgcgccgcagcaggcgtgaaactgattaacttggacgaaggcgaaaccttggtatcgctggaacgtgttgccgaagacgaatccgaactctccgacgcttctgtaatttccaatgtaaccgaaccggaagtcgagaactga

SEQ ID NO: 39325 - DNA, 360 bp, Neisseria meningitidis
atgctttccaacatcatccccctttccatcggtgcggcactcggtgcaacggcgcgttggctgctcaacctcgccgttcccgcatcaatacctcccgccacaggcaacctgtttgccaactggataggcgcttttcttatcggaatctttgccgaaaccgtcaaccacccgcaatggaagctgctgctgattaccggttttctcggcagcctgaccacgctttccggattttcactggaaaccgtaaccctgctccaattgaatcgtcccgcttcagcactttccaatattttcctgcatacggtgggttcgctgctgctgacttggctcgggctgaagataggggcggcagtcaaataa

SEQ ID NO: 39326 - DNA, 768 bp, Neisseria meningitidis
atggcactggcaaaacgcatcatcccctgtctcgacgtaaaagacgggcgcgtcgtcaaaggcgtgaacttcatcggtttgcgcgacgcgggcaaccccgtcgaagccgccaaacgctacaacggcgaaggcgcggacgaattgaccttcctcgacatcaccgcctcatccgacaaccgcgacaccatcctgcacatcatcgaagaggttgccggacaagtcttcatccccctgaccgtcggcggcggcgtacgcaccgttgccgacatccgccgcctgctcaatgccggcgcggacaaagtcagcatcaacaccgccgccgttacccgtcccgatttaattgacgaagccgccggatttttcggttcgcaagccatcgtcgccgccgtcgatgccaaagccgccaaccccgaaaacacacgctgggaaatctttacccacggcgggcgaaatccgaccggtttggatgcggtggaatgggcggtcgaaatgcaaaaacgcggcgcgggcgaaatcctgctcaccggtatggacagggacggtacgaaacagggtttcaacctgccgctgacccgcgccgttgccgaagccgtcgacatccccgtcatcgcctccggcggggtcggcaatgtccggcacctgattgaaggcataaccgaaggcaaagccgatgccgtacttgccgccggcgttttccatttcggggaaatcgccatccgcgaagccaaacgcgctatgcgcgaagccggcatcgaagtgcgcctctga

SEQ ID NO: 39327 - DNA, 519 bp, Neisseria meningitidis; identical to SEQ ID NO: 37482

SEQ ID NO: 39328 - DNA, 1863 bp, Neisseria meningitidis
atggctcttttgcagatttcagaaccgggcatgtccgcctccccgcaccggcaccgtttggcagcaggcatcgatttgggtacgaccaacagcttggtcgccaccgtccgcagcggcagtgccgcctgtctgcccgatgccgaagggcgcgttaccctgccttccgtcgtccgctatctggaaaacggcggcattgaagtcggcaaaaccgccctgtccgcccaaaaaaccgacccgctgaacaccgtcagctccgccaaacgccttatcgggcggacgcttgccgatctgcatcaaaatacgcattacctgccttaccgtttcggcgacaatcaacgcgttatcgaactgcatacgcggcagggggtgaaaacgcctgtcgaagtgtcggcggaaatcctcaaaacccttaaatcgcgcgccgaagaaaccttgggcggcgatttggtcggcgtggtgattaccgtccctgcctatttcgatgatgcccaacgccaagccaccaaagatgccgcgcgtctggcgggtttgaacgtattgcgcctgctcaacgaacccaccgctgccgcaatcgcctacgggctggacaacgcctcggaaggcacgtttgtcgtgtacgacttagggggcggcacattcgacgtatccgtattgcaactgaccaaaggactgtttgaagttaaagccaccggcggcaacagcgcgttgggcggcgacgatttcgaccaccgcctgttctgccgcctgctcgaacaaaacggactctcccaactcaacgaacaagacagccaactcctgctctcgctcgtccgcgccgccaaagaacaattaaccacgcaaaccgaagcgcgcattcaggcgacgctttcagacggcatggcaatcgacacaagcatcagtcgcgccgagttccacaacctgacgcagcatttggtgatgaaaacgctcgaaccggtcacacaggcgttgaaagatgccggtgtcggtaaaaacgaagtcaaaggcgtgattatggtcggcggttcgacccgtatgctgcacgtccaacaggcagtcgccaccttcttcggacaaaccccgctgaacaacctcaatcccgacgaagtcgtcgcgctcggcgccgccatacaggcaaacgtcctcgcaggcaacaaaaccgacggcgaatggctgctgctggacgttacacctttgtcgctcggtttggaaacctacggcggcttggcggaaaaaatcatcccgcgcaattccaccatccccaccgcgcgcgcgcaggactttaccaccttcaaagacggtcagaccgcgatgacgatacacgtcgtacaaggcgaacgcgaactggttgccgactgccgcagccttgccaaattcaccctgcgcggcattccgccgatggcggcgggtgcggcgcgtatccgcgtaaccttccaaatcgatgcggacgggctgctgtccgtttccgcccaagaacaaagtaccggcgtacacgcgcaaatcgaagtcaaaccttcctacggtttggacgacggcgcgattacccgaatgcttaaagacagtatggacaacgccgccgaagatatggcggcacgcgcccgcgccgaagccgtagtcgaagccgaaagcctgaccgatgccgtcaacgccgccctcgagttggacagcgatttactggatgccaaagaattgcaacagatccggcaaggcatcgccgatttgcaaggccgtctgaaagacggaaaagccgaagacatccgctccgccgtcgccaaactcagccgcagcaccgacaacttcgccgccaaacgcatgaaccgcaatatccaacgcgcattgacaggccagagtgtcgataatatttga

SEQ ID NO: 39329 - DNA, 606 bp, Neisseria meningitidis
atgaagaaaatcggactgttcggcggcactttcgacccgatacacaacgggcatctccacatcgcccgcgcctttgccgacgaaatcggcttggacgcggttgttttcctgccggcaggcggcccgtatcacaaagacgcagcctccgcttccgccgccgaccgccttgccatggtcgaactggcgacggcagaagacgcgcgttttgccgtcagcgattgcgacatcgtccgagaaggtgcaacctatacttttgataccgtccaaatcttccgccagcagttcccatccgcgcaactctggtggctgatgggcagcgacagcctgatgaagctgcacacatggaaaaaatggcagatgctcgtgcgcgaaaccaatatcgccgtcgccatgcggcagggcgacagcctgcaccaaaccccgcgcgaactgcacgcgtggctgggcaagtcccttcaggacggcagcgtccgcatcttgtccgccccgatgcataatgtgtcgtcaacggaaatccgccgcaaccttgccggccaaggcgtttcagacggcatcccgcctgccgccgcacgctacatccgcgaacacggtttgtatgaaaaataa

SEQ ID NO: 39330 - DNA, 1554 bp, Neisseria meningitidis
atgacacaggccaaccgcgttatcattttcgacaccaccctgcgcgacggcgagcagtcgcccggcgctgctatgaccaaagaggaaaaaatccgcgtcgcccgccagctggaaaaattgggtgtggacatcatcgaagcgggttttgccgctgccagcccgggcgatttcgaggcggtcaatgcgattgcgaaaaccattaccaaatcaacggtctgttcattgtcccgcgccatcgagcgggacatccgtcaggcgggtgaggccgttgcgcccgcgccgaaaaaacgcatccacaccttcatcgccaccagccccatccatatggagtacaaattgaagatgaagccgaagcaggtgattgaggcggcggtcaaagcggtgaaaatcgctcgtgaatacaccgacgatgtggaattttcctgcgaagacgcgttgcgttcggaaatcgatttccttgccgaaatctgcggcgcggtaattgaagcgggcgcgaccaccatcaatattcccgataccgtcggctattccatcccgtacaaaaccgaagaatttttccgcgaactgattgccaaaacgcccaacggcggcaaagtcgtttggtcggcacactgccacaacgatttgggcttggcggttgccaattcgcttgccgcattaaaaggcggtgcgcgtcaggtggaatgtactgtcaacggcttgggcgaacgtgcaggcaatgcttcggttgaagaaatcgtgatggcgttgaaagtgcgccacgacttgttcggcttggaaaccggcatcgataccacgcaaatcgtgccttcgtccaaactggtgtccaccattacgggctatcccgtgcagcccaacaaagccattgtcggtgccaatgccttttcgcatgaatcgggcatccatcaggacggggtgctgaaacaccgcgaaacttacgagattatgtctgccgaatcggtcggttggtcggctaaccgattgagcttgggcaaattgtccggccgcaacgccttcaaaaccaagctggcggatttgggcatcgagttggaaagcgaagaggcactgaacgcggcatttgcacgcttcaaagaactcgccgacaaaaaacgcgaaatcttcgatgaagacctgcacgcgctggtgtcggacgaaatgggcaatatgaataccgaaagctacaaattcatttcccaaaaaatcagcaccgaaaccggcgaagagccgcgcgccgacatcgtgttcagcatcaaaggcgaagaaaaacgcgcttccgcaaccggttccggtccggttgatgcaattttcaaagcgattgaaagcgtggcgcaaagcggcgcgactttgcagatttattccgtcaatgccgtcacgcaaggtacggaaagccaaggcgaaaccagcgtccgtctggcacgcggcaaccgcgtcgtcaacggtcagggcgcggataccgacgttttggttgccaccgccaaagcctacctttccgccttgagcaaactggaatttagtgccgccaaaccgaaagcgcaaggcagcggtacgatttga

SEQ ID NO: 39331 - DNA, 1791 bp, Neisseria meningitidis
atggagctgatgactgtgttgctattgctggcggctttgctgtcaggcgtgttgtttacatggttactgatgaagagccggtttcaaggtgtattagccgtattgaacgcgcaattggcggaaaaggcggcaagatgtgattttgtcgaacaggcacacgcagaaattgcatcggaattagccgttttggatgggaaatacgagcatttgcaagacgaaaattatgctttgggcaaccgtttttccgcagccgaaaagcagattgcccatttgcaggaaaaagaggcggagtcggcgcgtctgaagcagtcgtatatcgagttgcaggaaaaggcgcagggtttggcggttgaaaacgaacgtttggcaacccagctcggacaggagcggaaggcgtttgccgatcaatatgcgctggaacgccaaatccgccaaagagtcgaaaccgatttggaagaaagccgccaaactctccgcgacgtgcaaaacgacctttccgatgtgggcaaccgttttgccgcagccgaaaaacagattgcccatttgcaggaaaaagaggcagaagcggagcggttgaggcagtcgcatatcgatttgcaggaaaaggcacagggtttggcggttgaaaacgaacgtttggcaacgcaaatcgaacaggaacgccttgcttctgaagagaagctgtccttactgggcgaagcgcgcaagagcttgagcgatcagtttcaaaatcttgccaacacgattttggaagaaaaaagtcgccgttttaccgagcagaaccgagagcagctccatcaggttttgaacccgttaaacgaacgcatccacggtttcggcgagttggtcaagcaaacctatgataaagaatcgcgcgagcggctgacgttggaaaacgaattgaaacggcttcaaggattgaatgcgcagctgcacagcgaggcaaaggccctgaccaacgcgctgaccggtacgcagaacaaggttcagggcaattggggcgagatgattctggaaacggttttggaaaattccggccttcagaaagggcgggaatatgtggttcaggcggcatccgtccgaaaagaggaagacggcggcacgcgccgcctccagcccgacgttttggtcaacctgcccgataacaagcagattgtgattgattccaaggtttcgctgacagcttatgtgcgctacacgcaggcggaggatgcggatgcggcggcacgcgaactggcggcacacgttgccagcatacgcgcgcatatgaaaggcttgtcgctgaaagattacaccgatttggaaggtgtgaacacattggatttcgtctttatgtttatacctgtcgaaccagcctacctgctggcgttgcagcatgacgcgggcttgtttcaagagtgtttcgacaaacggattatgctggtcggccccagtacgctgctggcaactttgaggacggtggcgaatatttggcgcaacgaacagcaaaatcagaacgcactggcgattgcggatgaaggcggcaagctgtatgacaagtttgtcggtttcgcccaaacgctcgaaagcgtcggtaaaagcatcgatcaggcgcaaagcagctttcagacggcatttaagcagcttgccgaggggcgcgggaatctggtcggacgcgccgagaaactgcgtctgttgggtgtgaaggcaggcaaacagcttcaacgggatttggtcgagcgtgccaacgaacagacggcatttgctttgggcaaaccttcggaacaggaagcggctgacgaagccgaatag

SEQ ID NO: 39332 - DNA, 1776 bp, Neisseria meningitidis
atgagtatcgtgctgcacggcgtggcggcgggcaaaggcattgccgtcggttgcgcccacctgattgcgcgcggtacggaggaagtgccgcagtatgatgttgcggaggcggacaccgatgccgaagccgaacgtttcgatgccgccgtcaaagccacgcgcaaagagttggaacagctccgcagcgcgattcccgaaaacgccccgaccgagttgggcgcgttcatctcgctgcacctgatgctcttgaccgatgttaccttgtcgcgcgaacccgtcgatattttaagggaacaaaaaatcaacgccgagtgggcattgaagcagcagagcgacaaactcgccgcccaattcgacaatatggacgatgcctatttgcgcgaacgcaagcaggatatgctgcaagtcgtccgccgcatccacaacaacctgatcgggcagggcaacgagttggaagttgccgacaacctgtttgacgaaaccgttctgattgcaaacgacctttcgcccgccgacacggttttgtttaaagagcagcgcattgccgccttcgttaccgatgccggcggccccaccgggcatacggcgattttgggcaggagcttggacatcccgtccgtcgtcgggctgcacaacgcgcgcaaactgattaccgaaggcgaaacggtcattgtggacggtatcaacggcgtgttgattatcgcgccggatgagtcggtgttgaacgaataccgccgccgtgcccgcgaataccgcagccacaaacgcgatttgaacaagctcaaaaaaaccgccgccgccaccgccgacggggtctgcatcgagcttgtgggcaatatagaatccgccgaagacgtgaaaccgctgcacaacctcggcgcagacggcatcgggctgttccgcagcgagtttctttacctcaaccgcgatacgatgccgtctgaagacgagcagtacgaagtgtacaacgcgattgtcaaaaaaatgaagggcaaaagcgtaacgatacggacagtcgatttgggagtggacaaaaacccgcgctggttcgggaaaaacagcacgcccaacggcagcctcaaccccgcgctgggcatgaccggcatccgcctgtgccttgccgaaccggtcatgttccgcacccagatgcgcgccatcctccgtgcggcggtacacggtcccgtccgcatgatgtggccgatgattacctccgtatccgaagtgcgccagtgcctcatccacctcgacaccgcgcaacgccagcttgccgaacgcggcgatgccttcggtaaagtcggcatcggctgtatgattgaaattccgtctgccgcgctgaccgtcggcagtattttgaaactggtcgatttcatctccgtcggcaccaacgacctgattcaatacatcttgtccgtcgatcgcggcgacgacagcgtcagccatctttaccagcccggacatcccgccgtgctgaaaatgctgcaacacgtcatccgcaccgccaaccgcatggacaaagacgtgtccgtatgcggcgagatggcgggcgatacggcgtttacccgcatcctgcttggtatggggctgcgccgtttttccatgaatccgaacaacatcctgcccgtcaaaaacatcatcctgcacagcaatatcgcacagctcgaaaacgagattgccaaaatcgtccgctgcgaggacgaggaaaaggcggaaaagctgatcaaacagatgaacagcgtgtctgtcgaggaagaagccgacttcaaggggcggaaataa

SEQ ID NO: 39333 - DNA, 1350 bp, Neisseria meningitidis
atgttgaatccatcccgaaaactggttgagctggtccgtattttggaagaaggcggctttattttcagcggcgatcccgtgcaggcgacggaggctttgcgccgcgtggacggcagtacggaggaaaaaatcatccgtcgggcggagatgattgacaggaaccgtatgctgcgggagacgttggaacgtgtgcgtgcggggtcgttctggttgtgggtggtggcggcatcgatgatgtttaccgccggattttcaggcacttatcttctaatggacaatcaggggctgaatttcttcctgattttggcgggcgtgttgggcatgaatacgcttatgttggcagtatggttggcaatgttgttcctgcgcgtgaaagtggggcgttttttcagcagtccggcgacgtggtttcggggcaaagaccctgtaaatcaggcggtgttgcggctgtatgcggacgagtggcggcaaccttcggtacgttggaaaataggcgcaacgtcgcacagcctgtggctctgcacgctgctcggaatgctggtgtcggtattgttgctgcttttggtgcggcaatatacgttcaactgggaaagcacgctgttgggcgattcgtcttcggtacggctggtggaaatgttggcatggctgcctgcgaaactgggttttcccgtgcctgatgcgcgagcggtcatcgaaggtcgtctgaacggcaatattgccgatgcgcgggcttggtcggggctgctggtcggcagtatcgcctgctacggcatcctgccgcgcctgctggcttgggtagtgtgtaaaatccttttgaaaacaagcgagaacggcttggatttggaaaagccctattatcaggcggtcatccgccgctggcagaacaaaatcaccgatgcggatacgcgtcgggaaaccgtgtccgccgtttcaccgaaaatcatcttgaacgatgcaccgaaatgggcggtcatgttggagaccgagtggcaggacggcgaatggttcgagggcaggctggcgcaggaatggctggataagggcgttgccgccaatcgggaacaggttgccgcgctggagacagagctgaagcagaaaccggcgcaactgcttatcggcgtgcgcgcccaaactgtgcccgaccgcggcgtgctgcggcagatcgtccgactttcggaagcggcgcagggcggcgcggtggtgcagcttttggcggaacaggggctttcagacgacctttcggaaaagctggaacattggcgtaacgcgctggccgaatgcggcgcggcgtggctggaacccgacagagcggcgcaggaaggccgtctgaaaaccaacgaccgcacttga

SEQ ID NO: 39334 - DNA, 729 bp, Neisseria meningitidis
atgggagggaaaatgtccgacaaaaaatataatgtcgatgagggggaaatcgccaaattcagccggattgccgacaaatggtgggacaagtcgggcgagttcaaaaccttgcacgacatcaatccgctgcggctggattatatcgacggacacgcggatttgtgcggcaaacgggttttggatgtgggctgcggcggcggcatcctggcggaaagcatggcgcggcgcggcgcggcgtttgtaaagggtatcgacatggcggagcagtcgctggaaaccgcccgcctgcacgcggctttgaacaatgtcgccgatatcgaatacgaatgtatccgcgtggaagaccttgccgaggcggaaccgcactcgttcgatgtggtaacgtgcatggaaatgatggaacacgtccccgatcccgccgccatcgtgcgtgcttgtgccaatctggtcaaaccggacggcatggtgtttttttctaccatcaataaaaacccgaaatcgtacctgcatctgattgtggcggcggaatatctgttgaagtttgtccccaaaggcacgcacgactggaaaaaattcatcgcacctgccgagctggcgcgaatgtgccgtcaggcaggcttggatgtggcggatacgaagggtatgacttaccatgtgttgtcgcaaacttatgccctgtgcgattcgaccgatgtgaattatatgtttgcctgccgtccggcgttctga

SEQ ID NO: 39335 - DNA, 486 bp, Neisseria meningitidis
atgagtaataaaatggaacaaaaagggtttacattgattgagatgatgatagtcgtcgcgatactcggcatcatcagcgtcattgccataccttcttatcaaagttatattgaaaaaggctatcagtcccagctttatacggagatggtcggtatcaacaatatttccaaacagtttattttgaaaaatcccctggacgataatcagaccatcaagagcaaactggaaatatttgtctcaggctataagatgaatccgaaaattgccgaaaaatataatgtttcggtgcattttgtcaataaggaaaaaccaagggcatacagcttggtcggcgttccaaagacggggacgggttatactttgtcggtatggatgaacagcgtgggcgacggatacaaatgccgtgatgccgcttctgcccgagcctattcggagactttgtccgcggatgccggctgtgaagctttctctaatcgtaaaaaatag

SEQ ID NO: 39336 - DNA, 1386 bp, Neisseria meningitidis
atggacggctggacacagacgctgtccgcgcaaaccctgttgggcatttcggcggcggcaatcatcctcattctgattttaatcgtcaaattccgcatccacgcgctgctgacactggtcatcgtcagcctgctgacggctttggcaaccggtttgcccacaggcagcattgtcaacgacatactggtcaaaaacttcggcggcacgctcggcggcgtggcgcttctggtcggcctgggcgcgatgctcggacgtttggtcgaaacatccggcggcgcacagtcgctggcggacgcgctgatccggatgttcggcgaaaaacgcgcaccgttcgcgctgggcgttgcctcgctgattttcggcttcccgattttcttcgatgccggactaatcgtcatgctgcccatcgtgttcgccaccgcacggcgcatgaaacaggacgtactgcccttcgcgcttgcctccatcggcgcattttccgtcatgcacgtcttcctgccgccccatccgggcccgattgccgcttccgaattttacggcgcgaacatcggccaagttttgattttgggtctgccgaccgccttcatcacatggtatttcagcggctatatgctcggcaaagtgttggggcgcaccatccatgttcccgttcccgaactgctcagcggcggcacgcaagacaacgacctgccgaaagagcctgccaaagcaggaacggtcgtcgccatcatgctgattcccatgctgctgattttcctgaataccggcgtatcggccctcatcagcgaaaaactcgtaagtgcggacgaaacctgggttcagacggcaaaaataatcggttcgacaccgatcgcccttctgatttccgtattggtcgcactgtttgtcttgggacgcaaacgcggcgaaagcggcagcgcgttggaaaaaaccgtggacggcgcactcgcccccgtctgttccgtgattctgattaccggcgcgggcggtatgttcggcggcgttttgcgcgcttccggcatcggcaaggcactcgccgacagcatggcggatttgggcattcccgtccttttgggctgtttccttgtcgccttggcactgcgtatcgcgcaaggttcggcaaccgtcgccctgaccaccgccgccgcgctgatggctcctgccgttgccgccgccggctttaccgactggcagctcgcctgtatcgtattggcaacggcggcaggttcggtcggttgcagccacttcaacgactccggcttctggctggtcggccgcctcttggacatggacgtaccgaccacgctgaaaacctggacggtcaaccaaaccctcatcgcactcatcggctttgccttgtccgcactgctgttcgccatcgtctga

SEQ ID NO: 39337 - DNA, 1116 bp, Neisseria meningitidis
atgaaagtaggtttcgtcggctggcgcggtatggtcggttcggttttgatgcagcgtatgaaagaagaaaacgacttcgcccacattcccgaagcgtttttctttaccacttccaacgtcggcggcgcagcccctgatttcggtcaggcggctaaaacattattggacgcgaacaacgttgccgagctggcaaaaatggacatcatcgttacctgccaaggcggcgactacaccaaatccgtcttccaagccctgcgcgacagcggctggaacggctactggattgacgcggcatcctcgctgcgtatgaaagacgacgcgattatcgtcctcgaccccgtcaaccgcaacgtcatcgacaacggcctcaaaaacggcgtgaaaaactacatcggcggcaactgtaccgtttccctgatgctgatggctttgggcggcctgttccaaaacgatttggtcgaatgggcaaccagcatgacctaccaagccgcttccggcgcaggcgcgaaaaacatgcgcgaactcatcagcggtatgggcgcggttcacgcccaagtggcggacgaacttgccgatcctgccggctcgattctcgacatcgaccgcaaagtatctgatttcctgcgcagcgaagactatccgaaagccaacttcggcgtaccgctcgccggcagcctgattccgtggattgacgtggatttgggcaacggccagtccaaagaagaatggaaaggcggcgcggaaaccaacaaaatcctcggccgcagcgacaatccaaccgtgattgacggcctgtgcgtccgcatcggctctatgcgctgccacagccaagcccttaccctgaagttgaaaaaagacctgcccatttccgaaatcgaagcgattttggcaggcgcgaacgactgggtgaaagtcatccccaacgaaaaagaagccagcatccgcgagctgacccccgccaaagttaccggcacgctgtccgtccccgtcggacgcatccgcaaactgggtatgggcggcgaatacatcagcgcgttcaccgtcggcgaccagctcttgtggggcgcggccgagccgctgcgccgcgtattgcgtatcgtgttgggcagcctgtaa

SEQ ID NO: 39338 - DNA, 627 bp, Neisseria meningitidis
atggctgatatgaaacgcttgaaacatttgatgttttcaccctttatcgacaacaacccgattgccttgcaggttttgggtatttgttcggctttggcggttaccaccaaacttcagacggccatcgtgatgggtatttccgtagctttggtaaccggtttttccagcttcttcatttcgctggtacgcaactacatccccaacagcatccgtattatcgtgcaaatggcgattatcgcgtcgctggttacgctggtcgaccaactcttgcaggcatttgcctacgaattgtccaaacagctttccgtattcgtcggtctgattatcaccaactgtatcgtgatgggtcgtgccgaagcatttgcgatgaaagaacctccgctggaaagcctgatcgacggtatcggcaacggcgcgggctacgggatgatgctgcttgtcgtcgccaccgtccgcgaactgatcggctcaggcaaacttttaggttataccgtctttcaaaccgtgcaggacggcggctggtatcagaccaacggcttgttcctgctcgctcccagcgcgttcttcatcatcggctttttgatttggggactgcgtacttggaaacccgaacaggcggaggaataa

SEQ ID NO: 39339 - DNA, 750 bp, Neisseria meningitidis
ttgccttcggaagtgtctgcttgggatatcttgcagaaaatgcgcggcggcaggccggattccgttaccgtgcagattatcgaaggttcgcgtttttcgcatatgaggaaagtcatcgacgcaacgcccgacatcgaacacgacaccaaaggctggagcaatgaaaaactgatggcggaagttgcccctgatgccttcagcggcaatcctgaagggcagtttttccccgacagctacgaaatcgatgcgggcggcagcgatttacggatttaccaaaccgcctacaaggcgatgcaacgccgcctgaatgaggcatgggaaagcaggcaggacgggctgccttataaaaatccttatgaaatgctgattatggcgagcctggtcgaaaaggaaacggggcatgaagccgaccgcgaccatgttgcttccgtcttcgtcaaccggctgaaaatcggtatgcgcctgcaaaccgacccgtccgtgatttacggcatgggtgcggcatacaagggcaaaatccgtaaagccgacctgcgccgcgacacgccgtacaacacctacacgcgcggcggtctgccgccaaccccgattgcgctgcccggcaaggccgcgcttgatgccgccgcccatccgtctggcgaaaaatacctttattttgtttctaaaatggacggtacgggcttgagccagttcagccatgatttgaccgaacacaatgccgccgtccgcaaatatattttgaaaaaataa

SEQ ID NO: 39340 - DNA, 1164 bp, Neisseria meningitidis; identical to SEQ ID NO: 38788

SEQ ID NO: 39341 - DNA, 312 bp, Neisseria meningitidis; identical to SEQ ID NO: 38411

SEQ ID NO: 39342 - DNA, 483 bp, Neisseria meningitidis; identical to SEQ ID NO: 36693

SEQ ID NO: 39343 - DNA, 132 bp, Neisseria meningitidis
atgcgtgttttgctggtggaagacgatgcgatgattgcggaggcggtgtcggcaagtttgaaagacggcggctatgcggtggattgggtcaaaaacggcgcgcggctgccgctgcccagccttatgacttga

SEQ ID NO: 39344 - DNA, 1176 bp, Neisseria meningitidis; identical to SEQ ID NO: 38512

SEQ ID NO: 39345 - DNA, 210 bp, Neisseria meningitidis
atgaaatcaaaatttgtgtataagttactggtgcttgcaaagtacctgtatattttaatttgtatatcaataccaatcgtttttatttatgaaagctaccaaggagatgatgttgattttatgatttatattcgtgcttttattattttttccatattgggtgtattagctcaatattctatgtctaatttttttggaaaggaaaaataa

SEQ ID NO: 39346 - DNA, 759 bp, Neisseria meningitidis
atgattaccatccgcaacgtcagctaccgcatcggcacacgccccatcctcgacaacgtcagcctcgacatccccgaaggcggcattaccgccctcgtcggccccaacggtgcgggcaaatccaccctgttttcctttatggcgcggctgcgaccgcttgaaagcggcagcatcgcctaccgaggcaaaaatcttgccgatacccccaccgccgaactcgccaaaaccctgtccatcctcacccaagaaaacagcatcatgagccgcatcaccgtgcgcgacctgctgatgttcggccgttacccctaccatcaaggcagaccgactgccgaatgccgccgtatcgttaacggtgcaatcgaagaattccacctgcaagacctctccgaccgctacctgaccgagctttccggcggccaacgccaacgcgccatgattgcgatggtgttctgccaaagcaccgactacgtccttttggacgaaccgctgaacaacctcgatatgtatcacgcccgctcgctcatgcaaatcctgcgccggctgaccgacgaacacaagcgcaccaccgtcgtcgtattgcacgacatcaaccaggcagcagcctacgccgaccacgtcgtcgccatgaaaaacggccaagtcgccatgcagggcaaacccaacgatattttcaccgccgcaaacatcaaaaccctattcgatatggacgtcgacgtcctcgattacgaaggcaaaaaattggttatccaccatatctaa

SEQ ID NO: 39347 - DNA, 693 bp, Neisseria meningitidis
atgaaactcatcaaatacctgcaatatcaaggcataggaagccgcaagcagtgccaatggctgattgccggcggttatgttttcatcaacggaacctgcatggacgacaccgatgcagacatcgattcctcatctgtcgaaacgttggatattgacggggaagcagtaaccgtcgttcccgaaccctatttctacatcatgctcaacaagcctgaagattacgaaacttcgcacaaacccaagcactaccgcagcgtattcagcctgttccccgacaatatgcggaacatcgatatgcaggcggtcggcaggctggatgcggatacgaccggcgtattgctgattaccaacgacggcaaactgaaccacaacctgacttcgccgagcagaaaaattcccaagctatacgaagtaacgctcaaacaccccacaggagaaacgctctgcgaaaccttgaaaaacggcgtgctgctccacgacgaaaacgaaaccgtttgtgccgccgatgccgttttggaaaacccgaccaccctgctgctgaccattaccgaaggaaaataccaccaagtcaaacgcatgatcgccgccgtcggcaaccgcgtgcaacaccttcatcgtcggcgattcgcacatttggaaacagaaaacctgaaacccggcgaatggaaatttatcgattgtccaaaattctga

SEQ ID NO: 39348 - DNA, 711 bp, Neisseria meningitidis
gtgaagcgtggtggcagtgagcaaggcacatggctgcatcccaaactcgctattcactttgcccgttggcttaatccgaaatttgcggtttggtgcgatgagcagattgaaattttacttaacggcaaaatttcagacggcataaaaacagttacccccaaacccacccgcgcccttccggacggcttgaccggcgaacaaatcgaagccgtcaaaaaactgcacaacgccctgaccaaatccgcacccaaagaagcgcaggcgcgtatcgccattaccctttggtctgccgtcaaaagcaagttcggatgcagctacaaagaagtacctgccgaacagttccccgaagttttaagcgtgatgagccgcgtggcagttgaaaacggcgtgctgtacggcgaagtcctcgaccgcgaaccgttacccgcaccgcaacctgccctgcccatcagcggcaacgccctgtacgacctcgccgttgccgtcagatacggcgcgtgggccatccaaatgggcagagacgtttccctgccgctgaagcagctcggctgcaaacaggcggtaacgatgtggacggtctgggcggaaacacgcagccgcctcaaagccgccgcaaacgccctcgaagccttaaacgcacacgccgacgcggaacacgcggcaaaaatccgcccgatgctgcccgaaatccgcaacctgtcgtcggtttga

SEQ ID NO: 39349 - DNA, 255 bp, Neisseria meningitidis
atgaacaaacttttcattaccgccctgtccgccctcgccttgtccgcctgcgccggcacttgggagggcgcgaaacaagacaccgcccgcaaccttgacaaaacacaggccgccgccgaacgcgccgccgaacaaacaggcaacgccgtcgaaaaaggctgggacaaaaccaaagaagccgtcaaaaaaggcggcaatgccgtcggacgcggcatttcccatctcggcggaaaaatcgaaaacgccaccgaataa

SEQ ID NO: 39350 - DNA, 378 bp, Neisseria meningitidis
gtgaacaaaaccctcatactcgtcctttccgccctgttcagcctgaccgcgtgcagcgtcgaacgcgtttcactgttcccctcgtacaaactcaaaatcatacagggcaacgaactcgaaccccgcgccgttgccgccctgcgccccggcatgaccaaagaccaagtcctgctcctgctcggcagccccatgctgcgcgacgcattccataccgaccgctgggactataccttcaacacctcccgcaacggcatcatcaaagaacgcagcaatctgaccgtctattttgaaaacggcgtgctcgtacgcgccgaaggcgacgccctccaaaatgccgccgaagccctccgcgcgaaacaaaacgcagacaaacaataa

SEQ ID NO: 39351 - DNA, 1113 bp, Neisseria meningitidis
atgcaaaccgccgcccgccgctcgttcgattacgatatgcccctcattcaaacgccgacttccgcctgccaaatccgtcaggcgtgggcgaaggttgccgacacgcccgaccgcgaaacggcaggccgtctgaaagacgaaatcaaggctttgctgaaggagaaaaacgcggtcttggtggcgcattattatgttgatccgctgattcaggatttggctttggaaacgggcggatgcgtgggcgattcgctggaaatggcgcgctttggtgcggaacacgaagccgatacattagtggtggctggcgtgcgtttcatgggcgagagcgcgaaaatcctctgccctgaaaaaacagtgctgatgcctgatttggaggcggaatgttctttggatttgggttgcccggaagaggcgttttcggcgttttgcgaccaacaccccgaccgcacggtggtggtgtacgccaacacttccgccgccgtgaaagcgcgtgccgactgggtggtaacgtcttcagtggcgttggaaatcgtgtcgtatctgaaatcgcgcggcgagaagctgatttggggacccgaccgccacctcggcgactacatctgccgcgaaacgggcgcggatatgctgttgtggcagggttcgtgcatcgtccacaacgaatttaaagggcaggagctggcggcgttgaaagcggaacatcccgacgcggtggtgctggttcatcctgaatcgccgcaaagcgtcatcgaactgggcgacgtggtcggctcgaccagcaaactgctcaaggccgccgtatcgcgtcctgaaaaaaaattcatcgtggcgaccgatttgggcatcctgcacgaaatgcaaaagcaggcgcccgacaaagaatttatcgccgcgccgacggcgggcaacggtggaagctgtaaaagctgcgcgttctgcccgtggatggcgatgaattcgctgggcggcatcaaatacgccctgacaagcggacgtaacgaaatcctgttggacaggaagctgggcgaagccgccaaactgcctttgcagcgtatgctcgacttcgcggcaggactcaaacgcggggatgtgttcaacggcatgggtcccgcctga

SEQ ID NO: 39352 - DNA, 1638 bp, Neisseria meningitidis
  misc_feature 6, 7, 8, 9, 10: 'n' is a, c, g or t
gtgtgnnnnnggcaggcttcgcacgccggatttgtgttgaacgccggccagcggcaggcttccgatgagattcagacggcattgggacggtttcagccgtttttgctgtacggcatcaccggcagcggcaagaccgaggtgtattttgatgcgatggcgaaagtgttggcgcaggggcggcaggtgttgtttctgttgcccgaaattaatcttacgccgcagcttttgaagcgggtggaaaaccgttttgccgacgtgccgaccgccgtgttgcacagccggatggcggcaggcaagcgcacgcaggattatctgcgcgcgatgtcggggcaggcgaagctggtgatcggcacgcggctggcggtgttcacgccgatggatgatgtcgggctgattgtggtcgatgaggaacacgacggctcgttcaaacaggacaacgaattgcgctaccacgcccgcgatttggcggtgtggcgggcgaagcagggcggctgtcccgtcgtgttgggcagcgcgaccccaagcttggaaagctggcacaaggcacaaagcggcgcgtaccgcctcttgcaactgaccgaacgcgcccatgccgccgcgcaactgccgcaagtagaaatcctcaacgcaggccgtctgaaactcgacaacggtttctcgccgcaagccttgcagcttctgaaacagaattttgaagcaggcggtatgtcgctggtgtacctcaaccggcgcggcttcgcacccgcgctgttttgcggcgactgcggccataccttcggctgcccaaactgctccgccaaaatggtactgcaccaacgcgcccgccaactgcgctgtcaccactgcgaccaccgcgaacccgtcccgttcaaatgtcccgactgcggcaaccaagacctgaccgccgtcggacacggcacgcagcgcgtcgaagaaaccctgcgcgccttcctgcccaaggcagccgtcgtccgcgtcgacagggacagcaccgcgcacaaaaacgactgggcggatttgtaccgccgcatcgccgacaacgaaatcgacattttggtcggcacgcagatgcttgccaaaggccatgattttgcgcggctcaacctcgttatcgtgttgaacgccgacggcagcctgtacagcgcggacttccgcgcaccggaaaggttgtttgccgagttgatgcaagtgtccggcagggcggggcgcgccgacaaacccggcaaggtgctgatacagacccaactgcccgaacatcccgtcttcgccgccgtcaaagcgcaggattatgccgtgtttgccgaaaatgaattgaacgagcggcaaatgttcgcgatgccgcccttcggtttccagaccgccgtccgcgccgatgcgccgcgtgttgccgatgcgatggaatttctcaatgccgccaaagaaaccctcgccccgctgttgcccgaaagcgtttcccagtttggcgccgcccctatgctgatggtgcgccttgctgaacgcgaacgcgcgcaaatcttcctcgaatcggtatcccgacaggatttgcaccgcgccgtgagtttgtgggtgcaggtgttgcagcaaaaccgcgacagcaaaatcagatggtcggtggatgtcgatccgcaggaggcttga

SEQ ID NO: 39353 - DNA, 654 bp, Neisseria meningitidis; identical to SEQ ID NO: 36293

SEQ ID NO: 39354 - DNA, 645 bp, Neisseria meningitidis
atgactttaggtctggttggacgcaaagttggtatgacccgcgtgttcgacgaacagggtgtttctgttccggtaaccgttttggatatgtctgccaaccgcgttacacaagtaaaatccaaagatactgacggctatactgccgttcaagttacctttggtcagaaaaaagccaatcgtgtcaataaagccgaagccgggcactttgcaaaagcaggtgttgaagccggtcgcggtttgattgagtttgctttgactgaagaaaaactggctgaattgaaagccggtgacgaaatcaccgtttctatgtttgaagtcggccagctggtcgatgtaaccggtacctctaaaggtaaaggtttctccggtacgatcaaacgtcataacttcggtgcccaacgtacttcccacggtaactcccgctctcaccgcgttccaggctctatcggtatggcgcaagacccgggtcgcgtgttccccggtaaacgcatggccggccaatacggcaacaccaaagcaactgttcaaaaattggaagttgtccgtgttgatgcagaacgccaactgctgttggttaagggtgctgttccaggtgcggtcaacagcgatgttgtagttcgtcccagcgtgaaagtaggtgcgtaa

SEQ ID NO: 39355 - DNA, 1155 bp, Neisseria meningitidis
atggatacgcacgcggacgaaacaaaacttcaaaacacgcaagccaaacgcaaacgccgcctgacggcattgacgctgctgttcgcgcttgccgccgcagccgccgggtcggcgttttttttatggtggcagcacgaagaggaaacggaagacgcttatgttgccggacgcgtggttcaggttacgccgcaaaagggcggtacggtgcggaaggttttgcacgacgatacggatgccgtgaaaaaaggcgacgtgctggcggtattggacgacgataatgatgtgctggcttacgagcgggcaaaaaacgagctgattcaggcggtgcggcaaaaccgccggcaaaatgccgccacttcgcaggcgggggcgcaggttgccttgcgccgggcggatttggcgcgcgcgcaggatgatttgcgccgccggtctgctttggcggaatcgggcgcggtgtccgccgaagagctggcacatgcccgtgcggcagtgtctcaggctcaggcggcagttaaggcggctttggcggaagaatcttcggcacgtgcggctttgggcggtcaggtttctttgcgcgaacagccggcggttcagacggcaatcggcaggttgaaagatgcgtggttgaaccttcagcggacgcaaatccgcgcgccggcggacggtcaggtggcgaagcgttcggtgcaggtcgggcagcaggtggcggcaggcgcgccgctgatggcggtggtgccgctgtcggatgtgtgggtggatgctaattttaaagagacgcagttgcggcatatgaaaatcggacagcctgccgagctggtgtccgatttgtacggcaaacaaattgtttatcgcggcagggtggcaggtttttcggcaggtacgggcagcgcgttttcgctgattccggcgcaaaacgcaacgggcaactggattaaagtggtgcagcgcgtccccgtccgtatcgtgctgaaccgcgaagatgtggacaggcatccgttgcgtatcggtttgtcgatgacggttaaagtggatacttccgccgcaggcgcgcctgtttcaaaaacgccgggtgcggcattgccggaaatggaaagtaccgactggtcggaagtcgatcggacggtcgatgaaatcctcgggcaatccgcgccctga

SEQ ID NO: 39356 - DNA, 309 bp, Neisseria meningitidis; identical to SEQ ID NO: 36432

SEQ ID NO: 39357 - DNA, 2262 bp, Neisseria meningitidis; identical to SEQ ID NO: 38996

SEQ ID NO: 39358 - DNA, 735 bp, Neisseria meningitidis
  misc_feature 6, 7, 8, 9, 10: 'n' is a, c, g or t
gtgtgnnnnnaatttgtttccgtaacttacggtgcaaactcaggcgagcgcgaccgcacacacggcatcgtcaaacgcatcaaacaggaaaccggcttggaagccgccccgcacctgaccggtattgacgcttctcccgacgaattgcgccaaatcgccaaagactattgggacagcggcatccgccgcattgtcgccctgcgcggcgacgagccgcccggctacgagaaaaaacctttctatgccgaagatttggtcaaactgttgcgctccgttgccgacttcgacatttccgtagcggcctatcctgaggtacacccggaagccaaatccgctcaagccgacttgatcaatctgaaacgcaaaatcgatgcgggcgcgaaccacgtcatcacccaattcttcttcgatgtggaacgctacctgcgcttccgcgaccgctgcgtgatgttgggtatcgatgtggaaatcgtccccggtattttgcctgttaccaacttcaagcagctcggcaaaatggcgcaagtaaccaacgtcaaaatcccaagctggctgtcgcaaatgtatgaaggtttggacgacgaccaaggtacgcgcaatctggtggcggcaagtatcgccatcgatatggtcaaagtcctgtcccgcgaaggcgtgaaagatttccacttctatacgcttaaccgcagcgagctgacttacgccatctgccatattttaggcgtgcgcccttaa

SEQ ID NO: 39359 - DNA, 1647 bp, Neisseria meningitidis
atgtctgaagaaaaattgaaaatgagtttcgagccaaccgtaatcgaacatttgggtgtaaagatgtattcgcacactgttcctgcgattgccgagttgatagcgaatgcctacgatgcatgtgctacggaagtggaagttaggttattcgataaaccggagcataaaatcgttattaaagataatggtataggaatgagcttcgatgaaatcaatgatttttatttgagaatcggtcggaacagaagggaagaaaaacaagcctccccgtgcggaagaattccaacgggtaaaaaaggccttggtaaattggcattattcgggcttggcaacaaaattgaaatttctactatccaaggaaacgaacgggttacttttactttggattatgcagagattaaaaaaagtgagcgtatttatcaaccggagtttcagaaagaatctgttgaacccaataccgaaaacggaacaaccataactttaaccgaactgacgaaaaaacaaggatacccgttagataattatgtggagcatctttcccgcttgtttgattttccggctcaggattttaaaatcaaagtaagcttgaacggctcggaacccaaaatcattgatggaaatctaaaatatgatcttgttaccccacaattcgaatgggaataccaggatctagcaaccaatatttcatcgttatcttcaaaattcgaacagtatgaatacagcggattaatacaaggtaagttcattacaacggaaaaacctttaaagaataatatgaaaggtattaccttgtttgccaacggcagaatggtaaatatgcccgagtttttcactgatagcgaatccagccatttctattcctatctgacaggatggttaagtattgattttatagataatgatgatgaagatttaattgctacagataggacatcattggattggaagcatcctaaaacttcaaagttacgggttttccttggggaaatcgttcgagccatcgggcaagattggagaaaaagaagaaaaaaagaaaaagatgacgaagtgaaaggtgaaagcggggttgatatcgaaaattggaaaaacaaattgccagaaaaggaaagggaaccagtagaagttattttgaatcgtttggaagattcggagcttacaaataaagagcaagcggaagtaatctctgccttacatagtattattccagaatatccttactatcattggcggcatttgcatcaggatttgcatactgcctgtaatgatttttacaatgaaaagaaggattatttaagtgctgcaatcgaggcagttaaagttttcgaaaataaggttcagaagcaaacaggtcttcatagcatagacggaagagaattgattgaacaagctttcgggagtaaaaattctatacttctattaacgaataacaaaacgaaggcggaacaaaatttagaagatggtcttgaacagcttgcatgcggaacatggactggatttagaaatcctgtacaacatgagttaagagcaaatttatctcctagtatttttaatgataaggatgctttggatttaataagcttggtttcgtatttgttaagaaaagtggaacagacaaaaaaacgatcgaaggtggtatcttccaagtaa

SEQ ID NO: 39360 - DNA, 126 bp, Neisseria meningitidis
atgatggtattgagcctcaaacttggggagaagctatccagctacgaattagaaagcaagaaacacaaaaaggagttccagaagggtggagcaaaagatttcctaacggaagtatttatgatgtaa

SEQ ID NO: 39361 - DNA, 360 bp, Neisseria meningitidis
atgatacgttatcttttaattgcctgcggctgcatctccctgctgttgggtatcatcggcatttttttgccgctgttgccgaccacgccgttcgtactgctctccgccgcctgctgggcaaaggcatccccgcgctttcaccgctggctgcaccggcaccgctatttcggtccgatggttcataactgggaacaaaacggcgcagtgccgcgcaaagccaaaatattcgccatcagtatgatgaccgcatcctgcctgataatgttttggcagtttccccaacgctggtgggtcggggcggtttcatcggttttttgttcccttgtcgccatatggatgtggcgcaggcccgaatcttga

SEQ ID NO: 39362 - DNA, 1293 bp, Neisseria meningitidis; identical to SEQ ID NO: 38978

SEQ ID NO: 39363 - DNA, 201 bp, Neisseria meningitidis
  misc_feature 4, 5, 6, 7, 8: 'n' is a, c, g or t
gtgnnnnntaaaaatcgggtttacgccgtccaaacatttgatgcaactgcggtcggccccatactgctattacacacgaacggacaggatttgaaggtgttatcggctatgaaacccatttttcagggcacggacatgaagtacacagtccgttcgatcatcatgattcaaaaagcacttctgatttcagcggcggtgtag

SEQ ID NO: 39364 - DNA, 777 bp, Neisseria meningitidis
atggctaagaaattcgataaagacagcttcagcggcacgctgattgtcgtgttggcggtcagcctgatttgctcggtcatcgttgccggtgcggtcgtcggcttgaaacccatccaagagaaacaaaaactccaagacaaacaaggctatatcttgagcgtagccggtttgatggataaggacaccgacatcggcaaaacctttgccgagcgtatcgagcaacgtgttgtcgatttggcgaccggcgaatacgtcgccgatgcgcctaaagacttcagcgcgcgcatcgcaggcaaagaccctgcccaaagcatccaaatcaaacctgaagacgatttggcaggcatcaaaagccgtgccaaatacaccgaggtttatttggtaaaaggcgaagacggcaaaatcggccaaatcatcctgccgatgcacggcaacggtttgtggtcggtcatgtacggctttgtcgccatccaacccgacggcaacaccatcaacggcattacctactacgagcaaggcgaaaccccgggcttgggcggcgaaatcggcaatcctttgtggcagcaaaaattcgtcggcaaaaaactgtttgacggacaaggcaaactcgccctgcacgtcggcaaaggcgcgggttcggacaaagaacacggcgtagatgccctctccggcgcatcgctgacatccaaaggcgtgcaaggttcgttcgcctactggttcggcgaaaacggctatatcccctacctgaacaaattgaaatcagcaggagcgcaataa

SEQ ID NO: 39365 - DNA, 999 bp, Neisseria meningitidis
atgtccgaaaacaaacacaacgaagtcctgagcggttacgaacaactcaaacggcgcaaccgccgccgcctcgtaacggcaagttgcctggttgccgcctcctgcatcctgctggcagccgccctcagttccggccctgccgaacagactgccggcgaaacaagcggcgtagaaaacaaagcggcaggtgcggcacaaacccctgccttgaaatccgccgccgacaaaccgcaggacttggcaggcgaagacaagccttctgccgccgacagcgaaatcagcgagcctgaaaacgtaggcgcgccgctggtgctgattaacgaccgcctcgaagacagcaacatcaaaggtttggaagcatccgagaaactgcaacaggcagaaaccgccaaaaccgcaccgaagcaggcaaaacaacgcgctgccgaaaaagtgccggcaactgccgacagtacggatacggtagcggttgaaaaaccgaaacgcactgccgaaacaaaaccgcaaaaagcagaacgcactgccaaagccaagcccaaagccaaagaaaccaaaaccgccgaaaaagttgccgacaaaccgaaaactgccgccgaaaaaaccaaaccggatacggcaaaatccgacagcgcggtaaaagaagcgaaaaaagccgacaaggctgaaagcaaaaaaacagccgaaaaagaccgttcggacggcaaaaaacacgaaacggcacaaaaaaccgacaaagcggacaagaccaaaaccgccgagaaggaaaaatccggtaaaaaagccgccattcaggcaggttatgccgaaaaagaacgcgccttaagcctccagcgcaaaatgaaagcggcgggtatcgattcgaccatcaccgaaattatgaccgacaacggcaaagtttaccgcgtcaaatcaagcaactataaaaacgcaagggatgccgaacgcgatttgaacaaattgcgcgtacacggtatcgccggtcaggtaacgaatgaataa

SEQ ID NO: 39366 - DNA, 435 bp, Neisseria meningitidis
atggaaaaattcagcaacattgcgcaactgaaagacagtggactgaaagttaccggcccgcgtttgaagattttggatttgttcgagactcatgcggaagagcatttgagtgccgaggatgtgtaccgtattttgttggaagagggtgtggaaatcggtgtggcgacgatttatcgcgtgctgacgcaatttgagcaggcgggcattttgcaacgccaccattttgaaacgggcaaggcggtttatgagttggacaagggcgaccaccacgaccatatcgtctgtgtgaagtgcggcgaggtaacggaattccacaatcccgaaatcgaagccctgcaagacaaaatcgccgaggaaaacggctaccgcatcgtcgatcacgcgctttatatgtacggcgtgtgcagcgactgtcaggccaagggcaaacgttaa

SEQ ID NO: 39367 - DNA, 360 bp, Neisseria meningitidis
atggaaacccaagaaaagaaatttgttcctgcctccaagcaaataccgaccgtaaatagcggctggttagaccgtgaattaggcgaagccatgagtgaagcggtgcgtgcctgccttgctcacggtaaacagtcagaaattactgtcaagctcaaaatccaaccccaaaacatccaaagcggaacggtaaaaatcagccacgatgtagcaaccaaactgcccaaagaaaaacgcgaaggcggcatcgtctttgctacacctgacggcaacatccaagccgacgatccggcacaaggaaaattgaaactcaaacaagttcccaatacgtcaagcacgttgaaaatggtcagatccaactaa

SEQ ID NO: 39368 - DNA, 822 bp, Neisseria meningitidis
atggattttctgattgtcctgaaagccctgatgatgggcttggtagaaggttttaccgaatttttaccgatttccagcaccggacatttgattgtgttcggcaatctgattgattttcacagcaatcacaaggtttttgaaattgccatccagctcggtgcagttttggcggtagtgtttgaataccggcagcgtttcagcaatgtgttgcatggcgtgggaaaagaccggaaagccaaccgcttcgtcctcaatcttgccattgcttttatacctgccgccgtgatggggctgttgttcggcaaacagattaaagaacatctgttcaatcctttgagtgtggcggtcatgctggttttgggcggtttttttattttgtgggtggagaaacgccaaagccgggcagagcctaaaattgccgatgttgatgcattgcgtccgattgatgcgttgatgatcggcgttgcccaagtgtttgcactggttccgggtacgtcccgttcgggtagtacgattatgggcgggatgctttggggaatcgagcggaaaacggcaacggagttttcatttttcttggccgttccgatgatggttgccgcaacggcttatgatgtcctgaaacattaccggtttttcaccctgcatgatgtcggtttgattctgataggctttattgccgcttttgtttccggtttggtagcggtcaaagcactgctgaagtttgtttccaagaaaaactatatcccgtttgcctattaccgcattgttttcggcatcgtcatcataatattgtggttgtcgggctggataagttgggaatga

SEQ ID NO: 39369 - DNA, 1044 bp, Neisseria meningitidis
atgagtaaaaaaatcaaagtcggcattgtcggcgcgacgggctacactggcgtggaactgctgcgcctgcttgccgcccatcccgatgtcgaagtcgccgccgtaaccagccgcagcgaagcgggaaccgcagttgccgattactttccaagtctgcgcggcgtgtacggcctcgccttccaaacgcccgacgaggcaggtttggaacaatgcgacatcgtcttcttcgccacgcccaacggcatcgctatgaaagacgcgctgcgccttttggaacagggcgtgcgcgtcatcgacctttccgccgacttccgcatacgggacattccgacctgggaacactggtacggcatgacccacgccgcccccggcctcgtttcccaagccgtgtacggattgagcgaactcaaccgcgaagccgtcgcacaggcgcgcctcgtcgccaaccccggctgctacccgacctgcgtatccctaccgctcgtgccgctgttgcggcaatgccgtctgaagcccggtatgccgctgattgccgactgcaaatccggcgtatccggcgcgggcaggaaaggcaatgtcggttcgctgttgtgcgaagccggcgacaacttcaaagcctacggcatagccggacaccgccacctgcccgaaatcaggcagaccatcgccgggcttcaggacggcatcgccgaaggattcgtgttcacgccgcacctcgcgccgatgatacgcggtatgcacgccaccgtttacctccacctttcagacggcagcaaccccgaaaccgttttgcgcgactattatcgcgacagcctgttcgtggacatcctgcccgccggttcgacacccgaaacccgcagcgtgcgcggcgcaaacctctgccgcatcagcatccaacaggcggcgcaatccgatgtgtgggtcgtcctttccgtcatcgacaacctcgtcaaaggcgcggcgggacaggcggtgcaaaatatgaacatcatgttcggactgaaggaaacacacggcttggacgcaatccccctgctcccctga

SEQ ID NO: 39370 - DNA, 975 bp, Neisseria meningitidis
atgacagaatatcccggcatcgggtcgccgttgttttacggcgttttttttgcggcagtgctggtcatgattgccttggatatgttttcgctgaagaaaaacggcagccataaagtcggcgtcaaagaagccttggcatggagcggcttgtgggttgccgtatcctgcctgttcgcgggctggctgtatttcgaactcgccggcaatctcggctacggcgcggcagtcgcaaaagaaaaagtattggaattctttaccggctacattttggaaaaatcgttggcagtcgacaatattttcgtgttcctgatgatattcggctacttcaaagtcgcaccacagtttcagcaccgcgtgctgctgtacggcgtattgggcgcattggtattgcgcactgtcatgattttcgtcggcgcggcactggttcggcagttcgagtggattctgtatctgttcggcgcgttcctgctctataccggcatacacatgatgaagcccgaaggcgatgaggaagaggatttggcaaacagcaggctgctgaatgccgtcaagaaagtcgttccggtcggcacggaatttcacggcgagaaattttttaccgtcgaaaacggcaaaaaaatcgccacgccgctgtttttggtgctagtcatgattgaattgagcgatgtcgtgtttgccgtggacagcatccccgccgtctttgccgttaccaccgatccgtttatcgtgctgacctccaatattttcgccattttgggtttgcgggcgatgtatttcctgctggcggatgtggcggaacgctttatcttcctgaaatacggcttggcattcgtgttgggttttatcggtgtgaaaatgctggtaatgcattgggtgcatatcccgatttccgtttcactgtcggtcgtgttcggcgcgttgggtgcatcgatactgacctcgttaatttatacgaaaaaacagcctgataaataa

SEQ ID NO: 39371 - DNA, 864 bp, Neisseria meningitidis
atgaaaaccttactgccctttttcggcgtggtacgcgtcagcggcgaagaccgccaaaccttcctgcacggacagctttccaacgacatcaataatcttcagaccgggcaggcgtgttatgcgacttacaacacgcccaaaggccgcgtcatcgccaatatgattgtcgtcaaccgaggcggcgatttgctgctgattatggcgcaagacttgcttgaagcaacgatcaaacgcctgcggatgtttgtcctgcgcgctaaagtcgtttttgaaatccttgaagattacgccgtcgacgcggaattggaagcatccgccgaaccgcttgccgcgcaagaacccagtctcgtctttaccgccgaatgcgtttcagacggcatctgcaccgtcgtcctgccccatcggggcattttgcacatcgcccccaaaaacgccttgccgccttatgatgccgccgccgaaaacgcgtggcggctgcacgaaatccgcagcggttacccgtggatatgcgcggctaccaaagaaaccgccgtcgcccaaatgctcaaccagcacatcatcggcggcgtacacttcaaaaaaggctgctatccgggacaggaaatcattgcccgtgcccagtatcgggggcaggtcaaacgcggcttggcggtattgtcgggaaattcggcagccgaagcaggcatcctgctggcggcagacggcgaagaggccggcatcgtactcgacagcgttcaagattcggaaaactttaccgcccttgccgtgattaaattctccgccgcacaaaaagaactgaccgtcccaaacggcggtatcttcaaagcggttcatctcttctttaaaaccgaaaatgcagaataa

SEQ ID NO: 39372 - DNA, 780 bp, Neisseria meningitidis
atgcatatcatcgattcgcactgccacctcaattttgaaggtttgaaagaacgcctgcccgaagttttgtccaacatggaagcaaacggcgtggggcaggcgctcgccatcagcgtcagtagggaaagcttctccgaagtctttgccatcgccgaagcgcacgaacacatctattgcaccataggcgtacatcccgacagtaaggaagccgaagaattttccgtcgcggaaatggtcgaagccgccgcccatccgaaagtggtcggcattggcgagacgggtttggattattactggtgcaaaggcgatttgtcctggcagcacaaacgctttgcagaccacatcgaagcagccaatcaaaccggactgcccgttatcgtccatacgcgtgatgcggcggcggataccttgtctatcctgaaagaatgccgggttaattcgggcgttatccactgtttttccgaagacatcggttttgcccgtgcagcaatggattttgggctttatatttctttctcgggaatcgttacctttaaaaacgcacccttggttcaggaggcggcaaaatacgttccggacgaccgcattttggtggaaaccgatgcgccgttcctcgcccccgttcccaaacgcggcaggcagaacgaaccggcttttgtgcgccataccgccgaacatatcgccaaattgcgggaccaaacattggaacaggttgcggcatatacgacggaaaacttttaccggctgtttcaaaaagtacccgatatgcgggccgtctga

SEQ ID NO: 39373 - DNA, 489 bp, Neisseria meningitidis
atgaaaaaaatactcaccgccgccgtcgtcgcactgatcggcatcctccttgccatcgtcctcatccccgacagcaaaaccgcgcccgccttctccctgcccgacctgcacggaaaaaccgtttccaacgccgacctgcaaggcaaagtaaccctgattaatttttggtttccctcctgtccgggttgtgtgagcgaaatgcccaaaatcattaaaacggcaaatgactataaaaacaaaaacttccaagtccttgccgtcgcccagcccatcgatccgatagaaagcgtccgccaatatgtcaaagactacggtttgccgtttaccgtcatgtatgatgcggacaaagctgtcggacaggcgttcggcacacaggtttatccgacttccgtccttatcggcaaaaaaggcgaaatcctcaaaacctacgtcggcgaacccgatttcggcaaactctaccaagaaatcgataccgcgctggcacaatag

SEQ ID NO: 39374 - DNA, 243 bp, Neisseria meningitidis
atgacctaccgtgaattagttgaacgtcagttggctgtgcgccatgccgatttggaattgggcttaagccgcgcacgcgaacaagagccgtttgtcattcatgtttccgatctgttggataaggcaggcattgagtacgcggtacgcatggataaggattttcagacgaccttttgtgtggcgttttctgcgaccgcccctgctgatgtgattggtattttacggaaatattactcagtctga

SEQ ID NO: 39375 - DNA, 1143 bp, Neisseria meningitidis
atgaaggtttttaaacaacagcttgaacaactcggcgcgcaaaaccaatatcgttcgattccggatttgattcatcaagggcggtatattacgcgggaaaaccgcaaaatgctgaatatgtcgtctaatgattatttgggtttggcatcagatgaaaacttgcgccggtcttttttgcagcaatacggcggtaattttccctcttttaccagttcttcatcgcgtttattaacgggcaactttcctatttataccgatttggaagagcttgtcgcacaacgtttccaacgggaaagcgcgttattgttcaacagcggctatcacgccaatctcggtattttgcctgctttgacgacgacgaaaagtttgattttggcagataaatttgttcacgccagtatgattgacggcatccgtttgagccggtgtgcgtttttccgttatcgtcataatgattatgaacatttgaaaaatctgcttgaaaaaaacgtcggaaaatttgaccgcacttttatcgttaccgaatctgttttcagtatggacggcgatgtggcggatttgaaacagcttgtccaattaaaaaaacagtttcccaatacttatctttatgtggatgaagctcacgcaatcggtgtttatgggcaaaacggattggggattgccgaacgggataatttgattgccgagattgatttattggtcggcactttcggtaaagccttagcctcggtgggggcgtatgccgtctgcaaccaagtattgaaagaatgtttgattaatcaaatgcgcccattgattttttcaaccgcattgccgccgtttaatgtggcttggacttattttatttttgaacgattgccgcaattctcaaaagaaagaagccatcttgagcagttaagcgcatttttacggcgggaagtggcgcatcggacgcaaataatgccgagccaaacctgtatcgtcccctatattttaggcgggaatgaagccacccttgccaaagcggaatacctgcaaaggcagggttattattgcctgcccatcagaccaccgacagtaccaaaaggtacatccagaatacgattgtctttgacggcagatatgacaatggatgaagtgcggcagtttgcggcgtgcctgtaa

SEQ ID NO: 39376 - DNA, 2589 bp, Neisseria meningitidis
atgaaaaatcaatatagtaaatcattgcatggcgtgttttaccttgccttctatgataaaatacacgcattttttgcagagcagttgtttcaactcatcataaatatgaacaaaaaacccacctacatcagtttatttagcagtgcaggcgttggttgctatggttttaaaaccaatggttttgaatgcgtagcaaccaacgaacttttagaaaaacgcctaaaaatccaaaaatataatcaaaaatgccgctttgattcaggttatattgctggcgatattaccctgcctgaaacccaagccaaactgtttgccgaaattcgacgctggaatactgaaattgatgttgtgattgctacaccgccttgccaaggaatgtcggttgccaaccataaaaaaaataatgaaatggcaagaaattctttggtcgtggaatcaatcaaaatcgttcgggaagttcagcccaagttttttatttttgaaaacgtcaaagcctttttaaatacaccctgcaccgataccgatcatcaagaaaagccgattgaggaagccatttggtcaaatttgggcggacattacaacattctatccaatgtactaaattttaaagattatggtgcaaattccagtcgtaccagaacgctggtgattggcgtgcgaaaagatattcatcacattacgccgtacgatattttccccaagcaaacaccgccaaaaaccttgcgtacattgctggctgatctgccgcctttaatgcaaatgggcgaaattagcgatgatgatatttaccatagctatcgtgaatttgatcgccgtatgttgccgtggattgcacagcttaaagaaggcgagtcagctttccaaaatactgatcctgcacgcattccccatcaaattaaaaatggtaaaattatctacaatcaaaacaaaaatggagacaaatacgcccgttggtttttagatcgtgagggtccgtgcatccatacccgtaatgacattttagccagccaaaacaccatccatcccactgaaaaccgtgtattttccgtgcgtgaactcatgcgtatgatgtcaattccgccatcatttaaatggacggcacaagatgaaaaacagcttaatgcactgtcatttgatgagaaaaaaacctttttgaaaaaagaagagctgaatatccgccattgtatcggtgaatctgtgccaaccgctgttttggccaatgtcgcacaaaacattcaggcagccttgcaacagtccgaactgtcaatgacggaaattcaaaatttaatcaaacgagaaaatttatcccttgccgataatctctaccgatttattgagcaacattttgacacatatccattcagtcggcttttgcaaattgctgaatacgctaatgctgcccgtagcgaaacggctgcttattttacccgtattgatattgctttcggactggttaatgctcttcctgatttcaaaaagaaaaaaaacttacggattttagaaccctctgtcggcattggtaatttcattccactactggcaaaaaaatatgcagacaaagaaaaagttatttttgatttggtggatattgactcaaacagtttaaatctcctgtcattgctgctgaaaaaattaaatttaggcagtaaatttgagttcaatattattcatcaggattttttaaccgcaacgctgcctgaaaactatgatctagtcatcggcaatccaccatacggcaaagttaaggcaagtgataaaaatttggcactataccgtaaaaatgctaccaataaagatacgcaaaatattttttcattttttattgataaggctctgacgctcagtaaaaccgtggctttggttgttcccaaaagtgtgattaacgcccccgagtttcaaataacccgacaacaacttatcacagccaatatcaaccgcattattgattacggcgagaaagcatttaaaggcgtaaaaatagagacgattgcctttattgccgatcaaaccgacaaagacaatcaacatattacgatagaaagccatatccaagaaacgttgatacaaaactgtaaaaactattttttttctgataattttccctattggttgatttatcgtaatagtgaatttgatcaaattgcacaaaaattggaatttaatgtatttcaatcattccgagatcgccaaattaccaaagcgcatacacagaatagtggcaatgttcgggttttaaaatcccgtaatatcggtaacaacgagattattgatattgagggttatgatagttatgtggattcagttgcccctttttctgtcggcaaatttattaaccgtaaaaatgtcgtgatgattcccaatctgacttacaaacctcgggcagcatttttgcctgaaaacagtattgctgatggctcggttgccctactgacaatgaaaaaacacgaaaaaatcctaacccaacgagatctcgcatactatgcaactcccgaatttgagcagttttaccgtgttgcccgtaattatggttctcgttcaatgaatatagacaatcattctgtgttttttttcggattgctaaaagattag

SEQ ID NO: 39377 - DNA, 1713 bp, Neisseria meningitidis
atgaaagccagccaattctttatctctactttaaaagaagcccctgccgaagccgcgcttgccagccacaagctgatgattcgcgccggtctgattaaagccaacgcgtccggcctttatacttggatgccgatggggctgcgcgtgttacgcaaagtcgaaaacgtcgtgcgcgaggaaatggcgcgcgcgggcagcgtggagctgctgatgccggtggtgcagcctgccgagctgtggcaggaatccggccgctgggaattttacggtaaagaactgctgcgcctgaaagaccgccacgaccgcgatttctgcatgggcccgacctgcgaggaagtcatcgccgacatcgtgcgcaaagaaatcaacagctacaaacagctgccgaaaaacttttaccacatccaaaccaaattccgcgacgaagtgcgcccgcgtttcggcgtgatgcgcgcgcgcgagttcgtcatgaaagacgcttattccttccatgccgactacgcctcgcttcagacgacctatgatgccatgtatgactcttactgccgcatcttcacccgtctgggcttggcattccgccccgtcgccgcagacaccggcagcatcggcggtacgggttcgcacgagtttcaagtgttggcggaaagcggcgaagatgttattgcgtacagcgacacttccgattacgccgccaatatcgagttggcaccgaccttgccgcttaaaggcgaacgcgccgctgctcaggctgtgttgaccaaagtacatacaccaaacgtcaaaaccattgagtctttggttgaattcctgaatattccggttgaacaaaccctcaaatccatcgtggtcgaaggcgaaaacgaaggcgaaatcgtcttattactgttgcgcggcgaccatgagttcaacgacatcaaggcagaaaaactcgcaggcgtgagatcgccattgacgatggcaagtcctgccgcgattgtcgaacagttcggcgcaaacggcggctcgctgggtccggtcagctttgcaggtaaagtttatgccgattttgctactgaaaaaggagcggactgggtcatcggtgcgaacgaagacggctaccactataccggcttcaacttcgggcgcgatgccgccgagcctgaattcgtcgatttgcgtaatgtggtcgaaggcgacgaaagccccgacgggcaaggccgtctgaaactggcgcgcggcatcgaagtcggacacgttttccaattgcgcgacaaatacacccaagccatgaacgtaagcttccttgacaacaacggcaaatcgcaaattatggaaatgggctgctacggcatcggcatcacccgcgtcgttgccgccgccatcgagcagaataacgacgaaaaaggcatcatctggaccaaagcaatggcgccgtttgaagtcgttatcgtgccgatgaactacaaaaaatcagacaccgtacgcgaagccgccgacaaaatctatgccgaattgctggcggcaggcgcagacgtcctcctcgacgaccgcgacgaacgcgcaggcgtgttgctgaacgattccgagctgttgggtattccgcaccgcatcgtcatcggcgaccgcgctttgaaagaaggcaatgtcgaatacgccgaacgccgcaacaacgaagcgcaggcagttgcaatcggagaaattgttgcgcgtgtaacagcttcattaaatgggtaa

SEQ ID NO: 39378 - DNA, 936 bp, Neisseria meningitidis
atggaactctttaaaatcaaacgcgatattccgtttatgagctacggcaaactgacgacctttatttcgttggttacctttattgccgccgtattctttttggttaccagaggtctgaatttctctgtcgaatttaccggcggtacggtaatggaagtccaatatcagcagggtgcggatgtcaataagatgcgcgaacgcctcgatacgctgaaaataggtgatgtacaggttcaggcattgggtacgaacaaacacatcatgatccgcctgccgaacaaagaaggtgttacttccgcacagttgtccaatcaggttatggatttgctgaaaaaagacagtcccgacgttaccttgcgccaagtcgaatttatcggcccgcaagtcggtgaggaattggtaagtaatggattgatggctttaggttttgtcgctatcggcatcattatttacctgtcgatgcgtttcgaatggcgttttgccgtatctgccattatcgccaatatgcacgacatcgtgattattctcggctgctttgccttcttccaatgggaattttcactgaccgtcttggcgggtatccttgctgtattgggctattctgtgaacgaatccgtcgtcgtcttcgaccgtatccgtgaaaacttccgcaagccggcgatgcgcggacatgccgtgccggaagtcatcgacaacgcgattaccgcaacgatgagccgcaccatcattacccacggttcgaccgaggcgatggttgtttctatgctggtgttcggcggtgcggccttgcacggcttttctatggcgttgaccatcggcatcgtgttcggcatttattcttccgtattggttgccagcccgcttctgctaatgttcggtttgagccgcgacaatatcgccaaggaagcgaaacagaaggaagaaatcgtggtttga

SEQ ID NO: 39379 - DNA, 342 bp, Neisseria meningitidis
atgcccaaaatcaccgtacttccacacacgacattatgccccgaaggcgcggttatcgaagacgcgcccgaaggcaaaaccgtccttgacgtgctgctcgaccatgatatcgaagtcgatcacgcctgcgaaaaatcctgcgcctgcaccacctgccacgtcatcatccgcaaaggtttcgacagtttggaagaaccgaccgaattggaagaagacctgctcgaccaggcttggggtttggaagccgattcacgcctgagttgtcaggcggttgtcgccggcgaggatttgattgtggaaatccccaaatacaccatcaaccacgcgcgcgaagaacactga

SEQ ID NO: 39380 - DNA, 723 bp, Neisseria meningitidis
atggataaggacaaggggtcttatgcgggtattcctgtacaaaataccaaagagttagtttggcagaaaatacaagacatacctatttctgaatgtggggaaccgttggtcagtgttggtaataccggacgcattcgtgtcaatcctgtttatttttctcagggtattgaaggggcgataaatagtgttttattgcgtagaagtgttgctgataggctgactcaggttgtctctttgctgccggaagtgtacgggttggaaatttttgatggttggcgtcctgtcatagtgcaaagagcattacgagaaaatatgaagcaagaaattgaaaaacgccatccggaatatgatgaagttcaagttagagaagcactggactgttttgctgctgatccagatcgggcaggaatgcctctgccccatttgacaggcggatctgttgatgtcggattgtttgatataaaaagtggcaaaagtttggatatgggaagtgagtttgatgcaactggacatttatcttatagcgatgctttagagaaagaaggtgagtatttctcctctgctcgtaatttacgccggattttgattcatgcgatgaaagaggcaggatttagtaatttgccaaccgaatggtggcatttcgattatggcaaccaaaattgggcttattttacccaacaaagcaacgcagtttttggggcggtagaagagcaggatacttaa

SEQ ID NO: 39381 - DNA, 402 bp, Neisseria meningitidis
gtgaagattaaaccattacaattttctaacaataatcacagattttatgtggacaaaatttgtgttaccgaacaagatgtgaacattttggcatccgaccgaaattatgaattaaatattgaaatatttattgacaatataattcattttcaaataacagatgaatcttataaagtaaaattttcagaatatttatttgaaaataaagaaaaaaatgattgggatagaaatcctgctataaattattttttcgagataatagatgacagttatatggactggttgaaagaagaaagttttggtttttttgaaaagaaatattataaggcttacattttcttttttagcgattctgtaatagaagttatcagctcgacagaacctgtattttattcaaaataa

SEQ ID NO: 39382 - DNA, 855 bp, Neisseria meningitidis
  misc_feature 836, 837, 838, 839, 840: 'n' is a, c, g or t
atgagaatcctattgacaggctcgaaaagccaactggcacgctgcctgcgcgaccgtcttccggaagactgggaaaccattgcgacggattccgcatccctagacattaccgatgccgatgccgtctgcaacatggtcaaaagtttccaacccgacgctattgtcaacacggctgcctatactgccgtcgacaaagcggaaggcaatgcggcagcggcatttgccgtcaatgcttccgccgtttacaaccttgccttggcagcacatcgcgcccatgcccgattcatccacatctcaaccgactatatctttgacggtaaagggaaaaggccctatcaggaaagcgactttaccaatccttccaatgtatacggacaatccaaaaccgccggcgagctgctcgcactgtctgccaatcccgacagccttatcctgcggacttcttggctgtttagcgaatacggggacaactttgtccgcacgatgctgaaccttgcgcgggaacgttccccgctgtccgccgtccacaaccaaatcggctgcccgacctatgccggcgatttagctgccgccatcatccgccttttgcagcaaacgtcgcccgtgcgcggcatttaccactacgccggcggcaaatccgtatcctggtacgaatttgcccaacatattttccaagcggcatcgcaacagcagacatccttccccgttcccgaattgactgccgtttcagacaaggaatatccgaccgccgcccccaggcccgcatacagcattttggactgccgcaaaatcgaaaacgacttcagcatcaaaccgtcagactggcaaaaagcccnnnnncacacacttaattaa

SEQ ID NO: 39383 - DNA, 534 bp, Neisseria meningitidis
  misc_feature 519, 520, 521, 522, 523: 'n' is a, c, g or t
atgcagaatacttcctttgataatgaatccgattatagcgacgattcagactttgcgtcagcttccgaaactgaaaaccgtatcggtctgaccgttccgctcgagcttgccggcgggcggttggatgcggtgttggcgaaacttctgcccgactattcgcgcagccgcctgacattatggattaaagagggcgcggttattgtaaacgataaaccttcgcaacccaaagacaaaatgataggcggtgagcaaatccgtgtaaccgtccgtccgagtgaggaaaatctggcgtttgttccagagcctatggctttggatattgtttacgaagacgataccgtcattgtcgtcaacaaaccggccggactggtggtgcatccggcggcaggcaactgggagggggacgctgctcaacggcctgttggcgcactgtcccgaattgagccaagtaccgcgtgcagcatcgtacaccgtttggacaaagaaaccagcgggctgatggtggttgccaaaaccctnnnnncacacacttaa

SEQ ID NO: 39384 - DNA, 657 bp, Neisseria meningitidis
atggattttgaaaaagcgcggttcaatatggtcgaacagcaaatccgtccttgggatgtattggattttgacgttttggacgctttggcggagattccgcgcgagctttttgtcgatgaggacttgcagggtttggcgtatgcggatatggcgctgccgcttgccaacggtcataagatgctcgagccgaaagtcgtggcgcggctggcgcagggcttgaagctgacgaaaaacgatacggttttggaaatcggcacgggttcgggctatgcgaccgcgctgttggcaaaattggctggtcgtgtggtgtcggacgacatcgatgccgaacagcaaaaccgcgccaaagcggtgttggacggcttgggtttggacaatatcgattatgtgcaaaacaacgggttgaccgaactttccgcaggtgcgccgtttgatgcggtttatgtcggcggtgcggtaaaccttgtgcctgaagtgttgaaagaacagttgaaagatggcggacgcatggtggttatcgtaggccgcaagcctgttcagcgcgcgcttttgattacgcgcaagggcgatgtgtttgaagagaaggtgctgttcgataccttggtggcgcatttggatgataaggatgccgatccgtttggcggttttcagttttga

SEQ ID NO: 39385 - DNA, 855 bp, Neisseria meningitidis
atgaaaatcgtcctgattagcgggttgtccggttcgggcaaatccgtcgcactgcgccaaatggaagattcgggttatttctgcgtggacaacctgcccttggaaatgctgccgtcgctggtgtcgtaccatatcgaacgtgcggacgaaaccgaattggcggtcagtgtcgatgtgcgttccggcatagacatcggacaggcgcgggaacagattgcctacttgcgcggactggggcacagggttgaagttttgtttgtcgaggcggaagaaagcgtgttggtccgccggttttccgaaaccaggcgaggccaccctctgagtaatcaggatatgaccttgttggaaagcttaaagaaagaacgggaatggctgttcccgcttaaagaaatcgcctattgtatcgacacttccaagatgaatgcccaacagctccgccatgcagtccggcagtggctgaaggtcgaacgtaccgggctgctggtgattttggagtccttcgggttcaaatacggtgtgccaaacaacgcggattttatgttcgatatgcgcagtctgcccaacccgtattacgatcccgagttgaggccttacaccggtatggacaagcccgtttgggattatttggacggacagccgcttgtgcaggaaatggttgacgacatcgaaaggtttgttacgcattggctgccgcgtttggaggatgaaagcaggagctacgttaccgtcgccatcggctgtaccggcgggcagcaccgttccgtctatgttgtcgaaaaactcgcccgaaggttgaaagggcgttatgaattgctgatacggcacagacaggcgcaaaacctgtcagaccgctaa

SEQ ID NO: 39386 - DNA, 909 bp, Neisseria meningitidis
atgaatcaaaccgccatcaaccgcgccgatgtgcgtacccgctttatcttcgacgatatgcccgtgcgcgggctgcacgtccgtctggaaaacgtgtggcagcacattgtaaaacagaaaaactatcccgccgccatccgccgcgccttgggcgagctgttggctgccggtgttctgctgtcgggcaacctcaaaaacgaaggcacgctgattgtgcaggttcaggggcgggggcggctgaaaatgctggttgcggaagcggcttccgaccgtaccgtccgtgcaaccgcgcgttgggacgaaaccgcagaaatagccgatgacgaaagcctcggcgaccttttgggcgagggcggcgtattcgtgctgacgctgcagcccaaagacggcgaaccctggcagggcgtagtgcctttggaaggcggcggtatcgcgcaaatgttggcgaactatatgaagcgttccgaacaaatcgatacgcacatcgtcctgtctgcaagcgacgaagcggcgggcggtctgctggtgcagcgtctgcctgaagcggtgttggatgaagaggcatgggaacacgtcagtacgctggcgcgtacactgacggcggacgagctggcagaattggatgcgcaacatgttttgtaccgcctgttccacgaaacgccgccgcgcgtgttcgagccggaaacgtttgaattttcatgcacctgttcgcgcggcaaagtcagcgatatgctgctgatgctgggcggggaagaagtcggcggcgtggtggtggaacaaggcagcatcgaagtcgattgcgatttctgccacagcaaatatgtgtttgacgaaaccgatgtcaacgcgctgttcggggaggatgtggtcggcgttgccaaagggctgccccggcataccgtccaataa

SEQ ID NO: 39387 - DNA, 381 bp, Neisseria meningitidis
  misc_feature 362, 363, 364, 365, 366: 'n' is a, c, g or t
atggctgtacgttccaaatcctcaaaagcgtggctgcacgaacacgtcaacgaccactacgtccatatggcgcaaaaagacggctaccgcgcccgtgccgcatacaaacttttggaaatcaacgaaaaagacaaattaatcaaacccggcacggtacttgccgacttgggcagcgcaccgggaagctggtcgcaggttgccgccaagctgacgggtacttccggagcagttttcgccttggacatcctgcctatggaagccatagggggcgtctccttcattcagggcgacttccgcgagaacgacgtactggcacaattcgaaaccttgttggacaaccgcccgctcgaccttgtaatttnnnnncacacacttaattaa

SEQ ID NO: 39388 - DNA, 720 bp, Neisseria meningitidis
atgacacagcaaatcaaatacaaacgcgtattactgaaactctccggcgaatccctgatgggttccgatccgttcggcatcaatcacgacaccatcgtccaaaccgtcggcgaaattgccgaagtcgtcaaaatgggcgtgcaagtcggtatcgttgtcggcggcggcaatattttccgcggcgtatccgcacaagcaggcagcatggatcgcgccactgccgactacatgggcatgatggcaaccgtaatgaacgcgttggcactcaaagacgcatttgaaactttgggcatcaaagcgcgcgtacaatccgcactgtctatgcagcaaatcgccgaaacttacgcccgtcctaaagccattcaatatttggaagaaggtaaagtcgtgattttcgccgccggtaccggcaacccgttcttcacaaccgacactgccgccgcattgcgcggtgcggaaatgaactgcgacgtgatgctcaaagccaccaatgttgacggcgtgtacaccgcagacccgaaaaaagacccgtccgccacgcgctacgaaaccattacctttgacgaagccttgaacaaaaaccttaaagtgatggatgccaccgccttcgccctctgccgcgaacgcaagctcaatatcgtcgtcttcggcatcgccaaagaaggctcgctcaaacgcgtcattaccggcgaagacgagggaacgctggttcactgctga

SEQ ID NO: 39389 - DNA, 822 bp, Neisseria meningitidis
atgatgcggatattttcgacaggaggaaaaatggatacgcaggcagttatcacacatattgtccgatggttggacgaatacgccgcccgggcaaatgcaaaagggtttgtcgtgggcgtttccggcggcatcgattccgccgtcgtctccgcactcgccgcccgcaccggccgcaccacgctgcttctggatatgccgatacgccaacaccccgaccagcttgagcgggcaaggctgcacatccgcaatctgcaacggcaatatgccaatgtaagcgcacaaacggtcgatctgaccgacaccttccagacctttgaacaaaccgtcggcgttcatcagacggcatttgacaatcagccgctttccctcgccaacgccagaagccgcctgcgtatgctgaccctgtactactacgggcagatacacggactactggttacggggacaggtaacaaaattgaagatttcggtgtaggattttttaccaaatacggcgacggcggcgtggacatcagcccgattgccgacctgaccaaaacccaggtttaccggcttgccgaagcattgggcgtggacgaggcgattcaaaaagccccgccgaccgacggcctgtgggatacggaacgcaccgacgaggaacagatgggcgcgagctatcccgaactggagtgggcaatgggcatgtacggcacgcgcaaacccgaagattttgaagggcggcagcgcgaagttctggaaatctatacgcggctgcaccgcgcgatgcagcacaaaatcaacccgattcccgtgtgccgcattccgcccgaattgttgggctga

SEQ ID NO: 39390 - DNA, 603 bp, Neisseria meningitidis
atgttcaacataccggctgttgccgtttcctatctgatcggctcactttctttcgccgtcatcgtttccaagtattacgggatggacgacccgcgcacctacggatcgggcaatcccggcgcgaccaatgttttacgcagcggcaaaaaaaaggcagcagcgctgacgctcttgggcgatgccgccaaaggtttgattgccgttttgcttgcacgcgtgcttcaagaaccgctcggtttatccgacagcgcaatcgctgccgtcgcactcgccgcgctggtcgggcatatgtggccggtgtttttcggatttaagggcggcaaaggcgtggcaacggcattgggcgtgcttttggcactctctcccgcaactgccttggtctgcgcgttgatttggcttgttatggcattcggcttcaaggtgtcctcccttgccgcattaaccgccacaatcgccgccccccttgctgcgctgttttttatgccccacctttcttggatttgggcgacgctccttatcgccctgctggtgttgttccgccacaaaagcaatatcagcaacctgcttaaaggcaaagaaggcaaaatcggcgaaaaacgctga

SEQ ID NO: 39391 - DNA, 168 bp, Neisseria meningitidis
gtggcgcagccacgcacgcggtgttgggtatgcaggctacggcttgctgctgcagaaactcctgaagaaaaagccaaagacgccgctgaagaggctaaagaagaagcaaaagacgcagcggaagatgccaaagaagctgctgaagacgctaaagaagaagctaaataa

SEQ ID NO: 39392 - DNA, 1434 bp, Neisseria meningitidis
atggacacacaaacttacaactacaaagtggtgcgccagttcgccatcatgactgtagtttgggggattgtgggtatgttggtcggcgttatcgtcgccgcccagctttttgctcctgccctcgacttgtctaatatcggaccttggttccacttcggccgcctgcgtccgctgcacaccaatgcggttattttcgcatttggcggttgtggcctgatcggcacatcatactacgttgtccaacgtacttgtaatacccgtcttttcggcggttggctgccggcatttaccttttggggctggcaggcggtaatcgttgccgccgtcgtcagcttccctatgggttggacccaaggtaaggaatatgccgaactggaatggccgatcgatattctgattactttggtttgggtggcttacgccatcgtattcttcggtacgattgccaaacgtaagattaaacatatttacgttgccaactggttctacggcggctttattttggcggtcgcacttttacacatcgtcaacaatatcagcatcccggccggtttgatgaagtcataccccgtctattccggtgcgattgatgctatggttcaatggtggtacgggcataacgccgtgggcttcttcctgactgccggcttcttgggtatgatgtactatttcgtacccaaacaagcagcccgccccgtttactcctaccgcctgtccgtcgttcacttctgggcgttgattttcacctatatgtgggcgggtccgcaccatcttcactacactgcgctgcctgactggacgcaatctttgggtatggttctgtctttgattctgttcgcaccctcttggggcggtatgattaacggcatcatgaccttgtccggcgcgtgggacaaactgcgtacagacccgattcttaaattcctgattgtatccttgtccttctacggtatgtctacctttgaaggcccgatgatgtcgattaaaacggtcaatgcattgagccactatacggactggaccgtcgcgcacgttcatgcgggtgcgttgggctgggtaggctttgtaaccatcggttccgtctattacatgattccccgtctgttcggcaaagaacagatgcacagcaccaagctggtagaagcacatttttggattgcgaccatcggcgtggttctgtatatcgctgccatgtggattgccggtgtgatgcagggtttgatgtggagttctttgaacgatgacggtacgctgacctactcgtttgtcgaatccgtaaaacgcaccatgccttactacgtgatccgttttgcaggtggtttattgtatctgagtggtatgtgcattatggcgtacaacgtgtaccgcacagccatcggtggtaaagcagtcgatgccgaaatccctgcggtttcccaaacacagcaccactaa

SEQ ID NO: 39393 - DNA, 687 bp, Neisseria meningitidis
atggaaacctttaaagacagactggtttttttatggaaaagcgaagcgaagcaggcaaaaatcgcatccgatattgaaatgacgattgcgggcttcagcaggatatggaatgaaggcggtctgccgaagtctgaaacattaaaaaaaatcaagcagttgaaggggtgtagtatcgattggctgctgaccggggagggtaatccgtttccggatgaagccccaaaaaaatcccttgcttacgataccttgggaaatgaagtcgatacggacgagtttgtctttgtgccgagatatgatattcgggcggctgcgggatacgggcagtttgtcgatcatgaggaaccggtatttacaatggcgttcagacggcattggattgagaattatgttacccgcgatacgaaaaacctgtctgtaatttccgtcaagggggattcgatggagggggttttgaatgacggcgattcgattttggtcaatcatggtgaaaatacgccgagggacggtctgtatgtgttgcggattaatgaaaatctgctggttaaacgtttacagattgtaccgggcgggattatcaatgtgatttctgcaaacgaggcttatcctgcttttgaaatcaatttgaacgatttgaccgatgatgtggagattatcgggcgtgtcgagtggttcggcaggacgatttga

SEQ ID NO: 39394 - DNA, 912 bp, Neisseria meningitidis
atggacaccctgttcagcctcaaggttttccgccaagtcgtccaaagcggcggcttcacccgcgccgccggcgcgctcggcatctccaccgcaatggcaagcaaacacgtcagccacttggaaaacaccgtccaagccaaactcctgcaccgcaacagccgcaacctcagcctgaccgaagccggggaagaatactaccggcaatgcagttacgcgctcgacacgctcgacgatgccgcgcaaaaagccgccggggggacggaaaaaccgcaggggctgctgcgcgtaacgatgccactgtggtttgccggcagccagatatgcaactggctggcggaataccgcgaacgttatcccgaagtgacattagaactgattttggacaaccgccacgtcgatttgattgccgaaggcgtggatttggcgttgcgcgtttcccaaaccctgtccccgtcactgattgcgcgcccactggcggaaatcgaatttgccctgcttgcctcgcccgacttcctgaggcgcaacggcgtgccggaaacgccggaagaagtggcggggctgcccgccgtcctgccgacctacaccaaccagcagaaactcgacctcacccgcaaatcggacggcaaaaaataccggcttgaactgacccccgtcatccgtaccgacaacacgctgatgatgcgcgaaatgattaaggcgggcgcgtgcatcggttatcagccgctttgggcggcggaacacgatttgcgctgcggcacgctggtgaggctgctgcccggatacgccgtcccgaccgaccgcctgaatgccgtttatgcagacagggcattcttaagcgcgaaagtccgcagcttcatcgattttctgaacgaaaaaatcgccagcaggaaaggctgccgaaatgccgtctga

SEQ ID NO: 39395 - DNA, 369 bp, Neisseria meningitidis
atgcggatattcaaaaaccaatggatagtgaaatttgccaagaaacataaaatcagtgattccgagctgctggaagcggtagagcgggcggataacgggctgatagacgcagatttaggcggcggtgtgattaagcagcgcatagcaaggcaaggacaaggcagaagcggcggctatcgcagcctgatattgttcaaacaggcagatagggcatttttcgtttacgcctttgccaagaacgacagggaaaacatttcggataaagaactggacgtttaccgaaaagccgccgcatattatctgaaatacacgcgggcagagctggcggctttgaaagaagacggcattatcacggagatagaatcatga

SEQ ID NO: 39396 - DNA, 1341 bp, Neisseria meningitidis
ttgcacacccttctagcttttatcttcgccatcctgattttggtcagcctgcacgagttcggacactacatcgttgccagattgtgcggcgtcaaagtcgtacgcttttccgtcggcttcggcaaaccgtttttcacccgaaagcgcggcgacaccgaatggtgcctcgccccgattccgttgggcggttacgtcaaaatggtcgatacgcgcgaaggcgaagtatcagaagccgatttaccctacgcttttgacaaacaacaccccgccaaacgcatcgccatcgtcgccgccggcccgctgaccaatctcgcactggcggttttgctgtacggactgagcttttccttcggcgtaaccgaactgcgcccctatgtcggcacagtcgaacccgacaccattgccgcccgcgccggcttccaaagcggcgacaaaatacaatccgtcaacggcacacccgttgcagattggggcagcgcgcaaaccgaaatcgtcctcaacctcgaagccggcaaagtcgccgtcggcgttcagacggcatcaggcgcgcaaaccgtccgcaccatcgatgccgcaggcacgccggaagccggtaaaatcgcaaaaaaccaaggctacatcggactgatgccctttaaaatcacaaccgttgccggtggcgtggaaaaaggcagccccgccgaaaaagcaggcctgaaaccgggcgacaggctgactgccgccgacggcaaacccattacctcatggcaagaatgggcaaacctgacccgccaaagccccggcaaaaaaatcaccctgaactacgaacgcgccggacaaacccataccgccgacatccgccccgatactgtcgaacagtccgaccacaccctgatcgggcgcgtcggcctccgtccgcagccggacagggcgtgggacgcgcaaatccgccgcagctaccgtccgtctgttatccgcgcattcggcatgggctgggaaaaaaccgtttcccactcgtggacaaccctcaaatttttcggcaaactaatcagcggcaacgcctccgtcagccatatttccgggccgctgaccattgccgacattgccggacagtccgccgaactcggcttgcaaagttatttggaatttttggcactggtcagcatcagcctcggcgtgctgaacctactgcccgtccccgttttggacggcggccacctcgtgttttatactgccgaatggatacgcggcaaacctttgggcgaacgcgtccaaaacatcggtttgcgcttcgggcttgccctcatgatactgatgatggcggtcgccttcttcaacgacgttacccggctgctcggttag

SEQ ID NO: 39397 - DNA, 213 bp, Neisseria meningitidis; identical to SEQ ID NO: 36410

SEQ ID NO: 39398 - DNA, 936 bp, Neisseria meningitidis
atgaacccgaaaaaactcgtcatcgccagccgcgaaagcctgcttgctatgtggcaggcaaagcatatccaaggccgtctgaaggctctgtatcccgattgcgaagtcgagattttgggcatgaccacgcgcggcgatcagattttggacaaaactttgtcaaaagtcggcggtaaaggcttgtttgtcaaagagttggaacaggctttatatgacgggcgcgccgatttggcggtgcattcgattaaggacgtgccgatggatttgcctgaaggtttcgcgcttgccgccatcggcgaacgcgccaatccgtttgacgcgtttgtgtccaaccaatacgcgcgtttggaagaaatgcccaaaggcgctgtcgtcggtacatccagcctacgccgcgaagcccagttgcgcgcgcgctatccgcatttgcttatcaaacctttgcgcggcaatgtgcaaacccgtttgtccaaactcgataacggcgaatacgacgcaattattttggccgccgccggtttgcagcgtctgaaattggacggacgcatccgcatgattttgtcggaatccgacagcctgcctgccgccggacaaggcgcattgggtatcgaaattgccgcgcaccgcgaagatttgtatgaggttttaaaaccgctaaaccacgataccacacacgcctgcgttacggccgaacgagctttggcgcgcgctttgggcggaagctgccaagtgccgctggccgcatattgcacggaagaaaacggcttgctgaccttgcgcggcttggtcggtcatcccgacggttcggttgtgttgcgggcggacgcgcaagcccctgccgaatatgccgacgcgctcggacgcgctgtcgctaagaaattggcggacgacggtgcgcgggaattgattggagcagtattgaatacggaaaattga

SEQ ID NO: 39399 - DNA, 1074 bp, Neisseria meningitidis; identical to SEQ ID NO: 38263

SEQ ID NO: 39400 - DNA, 1158 bp, Neisseria meningitidis
atgaaattcgccacgaaagccattcattccagctacgattgcgacgaacacaaccgcgcgctgatgccgccgatttatcaaaacagtatgtttgcgttgcacgagattggcgaaaatgtgccttaccgttattcgcgcctgagcaacccgacccgtcagattttggaagacaccgttgccgatttggaacacggtgcggcaggctttgcgttttccagcggtatggcggggattgatgccgtatggcgtaccttcctgcaaccgggcgataccatcgtcgcggtcgccgatatttacggcggcgcgtatgacttattggtcgatgtttatcaaaaatggggggtaaatgttgtttttgccgatttaggcaatcccgacaatttggacgaattgctcaaagcgcacaaggtcaaactggtttggctggaaacgccgtccaatccgcttttacgcttggtagacatcaaagcccttgccgcaaaagccaaagcgaccggcgcgctggtcggcatcgacaacacctttgccacgccgtatctgcaacagccgttggatatgggttgcgattttgtgttccattccgctaccaaatatttgtgcggccattccgacgtattgatgggcatcgtcgttgccaaaaccaaagagctggctcagcctttgcacgatatgatggtgcataccggtgcgattgcaggcccaatggactgctggctggtgttgcgcggcatcaaaacgcttgccctgcgtatggaggcacactgcaaaaacgcactcgaaatcgcgcgccgtctggaagaccatcctgccattgaaaaagtgttccatcccggcctgccgtcgcacgaacattatgaactcgcccaagcgcaaatgcctaaaggcatcggcggcgtggtgacggtttatctcaaaaacgacacgcgcgaagcggcaaacagcgtgattaaaaacatgaaactggtcaaaatggcttccagcctcggcggcgtggaaagtttggtcaaccattgctattcccagtcccacagcggcgtgccgcataatgtgaaaatggaaatgggcatcaaagtcggcctgctgcgtttctccatcggcatcgaagacgcggacgatatttggaacgatatttccgccgcactcgatacgactttgtaa

SEQ ID NO: 39401 - DNA, 702 bp, Neisseria meningitidis
atgttcagacggcatcggcatttgaaaaatatgcagattaaaaaaatcatgaaatggcttcccgtcgccttgtcgcttttgggtgcgttgggttatacggggtacggcagcgaggcggtgcggacggcggttgccgtactcgacgtactcggcgcggcaggggacgcgggttccgacgcgcccgcccgccgccgagcatcggcgaaatccggccaccgctacacaggcacggtgtccaaagtctatgacggcgacacccttcacgttatcgacggcgacggcgcgaaacacaaaatccggatggcgtatatcgatgcgccggagatgaaacaggcttacggcacgcgttcgcgcgacaacctgcgcgcggcggcggaaggcaggaaagtcagcgtgcgcgtgttcgataccgaccgctaccagcgcgaagtggcgcaggtttctgtcggcaaaaccgatttgaacctgatgcaggtgcaggacggggcggcgtggcattataaaagttatgctaaagaacagcaggataaggcggattttgccgattatgccgacgctcaaattcaggcggaaagggaacgcaaaggattgtggaaagctaaaaatccgcaagcgccgtgggcgtaccgccgagcaggcaggagcggcgggggcaataaggattggatggatgccgtgggcgaatggttgggcatttggtaa

SEQ ID NO: 39402 - DNA, 999 bp, Neisseria meningitidis
atgaagattgcgatttacggtacgaaaagttatgaccgcgaacattttacccgcgccaaccggcatttcggcttcgagctggagttttttgattttatgctggatgcgaaaacggcgaaaatggcggaaggtgcggaggcggtctgtatttttgtaaacgacgacggcagccggcccgtgttggaaaaattggcgcaaattggcgtgaaaactgtggcgttgcgttgtgccggcttcaataatgtggatttaaaggcggctgaagagttgggcttgaaagtcgtgcgcgtgcctgcctattcgcccgaatcggttgcggaacatacggtcggtctgatgctgacgttgaaccgccgtatccacaaagcctatcagcgtacccgcgatgcgaatttttcgctggaaggtctgaccggtttcaatatgtacggcaaaacggcgggcgttatcggcacggggaaaatcggtattgcaaccatgcggattttaaagggtttcggcatgaacctgctggcttacgatccgttttgcaaccccgaagcggaaaaaatcggcggcaaatatgtggatttagacgagctgtatgcccggtcggacatcatcacgctgcattgccccgccacgctggaaaaccactatatgctgaacgaagcggcgttcgacaaaatgaaagacggcgtgatgattatcaacaccagccggggcgggctgattgacagtgccgccgcgattgaggcgttgaaacgccggaaaatcggcgcattgggcatggatgtgtacgagaacgagcgcgagctgttttttgaagacaaatccaacgatgtgattaccgacgacgtgttccgccgcctgtcgtcttgtcataatgtgctgtttaccggccatcaggcatttttgacggaagaggcgttgggtaatatttcggaagttacgctgtccaatatccgcgaggtcggacagaccggcgattgcggcaatgcggttcgtgccgacggctga

SEQ ID NO: 39403 - DNA, 816 bp, Neisseria meningitidis
  misc_feature 797, 798, 799, 800, 801: 'n' is a, c, g or t
atgaaattgtctattcaaaaattcatgatgctgtttgcagcagcaatatcgttgctgcaaatccccattagtcatgcgaacggtttggatgcccgtttacgcgatgatatgcaggcaaaacactacgaaccgggtggtaaataccatctgttcggtgatggtcgcggcagtgttaaaaatcgggtttacgccgtccaaacatttgatgcaactgcggtcggccccatactgcctattacacacgaacggacaggatttgaaggtgttatcggctatgaaacccatttttcagggcacggacatgaagtacacagtccgttcgatcatcatgattcaaaaagcacttctgatttcagcggcggtgtagacggtggttttactgtttaccaacttcatcggacagggtcggaaatccatccggaggatggatatgacggaccgcaaggcagcgattatccgccccccggaggagcaagggatatatacagctattatgtcaaaggaacttcaacaaaaacaaagactaatattgtccctcaagccccattttcagaccgttggctaaaagaaaatgccggtgccgcctctggttttttcagccgtgcggatgaagcaggaaaactgatatgggaaagcgaccccaataaaaattggtgggctaaccgtatggatgatgttcgcggcatcgtccaaggtgcggttaatccttttttaatgggttttcagggattgggagttggggcaattacagacagtgcggtaaacccggtaacctatgcggcagcacggaaaacttnnnnncacacacttaattaa

SEQ ID NO: 39404 - DNA, 666 bp, Neisseria meningitidis
  misc_feature 651, 652, 653, 654, 655: 'n' is a, c, g or t
atgaatttgaaattagtatttgaatcgggcgatcccgtcctgatcggtgtgtttgtgttgatgctgttgatgagtatcgtaacgtggtgtttggttgtcttgcgctgcatcaagctgtatcgggcgcgcaaagggaatgccgccgtcaaacggcatatgcgcgatactttgtcgctgaacgacgcggtcgaaaaagtgcgcgccgtcgatgcgcctttgtccaaactggcgcaagaggcattgcagtcttaccgcaactaccgccgaaacgaagcgtccgaactggcgcaggctttgccgttgaacgagtatttggtcattcaaatccgcaacagtatggcgcagattatgcgccggtttgattacgggatgaccgcgcttgcctccatcggcgcgaccgcgccgtttatcgggctgttcggcacggtttgggggatttaccacgccctgatcaatatcgggcaaagcgggcagatgagtattgcggcggttgccggcccgattggcgaggcactggtggcgacggcggcgggtttgttcgtggcgattccggcggtgttggcatacaacttcctcaatcgcggcacaaaaatactgacccaggatttggatgcgatggcgcacgatttgcacgtccgcctacttaatcannnnncacacacttaa

SEQ ID NO: 39405 - DNA, 207 bp, Neisseria meningitidis
atggcacgtattaccaccgaagactgtaccggaaaaatttccaaccattttgacctgacattggtagcggctcgccgcgcccgccagcttgagaacggcaacacgccgcttgtggacgatgcccgcaataacaaaccgaccgttaccgccttaagggaaatcgccgccgggcatatcggtacggaactgttgacgcgcaataaataa

SEQ ID NO: 39406 - DNA, 438 bp, Neisseria meningitidis
atgatagggcttttaatcatcacacacgaaaccataggcgaagcctaccgcaagctggcacatcattttttcccgggcgggctgcctgaaaacgtccgcatactcggcgtgcaaccgacggaagaccaagacgacatcatcaacaacgccattgccgcgcttcaggaatttcccgacaacgacggcgtgctgattatgaccgatattttcggcgcgaccccctgcaatgcagcccgccgcctcgtgcgcgaaaacaaatcggcgattttgaccggactgaacgcgccgatgatggttaaggccgtccaatattcgccggcggcggaagaccttgccgcctttaccgaatgtgtcagagaggcggctgtaaaaggcattttcgccatcacgtccgcgcccgaagatttggtgtgccggcgcagcggcgatgccgtctga

SEQ ID NO: 39407 - DNA, 1428 bp, Neisseria meningitidis
atgaacgagaactttaccgaatggctgcacggctgggtcggcgccatcaacgatccgatgtggtcatacttggtttatatgcttttgggtacggggcttttcttcaccgtaaccacgggctttgtccaattccgcctgttcgggcgcagcatcaaagaaatgctcggcggccgcaaacagggggacgaccctcacggcatcacgccgtttcaggcatttgtaaccggccttgccagccgcgtgggcgtgggcaatatcgcgggcgtggcaatcgccatcaaagtcggcgggccgggcgcggtgttttggatgtgggtaaccgccttaatcggtatgagttcggcgtttgtcgaatcttcgctggcgcagctctttaaagtccgcgactacgacaaccaccatttccggggcggccctgcctactacatcactcaagggctggggcagaaatggctgggcgtgttgttcgccctgagcctgattttctgtttcggctttgtgtttgaagcggttcagaccaataccattgccgataccgtcaaagcggcgtggggttgggagcctcattatgtcggcgtcgccctggtgattttaaccgcgccgattatcttcggcggcatcaggcgcatatctaaagcggcggaaatcgtcgtccccctgatggcggttttgtacctctttatcgcgcttttcatcattttgaccaatattccgatgattccggacgtgttcggtcagattttttcgggcgcgttcaaattcgacgcggcagcaggcggcttactcggcggtctgatttcgcaaacgatgatgatgggcatcaaacgcggcctgtattccaacgaggcgggtatgggttccgcgccgaacgccgccgccgccgccgaagtgaaacaccctgtttcgcaaggtatgattcaaatgctgggcgtgtttgtcgataccatcatcgtttgttcttgcaccgccttcatcatcttgatttaccaacagccttacggcgatttgagcggtgcggcgctgacgcaggcggcgattgtcagccaagtggggcaatggggtgcgggcttcctcgccgtcatcctgtttatgtttgccttttccaccgttatcggcaactatgcctatgccgagtccaacgtccaattcatcaaaagccattggctgattaccgccgttttccgtatgctggttttggcgtgggtctatttcggcgcggttgccaatgtgcctttggtctgggatatggcggatatggcgatgggcattatggcgtggatcaaccttgtcgccatcctgctgctctcgcccttggcgtttatgctgctgcgcgattacaccgccaagctgaaaatgggcaaagaccccgagttcaaactttccgaacatccgggcctgaaacgccgtatcaaatccgacgtttggtaa

SEQ ID NO: 39408 - DNA, 666 bp, Neisseria meningitidis
atggattcatggtttgaagatacggcgatggggcggtatgttgcaaaattggaacaggatttcttcgggcggtatctggattcataccgtttttcgggaatgtgtgcggttcaggtgggcggtccgtggctgagcctgtctgaagatgttgtctgtgtgccgcgagatatgtcgatgtcggcggaaaatatggctttggcggatgtttctgcggatatgctgcttttcccgcatactctggaaggcggtgttccttcgcaaatcctgtcggaagcgcaccggatattgaaaccgtgcggacgtttgatgctgacgggtttcaatccgtattcgctctggggattcagccgttggtttgacggcgaacgcctgccggaaaaacggttttgtctgccgctgcccgagttgaaaaggcagcttgcggatgtcggtttcgatattgaatttgggaaatttatggtgtatctgccgcccgtttcgtcgctcgggcaaatacgcttttggcggtttatggaaaaggcgggcgaccgttggtggccgcagtgtgccgcagtgtacggtttggttttggtcaaaagggcggcgggcgtaacgcccctgcccgcgtgggacgggtatttgggcggcaaagcccttgcggcgggtgcggcaaggattgcggattag

SEQ ID NO: 39409 - DNA, 1812 bp, Neisseria meningitidis
atgaaacaaatccgcaacatcgccatcatcgcccacgtcgaccacggcaaaaccacattggtcgaccaactgctgcgccaatccggcacattccgcgccaaccagcaggttgacgagcgcgtgatggacagcaacgacctcgaaaaagaacgcggcatcaccatcctcgccaaaaacaccgccatcgattacgaaggctaccacatcaatatcgtcgatacgccgggacacgccgacttcggcggcgaagtagagcgcgttttggggatggtggactgcgtcgtcttgttggtggacgcgcaggaaggcccgatgccgcaaacccgtttcgtgaccaaaaaagccttggctttggggctgaaaccgattgtcgtcatcaataaaatcgacaagccgtctgcacgtccgagctgggttatcgaccaaactttcgagctgttcgacaacttgggcgcgaccgacgagcagttggatttcccgattgtttacgcttcaggtttgagcggctttgccaagctggaagaaaccgacgagagcagcgatatgcgcccgctgttcgacaccatcttaaaacacacgcccgcaccgagcggcagcgcggacgagccgctgcaactgcaaatttcccaactcgactacgacaactacaccggccgcctcggcatcggtcgtatcttgaacggacgcatcaaacccggccaaaccgttgccgtcatgaaccacgagcagcaaatcgcccaaggccgcatcaaccagcttttgggtttcaaaggcttggaacgcgtaccgcttgaagaagccgaagccggcgacatcgtgattatttccggtatcgaagacatcggcatcggcgtaaccatcaccgacaaagacaaccccaaaggcctgccgatgttgagcgtggacgaaccgacgctgacgatggactttatggtcaacaccagcccgctggcgggtacggaaggcaaattcgtaaccagccgccaaatccgcgaccgcctgcaaaaagaattgctgaccaacgtcgccctgcgcgtggaagacaccgccgatgccgacgtgttccgcgtatccggacgcggcgagctgcacctgaccattttgttggaaaatatgcgccgcgaaggctacgaactcgccgtcggcaaaccgcgcgtcgtgtaccgcgacatcgacggtcaaaaatgcgaaccttatgaaaacctgaccgtggacgtacccgacgacaaccaaggcgcggtaatggaagaactcggccgccgccgtggcgaactgactaatatggaaagcgacggcaacggacgcacccgcctcgaataccatattccagcgcgcggcttgatcggtttccaaggcgaatttatgaccctgacgcgcggggtcgggctgatgagccacgtgttcgacgattacgcgcccgtcaaacccgatatgcccggccgccacaacggcgtgctggtgtcccaagagcagggcgaggcagtcgcttacgccttgtggaatctggaagaccgcggccgtatgttcgtatcgcccaacgacaaaatctacgaaggtatgattatcggcatccacagtcgcgacaacgatttggtggtcaacccgctcaaaggcaaaaaacttaccaacatccgtgccagcggtaccgacgaagccgttcgcctgaccacgccgattaagctgacgctggaaggtgcggtcgagtttatcgacgatgatgagctggtagaaatcacgccgcaatccatccgtctgcgcaagcgttacttgagcgaattggaacgccgccgccatttcaaaaagctagattga

SEQ ID NO: 39410 - DNA, 423 bp, Neisseria meningitidis
atgaaaaaaatgttcctttctgctgtattgcttctgtcggctgccgcccaaacggtgtgggcggatacggtgttttcctgtaaaacggacaacaacaaatatatagaagttcaaaaaatcaaccgcaatctttacgaatattcgttcggcagtgcggcaaaaaaagaaattgccatacgcaacagcaaagctgacctgttggggcgttccgacaggtggcaaggcatgggcagcggacgccgggcaacgatgaaattccaaaacggcgaatttatgtacaccgtatggacgggcttcgattccgtgactcatacggaaagcagcggtgttgttgtggagcgtaggggcaaggaagtcgcacgggttggctgtacgccgcaaaccgcgcaggcgaatttcaacgatgctgatttttcccggtaa

SEQ ID NO: 39411 - DNA, 768 bp, Neisseria meningitidis
atgtcttcaaataaagcttcattttttacacgtctgcgccgcttgtgccgcttgacggtctggctattcaaaaccggcaaaaacctgcgcggtattgacggcggctgccccgagtcgcgcaatcgggcggtaatcgagttgggcaggggggctctgacggctttggatatcggattggaggtgggcaggcccgcacccgaacatccgaacggtgtcttggttgccgccaaccacgtgtcctggctggatattttcgcgatgagcgcggtttatccgagcagctttatcgccaagcaggaaatcaaaagctggccggtattgggcaagatggggcagaacgcgggaacggtgttcatcaaccgcaattcgcggcgcgacatcgaaccgattaaccgcgccgtctacgaaaccttgcaacgcggtcaaaacgtcagttttttccccgaagcgcggacttcctccggactggggctcctgccgttcaaagccgcgctgttccaatccgccattgatgcgggggcaaaggttttggcggtcgcgctgcgttattatgacgaaacgggaaaaaggacggctcgtccctcatatgccgatgtcggtttgccgacctgcctgtggcgcattgtgtctatgaaaaaattaacgataaaagtcgatttcgtttgcgtggcggatgcggcggaaagcgaagaccgttatgctttaaaagataaaatcgaagaaagcatccgtgccgttgtcgccgacgatgcggatatcgctgtctga

SEQ ID NO: 39412 - DNA, 471 bp, Neisseria meningitidis
atgaccgatacggatacccaagccgaccgcttcgaacagatgatgtggcaggcggtggacaaactttttgaacagcatgacggcaaactcgaaagcatggacggacgtgaacaggagctggttttgatttggcgggcggaagccgacatcggcaacggcggcatactgcaatttgtctgcaactggagtttccccgccgccgaaaagacttgttccgttctgaaaaaaatcggcgcggtacacagcgcaatgctgatccatcgggcggcagacgcattgggaaaagaaatccgccacctccaatcggaaggtaaaaacctgaaagaaatgtgggatataacgcaacatctcgacaacaaaaccgcctcactgccgaacagtctggatgaacaatattggcaagaccccgacaaactgtatctgccgggatggcaatactattccggcaaccctgttcagacgctgttttaa

SEQ ID NO: 39413 - DNA, 516 bp, Neisseria meningitidis
atgaaaatcaaacaaatcgtcaaaccgggcttggcagtattggcggcgggcgttctgtctgcctgcgcaaccaaaagcaacgtcaaagccgacggaacgaccgacaatccggttttcccgaaaccctattccgtaacgctcgacaacaatcgcggtacattcccgacctatgacgaattggacttgatgcgtcccggtctgaccaaagacgacatctacaaaatcctgggtcgtccgcattacgacgaaggtatgtacggcgtgcgcgaatgggattatctgttccacttccacaccccgggcgtaggcatcgaccctgaaaacacttccggcgtagaaggcattaccacctgtcaatacaaaattattttcgataaagacaaatttgcccgcagcttctactggaaccccgtcttcccgaaagatgccgcctgtccgccgcccgcacccaaagccgagccgcaagtcatcatccgcgaaatcgtgccggcaaaaccgaaacgtatccgccaataa

SEQ ID NO: 39414 - DNA, 312 bp, Neisseria meningitidis; identical to SEQ ID NO: 37456

SEQ ID NO: 39415 - DNA, 183 bp, Neisseria meningitidis
atgccgacaccgcctgccgcattgatggtcgcgccggtacgcccgaatccgccgaaagacggcaagacggccacgctgttggaacacgccgccgagtttggcggctatgtggcggagttggaaaatcaaaatcaggcttggcgcgactgggcgggcaatcactcccgcaaagtcggaaactga

SEQ ID NO: 39416 - DNA, 672 bp, Neisseria meningitidis; identical to SEQ ID NO: 39257

SEQ ID NO: 39417 - DNA, 1479 bp, Neisseria meningitidis
atgttcagcaagttaacccctttggctgaaaccggcatcccgaccctgtcgtgtgcaaacgcggcagggcgtttgttgcattcagacagccgccaaatcaaacaaggcgatattttcgttgcctgtccgggcgaatatgccgacggacgcagttatatccccgccgccgttgccaacggcgcggcttttgttttttgggacgacgatggcaaattcgcgtggaatcccgaatggaaagtccccaatcaaggcatcaaagatttgaaacaccgtgccggcatattggcggcgcaagtttacggcaacgtttcagacggtctcaaagtctggggcgtaaccggaaccaacggcaaaacctccatcacgcaatggctggcgcaagctgccgatttgttgggcgaaaaaaccgccattgtcggcacggtcggcaacggcttttggggtgcattggaagaaaccacgcataccacacccgcccccgtcgatgtccaaaccctgctctaccgtttccgtcaacaaggcgcaacagtcgccgcgatggaaatctccagccacgggcttgaccagtcgcgcgtcaacggcgtgtcattccgcagcgcaatctttaccaacctcacccgcgaccacctcgactaccacggcacgatggaagcctacggtgccatcaagtcgcgcctgttttactggcacggcttgaaacacgcagtcatcaacgtggatgacgaatacggcgcggaactcgcaggtcgtctgaaaaaagattgtcccgatttggccgtttatagctacggcttcagcgaacacgccgacatccgcattaccgactttaccgcctcttcagacggcatagcagccgtattccaaaccccgtggggcgaagggaaatgccgcacgcgcctgctcggacggttcaacgcgcaaaacctcgccgcctgcatcgccttgctgtgcgccaacggctatccgcttgataaagtattggatgtgctggcaaaaatccgtcccgcttcagggcgcatggactgcatcatgaacagcggcaaacctttggtcgttgtcgattatgcccacacgcccgacgcattggaaaaagcactcgccaccttgcaggaaatcaaaccgcagggtgcggctttgtggtgcgtattcggttgcggcggtaaccgcgatcgcggcaaacgcctgctgatgggcgcggcagccgtacagggtgcggataaagtcgtcgtcaccagcgacaacccgcgtttggaaaatccgcacgacatcatcaacgacatcctgcctgccgttcccgcgcccgaatgcgtcgaagccgaccgtgccgccgccatccgttatgcggttgaacaagccgccgcaaacgacatcatcctgattgccggcaaagggcatgaaaactatcaggatgtacaaggcgtgaagcaccgtttttccgatcttgaaatcgtcggacaggctttgttaactcgtaaataa

SEQ ID NO: 39418 - DNA, 2250 bp, Neisseria meningitidis
gtgccttcaaaaatcgaatcgcttgcgcgcgagctgtcgattacggaagacgagtatgtctttttcgaacgccgtctgaaggcgatggcgcgggacggtcaggttttaatcaaccgccggggcgcggtttgcgcggcggacaaattggatttggtcaaatgccgtgtcgaggcgcacaaagacggtttcggttttgccgtgccgctcacgcccgccaaagacggtgattttgttttgtatgaacgccagatgcgcggcattatgcacggcgatattgtcactgttcgtcctgccggcatggaccgtaggggccgccgcgaagggacagttctggatattgtcgaacgctcgcaaagcaaagtggtcggccgtttctatatggataggggcgtggcgattttggagccggaagacaagcgtctgaaccaaagcatcgtattggaaccggacggcgtggcgcgtttcaaacctgaatccggtcaggtcatcgtcggcgaaattgaggtttatcctgagcaaaaccggccggcagtggcaaaaatcatcgaagttttgggcgattatgccgacagcggcatggagattgaaattgccgtgcgcaagcatcatttgccgcaccaattcagtgaagcgtgtgccaaagccgtgaaaaaaattcccgaccatgtacgcaaaagcgatttgaaaggccgcgtcgatttgcgcgacctgcctttggtaacgattgacggcgaaacggctcgagattttgacgatgcggtgtttgccgaaaaaatcggacgcaattaccgtctggtcgtggcgattgccgatgtcagccattatgtccgccccgatgacgctatcgacacggacgctcaggaacgcagcaccagtgtttacttcccgcgccgcgtgattcccatgttgccggaaaacctgtccaacggcatctgctcgctcaatcctaatgtcgagcgtttgtgtatggtgtgcgatatggttatcacttacgcgggcaatattaaagaataccgcttctaccccgccgtgatgcgctctcatgcccgcctgacctacaaccaagtttggaaatggctttcaggcggcatcgggcatccgttcaaagcccaaatcgacacgctttacaaactcttcaaaatccttcagaaaaagcgtttcgaacgcggggcggtggagtttgacagcatcgaaacccaaatgcttttcgacgacaacggtaaaattgaaaaaatcgtccccgttgtccgcaacgatgcccacaagctgattgaagaatgtatgttggcggcaaacgtttgcgcagcggattttctgttgaaaaacaagcataccgcattgttccgcaaccatttggggcccacgcccgaaaaactcgccgccttgcgcgagcagttcggtctgttggggcttcaacttggcggcggcgacaacccgtcgccgaaagactatgccgcgcttgccggacagttcaaaggcaggccggatgccgaattgctgcaagtcatgatgttgcgctccatgcaacaggcggtttacgaaccgcattgcgacggacactttggtcttgcctacgaagcatacgcccacttcacctcgcccatccgccgctatcccgacctgaccgtacaccgcgccatcaaagccgtgttgaatcagcaaacctacacgccaaaaaaaagctggcaggctttgggcgtgcatacctcgttctgtgagcgccgtgccgacgacgccagccgcgacgtggaaaactggctgaaaacctactatatgcgtgacaaagtcggcgaaatatttgaaggcaaaatttccggggtggcaaattttggaatatttgtcactttggacgatatccatatcgacggtctggtgcatatcagcgatttgggcgaagactatttcaacttccgccccgaaatcatggcaatcgaaggtgaacgcagtggcatccgtttcaatatgggcgacagggttgccattaaagtggcccgtgccgatttggatgatggaaaaatcgattttgtcctgattgccgaggggagcggcagagggcggaaagttaaatcatccgcgtctgccaaaccggcagggacggcggggaaagggaagccgaaaaccgccgccgggaaaaaaacagcccgaggcggcaaagtaaggggaaggggcgcgtctgccgccgcagaatcggggaaaaaggcaaagaaaccggttccgattaaggtaaaaaaacggaaaggcaaatcataa

SEQ ID NO: 39419 - DNA, 945 bp, Neisseria meningitidis
  misc_feature 8, 9, 10, 11, 12: 'n' is a, c, g or t
gtgtgtgnnnnnactattgtgcgcggcgacacggtgtacaacatttccaaacgctaccatatctctcaagacgatttccgtgcgtggaacggcatgaccgacaatacgttgagcatcggtcagattgttaaagtcaaaccggcaggatatgccgcaccgaaagccgcagccgtaaaaagcaggcccgccgtaccggctgccgcgcaaccgcccgtacagtccgcacccgtcgacatcaacgcggcgacgcatactattgtgcgcggcgacacggtgtacaacatttccaaacgctaccatatctctcaagacgatttccgtgcgtggaacggcatgaccgacaatacgttgagcatcggtcagattgttaaagtcaaaccggcaggatatgccgcaccgaaaacctcagccgtagaaagcaggcccgccgtaccggctgccgtgcaaacccctgtgaaacccgccgcgcaaccgcctgtgcagtccgcgccgcaacctgccgcgcccgctgcggaaaataaagcggttcccgcgcccgccccgcaatctcctgccgcttcgccttccggcacgcgttcggtcggcggcattgtttggcagcgtccgacgcaaggtaaagtggttgccgatttcggcggcaacaacaagggtgtcgatattgccggtaatgcgggacagcccgttttggcggcggctgacggcaaagtggtttatgcaggttccggtttgaggggatacggcaatctggtcatcatccagcataattcttccttcctgaccgcatacgggcacaaccaaaaattgctggtcggcgaaggccagcaggtcaaacgcgggcagcaggtcgctttgatgggcaataccgacgcttccagaacgcagcttcatttcgaggtgcggcaaaacggcaaaccggttaacccgaacagctatatcgcgttctga

SEQ ID NO: 39420 - DNA, 288 bp, Neisseria meningitidis
atggatgatttgattgcagcttttttaggctatttatcaggtaaatacagtgaaggtaaaataagcaggttaggaatatctctaacggcaggaagcattttctttgcagtattctttactcatgaactgataatttttattgttgatggaaataaggaaaatctttggaattttattactgagatgatgaaagatttatttttattttcatgttctgtttgtttattattctacttcttattatttattgcggaaactattgggaaaacaatcaataaaattaaataa

SEQ ID NO: 39421 - DNA, 780 bp, Neisseria meningitidis
atgaacggcatcatcatcaaaacccccgaagaaatcgaaaaaatgcgcgagctgggcaaactcgtcgccgaagccctcgactacatcggacaattcgtcaaacccggcgtaaccaccgacgaaatcgacaaactcgtttacgactaccacgtcaacgtccaaggcggctatcccgcccccctgcactacggcaacccgccctaccccaaatcctgctgcacctccgtcaaccacgtcatctgccacggcattcccgacgacaagccgctcaaagaaggcgacattatcaacatcgacctcaccatcaaaaaagacggcttccacggcgactccagccgtatgtttaccgtcggcaaagtctcccccatcgcccaacgcctgatcgacgtaacccacgcctccatgatggcgggcatagaagccgtcaaacccggcgcgacactgggcgacgtaggttacgcctgccaacaggttgccgaaaacgccggctattccgtcgtacaggaattctgcggacacggcatcgggcgcggtttccacgaagccccgcaagtgttgcactacggaaaaaaaggacagggctccgttctaaaaccgggtatgatttttaccgtcgaaccgatgatcaaccaaggcaaacgccacctgcgtatcctcaacgacggctggacggtggttaccaaagaccgctccctctccgcccaatgggaacacgaagtcttggtgaccgaaaccggctacgaaatcctcaccgtcagccccgcctccggcaaaccctga

SEQ ID NO: 39422 - DNA, 786 bp, Neisseria meningitidis
atgggctttctgcaaggcaaaaaaattctgattaccggcatgatttccgagcgttccatcgcttacggcatcgccaaagcctgccgcgaacaaggcgcggatttggcgtttacctacgttgtagacaaactggaagagcgcgtccgcaaaatggcggcggaattggattccgaactcgtattccgctgcgatgtcgccagcgacgacgaaatcaaccaagtgttcgccgatttgggcaaacattgggacggcttggacggtttggtgcattccatcggttttgcgccgaaagaagccttgagcggcgacttcctcgacagcatcagccgcgaagcgttcaacaccgcacacgaaatttccgcatacagcctgcccgcattggcaaaagccgcccgtccgatgatgcgcggcagaaactccgccatcgttgccctgagctacttgggcgcggtacgcgcgattccgaactacaacgtgatgggtatggcaaaagccagtcttgaggcaggcatccgctttaccgccgcctgtttgggcaaagaaggcatccgctgcaacggcatttccgccggcccgattaaaacgcttgccgcctccggtatcgccgatttcggcaaacttttgggacacgtcgccgcccacaatccgctgcgccgcaacgttaccattgaagaagtcggcaataccgccgccttcctgctgtccgacctgtcgtccggcattaccggcgaaatcacttacgttgacggcggttacagcatcaatgccttgagcaccgagggataa

SEQ ID NO: 39423 - DNA, 423 bp, Neisseria meningitidis
atgcgcccaatcttcctatctttcgttttactccctattttgataaccgcctgcagcacaccggacaagtctgcccgatgggaaaatatcggcacaatctcaaacggcaatattcatacatatatcaataaagacagcgtgagaaaaaacggaaatctgatgattttccaagataaaaaagttgttaccaatctaaaacaagaacgttttgccaacacccccgcatacaagactgccattgccgagtgggaaatccactgcaacaacaaaacataccgcttaagttcgctacagttgtttgatacaaaaaacacggaaatttccacacaaaactacacagcctcttccctccgcccgatgagcatcctgtccgggacattaaccgaaaaacaatatgaaaccgtatgcggaaaaaaactctga

SEQ ID NO: 39424 - DNA, 234 bp, Neisseria meningitidis
atgaaccgccgaaaaatctatctgttgtctgttgccctcttcacactggcatttatgctgctcgtcctcttgggtgcttatctgctgaccgtcggcagcaaagccttcgccgtcgcctcctttcttttcgcattcggcgcgctgttcgggcaaatcggcgcactcgccctctacctgcggcacaaatccctacgcgccgcccaatccgccgcaaaggaaaaccgctatgtctga

SEQ ID NO: 39425 - DNA, 1218 bp, Neisseria meningitidis
atgaaaacggtagtctggatcgtcgtcctgtttgccgccgccgtcggactggcactggcttcgggcatttacaccggcgacgtgtatatcgtactcggacagaccatgctcagaatcaacctgcacgcctttgtgttaggttcgctgattgccgtcgtggtgtggtatttcctgttcaaattcattatcggcgtattcaatatccccgaaaagatgcagcgtttcggttcggcgcgtaaaggccgcaaggccgcgcttgccttgaacaaggcgggtttggcgtattttgaagggcgttttgaaaaggcggaactagaagcctcacgcgtgttggtcaacaaagaggccggagacaaccggactttggcattgatgttgggcgcacatgccgccgggcagatggaaaacatcgagctgcgcgaccgttatcttgcggaaatcgccaaactgccggaaaagcagcagctttcccgttatcttttgttggcggaatcggcgttgaaccggcgcgattacgaagcggcggaagccaatcttcatgcggcggcgaagatgaatgccaaccttacgcgcctcgtgcgtctgcaacttcgttacgctttcgacaggggcgacgcgttgcaggttctggcaaaaaccgaaaaactttccaaggcgggcgcgttgggcaaatcggaaatggaacggtatcaaaattgggcataccgccgccagctggcggatgctgccgatgccgccgctttgaaaacctgcctgaagcggattcccgacagcctcaaaaacggggaattgagcgtatcggttgcggaaaagtacgaacgtttgggactgtatgccgatgcggtcaaatgggtcaaacagcattatccgcacaaccgccgccccgagcttttggaagcctttgtcgaaagcgtgcgctttttgggcgaacgcgaacagcagaaagccatcgattttgccgatgcttggctgaaagaacagcccgataacgcgcttctgctgatgtatctcggtcggctcgcctacggccgcaaactttggggcaaggcaaaaggctaccttgaagcgagcattgcattaaagccgagtatttccgcgcgtttggttctggcaaaggtttttgacgaaaccggagaaccgcagaaggcggaggcgcagcgcaacttggttttggcaagcgttgccgaggaaaaccgaccttccgccgaaacccattga

SEQ ID NO: 39426 - DNA, 777 bp, Neisseria meningitidis
atgaccctcatccacccgaccgccgtcatcgaccccaaagccgaactcgactccggcgtcaaagtcggcgcgtacaccgttatcggccccaacgtccaaatcggcgcgaataccgaaatcggtccgcacgccgtcatcaacggccacaccagcatcggcgaaaacaaccgcattttccaatttgccagcctcggcgaaatcccgcaggacaaaaaataccgcgacgagccgaccaagctgattatcggcaacggcaacaccatccgcgaattcaccacctttaatttaggcacggtaaccggcatcggcgaaacccgtatcggcgacgacaactggattatggcgtactgccacctcgcgcacgactgcgtcatcggcaaccacaccatcttcgccaacaacgcctcgcttgccggacacgttaccatcggcgactacgtcgttttgggcggctacacgctggttttccaattctgccacatcggcgactacgccatgaccgccttcgccgcaggcgtacacaaagacgtaccgccctactttatggcatcgggctaccgcgccgaaccggcggggctcaacagcgaaggcatgcgccgcaacggttttaccgcagaacagatttccgccgtcaaagacgtgtacaaaaccctctaccatcgcggcattccgtttgaagaggccaaggcagacatcctccgccgcgccgaaacccaagccgagcttgccgtattccgagactttttcgcacaatcggcgcgcggcatcatccgctga

SEQ ID NO: 39427 - DNA, 372 bp, Neisseria meningitidis
atgagaaaaccccaacgcggctatgcccgccaagaccgtgtcaaagaacaaattatgcgcgagcttgccgaactcgtccgtaccagactgaaagacccgcgcgccggcttcattaccgtcaacgaagtcgaagttacccgcgattacagccacgccaccgtgttctacaccattttaaaccaagacgcgcgcgaaattacggaagaagtgctggaacacgcgcgcggacacctccgcagcgaattggccaaacgcatcaagctgttcaaaatccccgagctgcatttcaaatacgacgaatccttggaacgcggtatgaacctgtccgcccttatcgaccaagtagcggcggaaaaaccggttgaagactga

SEQ ID NO: 39428 - DNA, 486 bp, Neisseria meningitidis; identical to SEQ ID NO: 37367

SEQ ID NO: 39429 - DNA, 2106 bp, Neisseria meningitidis
atggctcgtaagaccccgatcagcctgtaccgtaacatcggtatttccgcccatatcgatgcgggtaaaaccacgacgacagaacgtattttgttctatactggtttgacccacaagctgggcgaagtgcatgacggtgcggctactaccgactacatggaacaagagcaagagcgcggtattaccattacctccgctgccgttacttcctactggtccggtatggcgaaacaattccccgagcaccgcttcaacatcatcgacaccccgggacacgttgactttaccgtagaggtagagcgttctatgcgtgtattggacggcgcggtaatggtttactgcgcggtgggcggtgttcaaccccaatctgaaaccgtatggcggcaagccaacaaataccaagtgccgcgcttggcgtttgtcaataaaatggaccgtcagggtgccaacttcttccgcgttgtcgagcaaatgaaaacccgtttgcgcgcaaaccctgtacctatcgtcattccggttggtgcggaagacaacttcagcggtgtggttgatttgttgaaaatgaaatccatcatttggaatgaagccgataaaggtacaacctttacctatggcgatattcctgccgaattggtcgaaactgccgaagaatggcgtcaaaatatgattgaagccgcagccgaagccagcgaagagctgatggacaaatacttaggcggcgacgagctgaccgaagaagaaatcgtaggcgcgttgcgtcaacgtactttggcaggcgaaattcagcctatgctgtgtggttctgcatttaaaaacaaaggtgttcaacgtatgttggacgcagttgtagaattgctgccagctcctaccgatattcctccggttcaaggtgtcaacccgaataccgaggaagccgacagccgtcaagccagcgatgaagagaaattctctgcattggcgttcaaaatgttgaacgacaaatacgtcggtcagctgacctttatccgcgtttactcaggcgtagtaaaatccggcgataccgtattgaactccgtaaaaggcactcgcgaacgtatcggtcgtttggtacaaatgactgccgcagaccgtactgaaatcgaagaagtacgcgccggcgacatcgcagccgctattggtctgaaagacgttactaccggtgaaaccttgtgtgcggaaagcgcgccgattatcttggaacgtatggaattccccgagccggtaatccatattgccgttgagccgaaaaccaaagccgaccaagagaaaatgggtatcgccctgaaccgcttggctaaagaagacccttctttccgtgtccgtacagacgaagaatccggtcaaaccattatttccggtatgggtgagctgcacttggaaattattgttgaccgtatgaaacgcgaattcggtgtggaagcaaatatcggtgcacctcaagtggcttaccgtgaaactatccgcaaagccgttaaagctgaatacaaacacgcgaaacaatccggtggtaaaggtcaatatggtcacgttgtgattgaaatggaacctatggaaccggggggcgaaggttacgagtttatcgatgaaattaaaggtggcgtgattcctcgcgaattcattccgtctgtcgataaaggtatccgcgatacattgcctaacggtatcgttgccggctatcctgtagttgatgtacgtatccgtctggtattcggttcttaccatgatgtcgactcttcccaattggcatttgaattggccgcttctcaagcgtttaaagaaggtatgcgtcaagcatctcctgccctgcttgagccgattatggcagttgaagtggaaactccggaagaatacatgggcgacgtaatgggcgacttgaaccgccgtcgcggtgttgtattgggtatggatgatgacggtatcggcggtaaaaaagtccgtgccgaagtacctctggcagaaatgttcggttattcgaccgacctgcgttctgcaacccaaggccgcgctacttactctatggagttcaagaaatattctgaagctcctgcccacatagctgctgctgtaactgaagcccgtaaaggctaa

SEQ ID NO: 39430 - DNA, 1266 bp, Neisseria meningitidis
atgaacacactccaacgccgcaagacgcatcaagtccgcatcgatcatattaccgtcggttcagaagcacccgtcgttatccaatctatgaccaacaccgacactgccgatgcaaaagccaccgcattgcagattaaggaattgagcgatgccggatccgaaatggtgcgtattaccgtcaacagccccgaagccgcgtccaaagttgccgaaatccgccgccgcttggacgatatgggctatgccacaccacttatcggcgatttccacttcaacggcgaacgcctgttggcggaatttcccgaatgcggcaaagcattgtccaaataccgcatcaatcccggcaatgtcggcaaaggcgtaaaaggcgatgaaaaatttgcctttatgattcggactgctgctgaaaacgataaagccgtccgcatcggcgtaaactggggttctttggatcaaagcctcgccaaacgtatgatggatgccaacctcgcttcttccgcgccgaaaccgcccgaagaagtgacgaaggaagcactgattgtctccgctttggaatctgccgaaaaagccgttctattgggactgcccgaagacaaaatcatcctgtcgtgcaaagtcagcgcggttcaggatttgattcaggtttaccgcgaactgggcagccgttgcgcctatccgctgcatttgggtttgaccgaagccggtatgggcagcaaaggcattgtcgcatcaacggcggcattatccgtcttgcttcaagaaggaatcggcgacaccatccgcatttcactgactccggaacctggcagcccgcgtactcaggaggtcgtcgtcgggcaagagattttacaaactatgggattgcgttcgtttacgccgatggttaccgcctgccccggctgcgggcgtaccaccagtaccgtatttcaagagctggcacaagatgttcaaaattacctgcgccaaaaaatgtctatatggcgtaccctttatcctggggttgaatccctgaacgttgccgtaatgggctgcgttgtcaatgggcccggagaaagcaaattggccgacatcggcatcagccttcccggtacgggagaaacacccgtcgcgccggtttatgtggacggggagcgcaaaataacactgaaaggtgataatattgcaactgaattcctagctattgtagaggaatatgtcaaaaccaactatggtgaaaacggctccaaacgcaaccagaacaaaatcatccctatacagtccctataa

SEQ ID NO: 39431 - DNA, 2016 bp, Neisseria meningitidis
atgaaatcctaccccgacccctaccgccattttgaaaacctcgattccgccgaaacgcaaaacttcgctgctgaagcgaatgccgaaacgcgcgcgcgttttttagaaaacgacaaggcgcgcacgctgtcggacggcattttggcgcagatgcaggacacgcggcagattccgttttgtcaggaacaccgcgcgcggatgtaccatttccatcaggacgcggagtatccgaagggcgtgtaccgcgtgtgtgcggcggcgacgtatcgttccggctatcccgagtggaaaatcctgttttcagtggcggatttcgacgagctgctcggcgacgatgtgtatttgggcggcgtgtcgcacttggtggaaaagcccgaccgtgcgttgttaacactgagcaaatcgggcggcgatacggcgtacacgctggaagtggatttggaagcaggggagttggtagaaggcggttttcactttccggcaggcaaaaaccaagtgtcgtggcgcgatgaaaacagcgtgtgggtgtgtccggcttgggacgaacgccagttgaccgaatcgggctatccgcgtgaggtgtggctggtggaacgcggcaagagtttcgaggaaagcctgcctgtgtatcaaatcgataaagatgcaatgatggtgaacgcgtggcgttatctcgatccgcagggttcgccgattgatttgattgaagcgtcggacggtttttacaccaaaacctatttgcaggtgtcggccgaaggcgaggcgaaaccgttaaacctgcccaacgattgcgatgtggtcggctatctggcggggcatcttttgctgacgctgcgcaaggactggaaccgcgcgaaccaaagctatccgagcggtgcgctggtggcggtgaagctgaatcggggtgaactcggggcggcgcagcttttgtttgcgcctgatgaaacgcaggcattggaaagcgtggaaacgaccaagcgttttgtggtggcgagcctgctggaaaacgtacaaggccgtctgaaagcgtggcgttttgccgacggcaaatggcaggaagtcgaactgccgcgcctgccttcgggcgcgttggaaatgaccgaccagccttggggcggcgacgtggtttaccttgccgccggcgatttcaccacaccgctgacgctgtttgcgctggatttgaacgtgatggaactgaccgtcatgcgccgccagccgcagcagttcgattcagacggcatcgaagtgcggcagttttgggtgatgtcgtccgacggcgaacgcatcccttatttccacgtcggcaaaaacgccgcgcccgacacgccgacgctggtttatgcctacggcggtttcggcgtacccgagctgccgcattatctgggcagcatcggcaaatactggctggaagagggcaacgccttcgtgttggcgaacatacgcggcggcggcgagttcggcccgcgctggcatcaggcggcgcagggaatcagcaaacacaaaagcgtcgatgatttgcttgccgtcgtgcgcgatttgtccgagcgcggcatcagttcgccccaacacatcggtttgcagggcggcagcaacggcggcctgattaccgccgccgccttcgtgcgcgaaccgcaaagcataggcgcactggtgtgcgaagtgccgctgaccgacatgatccgttatccgctgctctccgccggttcaagctggacagacgaatacggcaatccgcaaaaatacgaagtctgcaaacgccggttgggcgaattgtcgccgtatcacaatctttcagacggcatcgattatccgcccgcgctcatcaccaccagcctcagcgacgaccgcgtccatcccgcccacgcgctcaagttttacgccaaactgcgcgaaacctcgccgcaatcttggctctactcgcctgacggcggcggccataccggcaacggcacgcagcgcgaagccgccgacgaactcgcctgcgtgttgctgtttttgaaagagtttttgggctaa

SEQ ID NO: 39432 - DNA, 2625 bp, Neisseria meningitidis
atgaaaacctccgaactgcgccaaaaattcctaaaattttttgaaaccaaaggccacaccgtcgtccgctcttccagcctcgtgccgcacgacgacccgaccctgctgtttaccaacgcgggcatgaaccagtttaaagacgtattcttaggtttcgacaaacgcccgtacagccgcgccaccaccgcgcaaaaatgcgtacgcgcaggcggcaagcacaacgacttggaaaacgtcggctacaccgcccgccaccacaccttctttgaaatgatgggcaacttctccttcggcgactacttcaagcgcgacgcgatccacttcgcttgggaatttctgacttcccccgaatggctcaatatccccaaagacaaactgttggcgaccgtttacgcggaagacgacgaagcctacaacatctggttgaacgaaatcggtatgccgtccgagcgcatcgtccgcatcggcgacaacaaaggcgcgaaatacgcgtccgacaacttctggcaaatgggcgacaccggcccttgcggcccctgctccgaaattttctacgaccacggcgaagaaatttggggcggcattcccggcagccccgaagaagacggcgaccgctggatcgaaatttggaactgcgtattcatgcagttcaaccgcgacgaacaaggcaatatgaatccgctgcccaagccgtccgtcgataccggcatgggcttggaacgcatggccgccgttatgcagcatgttcacagcaactacgaaatcgacttgttccaagacctgctcaaagccgttgcccgcgaaaccggcgcagctttcagcatggaagaaccaagcctaaaagtcatcgccgaccacatccgctcctgctcattcctgattgcagacggcgtattgccttccaacgaaggccgcggctacgtattgcgccgcattatccgccgcgccgtgcgccacggttacaaactgggtcaaagcaaaccgttcttccacaaactggtggccgatttggtcaaagagatgggcgatgcctaccctgaattgaaagaaaaacaagttcaaatcgaagaagcgttgaaaaacgaagaaagccgttttgcccaaactctggaaaccggtatggctttgttggaaaacgcgcttgccaaaggcagcaaaaaactcgacggcgaaatcatcttcaaactctacgatacctacggtttcccatacgacttgactgccgacatctgccgcgaacgcaatatcgaactggacgaagcaggcttcgagcgcgaaatggaagcccaacgcgcacgcgcacgcgccgcacaaagcttcaaagccaacgcccaactgccttatgacggtcaagacaccgagtttaaaggttatagcgaacgccaaaccgaatccaaagtcctcgccctctacaaagacggcgagcaagtcgacgaattgaacgaaggcgacagcggcgcagtcgtcatcgactttaccccgttctatgcagaatccggcggccaagtcggcgatgtcggctatatcttctcaggcgaaaaccgctttgaagtacgcgatacccaaaaaatcaaagcggccgtattcggtcaattcggcgtacaaacttcaggccgtctgaaagtcggcgacagcgttaccgccaaagtggacgacgaaatccgcaatgccaatatgcgcaaccacagcgcaacccacttgatgcacaaagccctgcgcgatgtattgggcagacacgtcgaacaaaaaggctctttggttaccgccgaatccacccgtttcgacatttcccatccccaagcggtaactgccgaagaaatcgccgaagtcgaacgccgcgtcaacgaagccgttttggcgaacgttgccgtcaacgccgccattatgagcatggaagacgcgcaaaaaaccggcgccatgatgctcttcggcgaaaaatatggcgacgaagtacgcgtattgcaaatgggcggtttctctaccgaattgtgcggcggcacgcacgtttcacgcaccggcgacatcggcctcttcaaaatcatcagcgaaggcggtattgccgcaggcgtgcgccgtatcgaagccatcaccggcctgaacgcactcaaatgggcgcaagagcaagagcgtttggtgaaagacatcattgctgaaaccaaagcccaaaccgaaaaagacgtactggcgaaaatccaagcaggcgcggcacacgccaaagcattggaaaaagaattggcacgcgccaaagccgaactcgccgtccacgcaggcgcaaaactcttggacgacgcaaaagacttgggcgcagccaaactcgttgccgcccaaatcgaagccgacgcagccgccctgcgcgaaatcgtaaccgacctgaccggaaaatccgacaacgccgtgattcttttagcggcagtaaacgacggcaaagtctccctgtgcgccggcgtatccaaagccctgaccggcaaagtcaaagcaggcgatctggttaaatttgcagccgaacaagtcggcggcaaaggcggcggccgtcccgacttggcgcaggccggcggcacggatgccggcaaattgcccgccgtgttggatagcgtgaaagactgggtcggcgcgaagctggtttga

SEQ ID NO: 39433 - DNA, 231 bp, Neisseria meningitidis
  misc_feature 6, 7, 8, 9, 10: 'n' is a, c, g or t
gtgtgnnnnntcgaactcttttttgaggaaatccgcagcactttggcaagcggcgaagaaatcaaaatttccggtttcggaaatttccagttgcgcgacaagccgcaacgcccgggtcgtaatcctaaaaccggcgaggaagtgccgattaccgcccgccgcgtggtaactttccatgccagccagaaactcaaaagcatggtggaacactactatgacaaacaacgttga

SEQ ID NO: 39434 - DNA, 1263 bp, Neisseria meningitidis
ttgatttatgctttggcgctggtgaaaaaagccgccgccgcgaccaatgtttccctcggcaggattaagccggaacaggcggatttgattacgcaggcggcggatgatgtgttgaacggcaagctcgacggacagtttcctttagtggtttggcagaccggctccggcacgcagtccaatatgaacatgaacgaagtgctggcgaaccgcgccaacgaaatcgccggtacgggtttggcggcgtatcagcccgtccatcccaacgaccatgtgaaccacgcgcaatcgaccaacgacgcattcccgaccgccatccacgttgccgccgcgattgaaatcaaccgccacctcatccccgccgtaaaagccctgcgcgacaccttggacaaaaaagcccaagccttcgcccctatcgtcaaaatcggccgcacccacttgcaggacgcgacgccgctgactttaggccaagaattttccggctacgtttcccagctcgaccacggcttaggccgtctgaacgacgcgcttaaagacttgtatgaacttgctttgggcggtacggcggtcggcacgggtttgaacagccatcccgaatacgccgaaaaagccgccgccaaactcgccgaattgtccggcttgccgtttgtcagcgcgccgaacaaatttgaagccttgggcggacgcgatgccgccgttgccgcttcgggcgcattgaaaacgctggcggcaagcctgaataaaatcgccaacgacatccgctggctggcaagcggcccgcgctgcggtttgggcgaaatcaaaatccccgaaaacgagccgggttcgtccatcatgccgggcaaagtcaacccgacccaatgcgaagcgatgaccatggtgtgctgccaagtgttcggcaacgacgttaccatcggcatggcgggcgcgtcgggcaatttcgagctgaacgtctatatgcccgttatcgcctacaacctcttgcaatccatccgcctcttgggcgacgcgtgcaacagcttcaacgaacactgcgccatcggcatcgaacccgtaccggaaaaaatcgactatttcctgcaccattccctgatgctcgttaccgcgttaaaccgcaaaatcggttacgaaaacgccgccaaagtcgccaaaaccgcctacaaaaacaacaaatcgttgcgcgaaaccgccgttgagttgggcttgctgacgggcgaagaatttgacgaactagtcgttcctgccgatatggttcatccgcgctaa

SEQ ID NO: 39435 - DNA, 597 bp, Neisseria meningitidis
atgaagataacgcactgcaaattaaagaaaaaagtacagaaagaactgctccgtttttttgtactggaagttaccgcccgttctgccgccgatattttgggtatccatcccaattcggcagcactgttctaccgtaaaatccgcacggttatcaaccatcatttggccttggctgccgatgaggtttttgagggccctgtcgagcaggacgaaagcgatttcggcggacggcgtaaaggcagacgtggtcggggtgcggcaggaaaagtggttgtcttcggcattctgaaacacaacggacgggtctataccgttatcgtagataatgccaaatctgaaacgttactccctgtcatcaaaaagaaaatcatgccggacagtattgtttataccgatagtctgagcagctgcgacaagttggacgtgagcggttttatccattaccgcatcaaccattccaaggaatttgcagaccgtcagaaccacattaacggcattgagaacttttggaatcaggcaaaacgcgtcttgcgaaaatatagtggattggcacgaacgtttccccgaattggaagcgcaactgggtgcgccgattga

SEQ ID NO: 39436 - DNA, 870 bp, Neisseria meningitidis
  misc_feature 851, 852, 853, 854, 855: 'n' is a, c, g or t
atgcaattctcctactcatggctgaaaacccaagccgataccgaactttccgccgataagctggaacacctgttaacgatgtccggcttggaagtggaagaagccgagactgccgcgcctgcgtttacgggtgtggtaattgccgaagtgaaatccgttgaaaaacatcctgatgccgaccgtttgaacgttacccaagtcgatgcgggtacgggtgggttggttcagatcgtgtgcggtgcgccgaatgtgaaagcgggcatcaaagtgccgtgttcgctgccgggtgccgttttgccgggtaatttcaaaatcaagccgaccaaaatgcgcggcgtggtgtcggacgggatgttgtgttccaccgacgaactcggtctgcccgacgacggtgtgaacggcctgcacattctgcctgaagatgcgcccgtcggtaccaatatccgcgaatacttggatttggacgatacgctgtttacgttgaaaattacgcctaaccgcgccgactgcttgagcatcaaaggcattgcgcgcgaagtgtccgcattgacggggtgcgcgttcaggcagcccgaaatccataccgcgccgatcacgggcagtcgaaaacagcccgtgcagattaacgcgcctgccgattgcggccgttttatcagccgcgttattgaaaatgtcaatgcgaaagcggctactcccgattggatgaaacaacgtttggagcgcagcggcatccgcagtatttccgcgctggtggacatcggcaattatgtgatgctggaaatcggtcagccgatgcacgtttttgatgccgacaaactttccggcagcctgcacatccgccgcgcgcgcgnnnnncacacacttaattaa

SEQ ID NO: 39437 - DNA, 978 bp, Neisseria meningitidis
  misc_feature 963, 964, 965, 966, 967: 'n' is a, c, g or t
atgactacctccaaatgccccgtaacccatctgaccatgaacaacggcgcgcctgttgccgacaatcaaaacagcctgaccgccggtcctcgcggccctctgctggcgcaggatttgtggctgaatgaaaaactcgccgacttcgtgcgcgaagtcatccccgaacgccgtatgcacgccaaaggttcgggcgcgttcggtacgtttaccgtaacgcacgacatcaccaaatacacccgcgccaaaatcttcagcgaagtcggcaaaaaaaccgagatgtttgcccgtttcaccaccgtggcaggcgaacgcggcgcagccgatgccgaacgcgacatccgcggctttgccttgaaattctataccgaagaaggcaactgggatgtggtcggcaacaacacgcccgtgttcttcctgcgcgatccgcgtaagttccctgacctgaacaaagccgtcaaacgcgatccgcgcaccaatatgcgctctgccacaaacaactgggacttctggacgctgctgcccgaagcactgcaccaagttaccatcgtgatgagcgaccgcggcatccccgccggctaccgccatatgcacggcttcggttcgcatacctacagcttctggaacgaagcaggcgagcgtttttgggtaaaattccatttccgcacccaacaaggcattaaaaacctgaccaacgaagaagccgccaaaatcatcgccgacgaccgcgaaagccatcagcgcgacctgtacgaagccatcgaacgcggcgagtttccgaaatggacgatgtacatccaagtcatgcctgaagcagacgcggaaaaagtaccttatcatccgtttgacttgaccaaagtttggccgaaaaaagactatccgctgattgaagtgggcgaattcgagttgaaccgcaatcccgaaaacttcttcgccgatgtggaacaatccgccttcgcaccgagnnnnncacacacttaa

SEQ ID NO: 39438 - DNA, 1119 bp, Neisseria meningitidis
atgccggattttcaaagaattactattgaaaacatagagtattttattgtcgatagtattcaaaatttacgtgcggaagatagttttattcacaggaataacaagttatctgtttttggtggtaatggggaagcacgcaaatatgtaggtagttatattgatgatagtggtcgaaaactaagtacattttttgagtatgaaaattgggggattactgagacaaaaaatggaaggagggtagaatatcctctcattcagaaaaattgtttttttaataagaaaaatttacagcgttatttggttgatgcaaaagttgaatatcacaaacaagaacagaaatatcatcatgatatttcaaggttttatgatgattacgttttaagtattaataatctgcctacagaaaatattttcttttcaatccatgatgtatcagaccatttggaaaattctaaaggttaccgtaggggttatatccgttcggaggatgatatatggtcaatttggcgtaagattgtattgcccaaaattagttatttatcaattcttaaactattgcctgtcaaagatatagaagattcagaaccattattttatttccgaatatttttggattatcaatttcgctctatcgtgcacccgcaactcttatcaagagaaaaattagaaataccggcttcagaatttaatcaattcgtagagcaagaaatcattaaacagaaaagtagaaaagggcagcagaaatatcgcaaggatgttataaatcatatgccgcaatgtccatttacattaattacagatgaggttttgttaagggctagtcatattaaaccttatatggtttgtattactgagaaaaatgagaaagaggcattagattatttaaatgggttagctttaacgccgacttatgattggttgttcgatcaaggttatattactttcttggatgatggtcgtttgatttgcggtactcgactaagccgttacacatgggaaaaacttaatatcaatccaaatgcaaaaaataagatgagaatatatcccgaaggaagagaaaaatatttggaatatcatcgcaaatttgtgtttcaggacaatatcgatgatttcttgtaa

SEQ ID NO: 39439 - DNA, 843 bp, Neisseria meningitidis
atggatattaaaatcaacggcattaccgtcggtaacgatgctcctttcgtactgttcggcggcatcaacgttttagaagatttggattccaccctccaaacctgtgcgcattacgtcgaagttacccgaaaactcggtattccctatatctttaaagcctctttcgacaaggcaaaccgttcctccatccattcttatcgcggcgtaggcttggaagaaggcttaaagatttttgaaaaagtcaaagcagagttcggcatccccgtcattaccgacgtacacgaaccccatcagtgccaacccgtcgccgaagtgtgcgatgtcatccagcttcccgcctttcttgcgcggcagaccgatttggtggccgcaatggcggaaacgggcaatgtcatcaacatcaaaaaaccccagttcctcagcccttcgcaaatgaaaaacatcgtggaaaaattccgcgaagccggcaacgggaaactgattttatgcgaacgcggcagcagcttcggctacgacaacctcgttgtcgatatgctcggtttcggcgtgatgaaacaaacctgcggcaacctgccggttattttcgacgttacccattccctgcaaacccgcgatgccggttctgccgcatccggcggtcgtcgcgcacaggctttggatttggcacttgcaggcatggcaacccgccttgccggcctgttcctcgaatcgcaccccgatccgaaactggcaaaatgcgacggccccagcgcgctgccgctgcaccttttagaagattttttaatccgcatcaaagcattggacgatttaatcaaatcacaaccgattttaacaatcgagtaa

SEQ ID NO: 39440 - DNA, 633 bp, Neisseria meningitidis
atggatttgcacaatattcgggaagattacagcaaacgggaattgtcggaaggcgattgcgccgacaatccgatcgagcagttcgagcggtggttggacgaggcggtacgcgcacaggtcaacgagccgacggcggtcaatgtggcggcggtcgacggacgcggtagacccaacagccgtatggtgctgctgaaggaagttaattctgaaggttttgttttctttacgaattatcacagccgcaaggggcgttcgctggatgctcatccatttgcggcgatgacgtttttttggccggagctggagcgtcaggtgcgcgtggaagggcgtgttgaaaggctggcggagaagttgtcggacgaatattttgagagccgcccgtatcagagccgtttgggtgcgtgggcaagtgcgcagagcgaggtgattccgaacaaggcggtattggtggcaaaggcggcggcggtcggactcaaacatcctttgcacgtgccgcgtccgccgcattggggcggctatattgtgattcccgatttgattgagttttggcagggcaggccgagcaggctgcacgaccgcatccaataccgtttgctggatggtggctggatacgcgagcggctgtcgccttga

SEQ ID NO: 39441 - DNA, 2838 bp, Neisseria meningitidis
atgttagacaaatactcccccgccgaaatcgaatccaagcactatcaaaactgggaaagccaaggctatttccaacctgatatggatttgaccaaaccgtctttttccatccaactgccgccgcccaatgtaaccggcacgctgcacatgggtcatgccttcaaccaaaccattatggacggcctgacccgctactaccgtatgaaaggctgcaacaccgcctggattcccggcaccgaccacgcgggcatcgccacgcaaatcgtggtcgagcgtcagcttgccgcgcaaaacgtgtcccgtcatgacttgggtcgtgaaaaattcttggaaaaagtgtgggaatggaaagaagtttccggcggcacgattacgcagcagatgcgccgtgtgggctgttctgccgactggacgcgcgagtatttcacaatggacgatgtacgcgccgaaaccgtaaccgaagtgttcgtacgcctgtatgaacagggcttgatttatcgcggcaaacgcttggtgaactgggatccggtgcttggcacggcggtgtctgatttggaagtagaaagcgtggaagaacaaggctctatgtggcatatccgctatccgctggcggacaatcctgccgaagccgttatcgtggcgaccacccgtcccgaaacgttgctgggcgacgttgccgtagccgtcaatcccgaagacgaacgttacacccacttaatcggcaaagaattaatcctgccgctgaccggccgtaccatccccgtgattgccgacgaatacgttgaaaaagacttcggcacaggctgcgtgaaaatcacgcctgcacacgacttcaacgactacgaagtcggcaaacgccacgacacgcgcctgattaatgtgttcgacttggaagccaaagtgctggcaaacgccgaagtgttcaacttcaaaggcgaagcgcaacaaggctttgccctgcctgaaaaatacgcaggtttagaccgctttgccgcgcgcaaacaaatggttgccgatttgcaggaacaaggcttgttggtcgaaatcaaagcacacacgctgatgacacccaaaggcgaccgaaccggctcagtgattgagccaatgctgaccagccaatggtttgtcgccatgtccgccacgccaaacggcggcgagcctgacagcgaattcaaaggcttaagccttgctgacaaagccaaaaaagccgtcgacagcggcgcggtacgctttatccctgaaaactgggtcaatacctacaaccaatggatgaacaacatccaagactggtgtatttcgcgccaactgtggtgggggcatcaaatccccgcgtggtacgacgaaacaggcaatgtgtacgtcgcccgcaatcaggctgaagccgaaaaacaagccggcaaaacaggcttgacccgcgaagaagacgtattggacacttggttctcctccgcgctcgtgccgttttccacgctcggctggccgtctgaaaccgacgaactcaaagccttcctgccgtccaacgtcttggtaaccggctacgaaatcatcttcttctgggtggcgcgcatgattatgatgaccacccactttaccggcaaagtaccgtttaaagacgtgtacatccacggcatcgtgcgcgaccacgaaggcaaaaaaatgtccaaatcggaaggcaacgtcatcgatcctgtggatttgattgacggcatcggcttggacaagctgctggtaaaacgtaccaccggcctgcgcaaacctgaaaccgcgccgaaagtggaagaagccaccaaaaaactctttcccgaaggcattccgagtatgggcgcggacgcattgcgtttcaccatggcgagctacgccagcttggggcgcagcgtgaacttcgacttcaaacgcgccgaaggctaccgcaacttctgcaataaaatctggaacgccaccaacttcgtcttgatgaataccgaaaaccaagactgcggttacggcgcaaccgctgccgaaccgcgcggctactccttccccgatatgtggattataggccgtctgaatcagaccatcgaacaggttacgcaagcctacgaaacctatcgctttgatttgtcagcggaaaccctgtacagcttcgtatggaacgactattgcgactggtatttggaactcgccaaagtgcagcttcaaaccggctgcgccagccgccagcgcgccacacgccataccttattgcgcgtactcgaagccgccctacgcctgctgcacccgattattccgttcattaccgaagaactgtggcaaaccgtcgctcctatgtgcgacgcgaaaaccgccgacagcatcatgctcgcccgcttccccgaagccgacagcggcgagattgttcagacggcattcgagcaaatgaccgtgttgcaggatttgattggcgcagtccgcaacctgcgcggcgaaatgggcatccagcccaacgtaaaagccccgctgtttgtcgaaagcacggacgacttggcggactacctcaaatacctgccgatgatgacccgcctgaccgaagcacagcaagtcgccgccctacccgaaagcgaagacgcgcccgtcgccgtctgcaacggcgcgcgcctgatgttgaaagtcgaaatcgacaaagccgccgaaaccgcccgtttgagcaaagaagccgagaagctgcaaaaagccttggacaaactcaacgccaaactctccaaacccggctacaccgaaaaagcccctgcgcatctggtggaaaaagacaaagccgatttggcggaattggaagacaaaatggcaaaagttcaaaatcagttggcgaagttgaaagactga

SEQ ID NO: 39442 - DNA, 735 bp, Neisseria meningitidis
atgacgacacgccaaatcatcctcgataccgaaaccaccggtctgtatgccgacggcggcgaccgcttggtcgagtttgccggtctggaaatggtcaaccgccaaatgaccgacaaaaacctgcacctctatgtccaccccgagcgcgatatgcccgaagaggcggcgagggtgcacggtctgacgatagaggttttggaagggaaaaacgcgccgccgtttgcagaggtcggcaggcagattgccgatttcctgcgcggtgcggaactgattatccacaatgccaaattcgacgtgggcttcctcaatatggagttccgccggatggggttgccgactgtcgaggaactcggctgtaccgttaccgataccctggcgatggcgcgcgaaatgttccccgggcagaaagccagcctggatgccctgtgcaaccgtttttccgtcgaccgcagcaagcgcgtcctgcacggcgcattgatcgactgcgaacttttgggcgaagtctatcttgctatgacgcggcggcagttcgacctgatgggggaggccgcagaggaaaaaatggaaaccaaacccgtggtgcataccgaaaccaaacgcagcggcaaactgaaagtcatcagggcggacgaaaacgagttggcggaacacgggcaatatttggacggcttgggcgaagcctgtatctggcgcaaggaagccgtgccgtctgaaaacggcgggacggacgcatga

SEQ ID NO: 39443 - DNA, 720 bp, Neisseria meningitidis
atgaaagacgatgttttgaaacagcaggcacacgcggcgatacagaagagactgggctacgcgttccgcgatatttcgcttttgcggcaggctttgacgcacaggagccatcatgcgaagcacaacgagcggttcgagtttgtcggtgattcgattttgaattatacggtggcgcggatgctgtttgacacgtttccgaagttgaccgagggcgagttatcgcggttgcgggcaagtctggtcaatgagggcgtgctggcggaaatggcggcggaaatgaatgtcggcgacggtctgtacttgggggcgggcgagttgaagagcggcggcttcagacggccttcgatactggcggacgcgatggaggcgatgtttgcggcggtcagcttcgatgccgatttcaacacggcggaaaaggtggtgcgccatttgtttgccgaccgcgtccggtgtgccgatttccaaaatcaggcaaaagacggcaaaactgctttgcaggaggcgttgcaggcacgccgctttgctttgccgaaataccgtatcgaagagcaaatcggccatgccaacgacagtatgtttgtggtttcctgcgatttgggcgaactgggtttcgtgtgccgtgccaaagggacgagccgcaaggcggcggaacaggaggcggcgaaagaggctttgaaatggctggaagagaagctgccgctgaagaagaaaaagaaatga

SEQ ID NO: 39444 - DNA, 606 bp, Neisseria meningitidis
ttgaataccctctatttaggttcaaacagcccgcgccgaatggaaatcctgacacagttgggctaccgcgtcatccaactgcctgccggcatcgacgaatccgttaaagccggcgaaacacctttcgcttacgttcaaaggatggcagaagaaaaaaaccgaaccgccctgaccctcttttgcgaaaccaacggcacaatgcccgatttccccctgattaccgccgacacctgcgtcgtttcagacggcatcatattgggcaaaccccgctcccaagccgaagcaatcgaatttttaaaccgattgtccggcaaacaacataccgtcctgactgccgtctgcattcattatcgcggcaatgcggaaaaccgcgtccaaaccaaccgcgtcgttttcaagcccctgagttcggaagaaatttccgcctatgtgcaaagcggcgaaccgatggacaaagccggcgcctacgccgtacaaggcataggcggcatctttatccaatctatcgaaggcagcttcagcggcattatggggctgcccgtttatgaaaccgtttcgatgttgcaggatttgggataccgtaccccacctttcatccgagcctaa

SEQ ID NO: 39445 - DNA, 1059 bp, Neisseria meningitidis
atgattacaccgcaacaggctatcgaacgattaatcagcaataatgagttgttttacgatgaaatgaccgacttgatgcgccaaatgatgagcggaaaagtgccgcccgaacaaattgcggcgattttgacaggattgcgtatcaaggttgaaaccgtttccgaaattaccgcagctgcagccgtcatgcgcgagtttgcgacaaaagtgccgctggagaatgcggaggggctggttgatatcgtcggtacgggcggggatggtgccaaaaccttcaatatttcgacgacttcgatgtttgttgccgcagcggcaggcgcgaaggttgccaaacacggcgggcgttccgtttcatcttccagcggcgcggcggacgtgatggagcagatgggcgcaaacctcaacctgactcccgaacaggttgcccaaagtatcagccagaccggtatagggtttatgttcgcccccaatcaccacagtgccatgcgccatgtcgccccggtacgccgttcgctcggtttccgaagcattttcaacatattgggtccgttgaccaatcctgcgggcgcgccgaaccagcttttgggcgtgttccacaccgatttgtgcggcattttgtcgcgggtcttgcaacaactcggttcaaaacacgttttagtcgtttgcggggagggcggtttggatgaaattacactgacgggcaaaacgcgcgttgccgaactcaaagacggaaaaatcagcgaatacgacatccgcccagaagatttcggtatcgaaacccgccgcaatttggatgaaatcaaagttgccaatactcaggaatctttgttgaaaatgaatgaggtgctggatgggaaagaaggggctgcgcgcgatatcgtattgcttaataccgccgccgccctatatgccggaaatgtcgctgcttcgctttcagacggcatatctgccgcacgggaagccatcgattcaggcagggccaaatcgaaaaaagaggagtttgtcggttttcaaccacaacaaagatgccattttcttggaaagatggagcttgggtga

SEQ ID NO: 39446 - DNA, 1098 bp, Neisseria meningitidis
atggaagttcaactgccgaaaattaaaacagtacgcgtaatgttggcggggatgacggcgcagcaggaatccgttttcaaaatggcattcaaaatgcacaataccacccgttatgaaacagtatccccttcagacggcagtgccgtgcccgatttggttttggcggataccgatgccgagggcggttttgaactttggaaagagcttgccgagcgttataaggatatacccgtcgccgtctgttcggagaaagttcccgattctgaagttccctacctgcccaaaccgattcggtttgaaacattgtttcctatgctccgcaaattgttgcagggcgagaatgtttatgggaaatcgtttattgcacccgcagaccggtcggcgaaaaataacgggaatgtgcagcgtacggttacgatacgccagtttaacccgaataaaggattattgggggcgttgcggtttgcggaaaagaacaggcaggacatcgctatcttgcatggaaataagccggtccttattgttttcccctcgatacaacgggttttgctgacagaaagtgtgcaaaaactcgaagaattgtgcaaagacgaaaatttgcaggtcagctgcaagactgttcccgataacccgcaatggcgcgaaaaggctaaagtaggcattatgtcctgtatgtggcagttttccatttggacggcgcagggcaggttgatttatccgatttctcccgatactccgtttacgttgaaatcttggccaaacctgacccggttggcaagtgtgccggggtcgatacgcttgtcggcatttctgaccaaggcatccgtcaaccttaacgtgttgtataaagtgatgcctttaaacctcaatgatattctgaattatcttgcggcaacctatacaaccgggtttttgtcggtagatttaaaaacggtttcacaacaggcatactccgatatggcggataaaataaatatcggagccgattctgcctctgatagtgaaatgatgaaaaaagcggaaaaaatcacaacaccatcccaatcccagtcgcgcggccttctgcaaaggctgatgaaaaaactgttgggcagctaa

SEQ ID NO: 39447 - DNA, 960 bp, Neisseria meningitidis
atgaaacctgtttttttggattttgaacaacccatagccgaactgaccaacaaaatcgatgagctgcgtttcgtccaagacgagtctgccgtcgatatttcggacgaaatacaccgtttgcagaaaaaaagcaacgatttgaccaagtctattttcagtaaacttacacccgcccaaatttcacaggtttcccggcatccgcagcgtccctatactttggattacattgaggcactgtttaccgattttgaagaactgcacggcgaccgccactttgccgacgattatgcgattgtcggcggattggcgcgtttcaacggacaaagcgtgatggtcgtcgggcatcagaaagggcgcgacaccaaagaaaaaatccgccgcaacttcggtatgccccgtcctgaaggctaccgcaaagccctgcgcctgatgaagacggcagaaaaattcggcttgcccgtcatgacctttatcgatacgccgggcgcgtatcccggcatcggcgcggaagaacgcgggcagtcggaagccatcggcaaaaacctgtacgaactgacacgcctgcgcgttcctgttttgtgtaccgtcatcggcgaaggcggttcgggcggtgcgttggcggtcgccgtaggcgattacgtcaatatgctgcaatattcgacctattccgttatttcccccgaaggctgcgcgtctattttgtggaaaacggcggaaaaggcggcggatgcggctcaggctttgggcattaccgctgaccggctgcaaaggctggacttggtcgataccgtcatcaaagaaccattgggcggtgcgcatcgggatttcgggcaaaccatgaaaaacgtaaaagccgttttggaaaaacaactgcacgaagcgcaaagcatcccgcttgccgatttgctttcgcgccgtttcgaccgcattatggcttacggcaaattttcggaacaataa

SEQ ID NO: 39448 - DNA, 687 bp, Neisseria meningitidis; identical to SEQ ID NO: 36558

SEQ ID NO: 39449 - DNA, 783 bp, Neisseria meningitidis
atggatgatattcgcggcatcatccaaggtgcagccaatccttttctaacgggttttcagggattgggagttggggcaattacagacagtgcggtaaacccggtaacctatgcggcagcacggaaaactttacagggtattcacaatttaggaaatttaagtccggaagcacaacttgcggccgcgagcctattacaagacagtgcttttgcggtaaaagacagtatcaactctgccagacaatgggctgatgcccatccgaatataactgcaacagcccaaactgcccttgccgtagcagaggccgcaactacggtttggggcggtaaaaaagtagaacttaacccgaccaaatgggattgggttaaaaataccggctataaaaaacctgctgcccgccatatgcagactgtagatggggagatggcaggggggaatagaccgcctaaatctataacgtccaacagcaaagcagatgcttccacacaaccgtctttacaagcgcaactaattggagaacaaattagtagtgggcatgcttataacaagcatgtcataagacaacaagaatttacggatttaaatatcaattcaccagcagattttgctcggcatattgaaaatattgttagccatccaacaaatatgaaagagttacctcgcggtagaactgcgtattgggatgataaaacagggacaatagttatccgagataaaaattctgacgatggaggtacagcatttagaccaacatcaggtaaaaaatattatgatgatttatag

SEQ ID NO: 39450 - DNA, 564 bp, Neisseria meningitidis
atggcgatagaactaaatggtaactggacaaaaggatttgctttagaccatcatatgcaaaaaagtattttgttaggttatgatgaattagggcatcctcactttgatagcaagagaagtatgattggagaatgggtttatcaattaaaatatcgtaatcaaacccaaaatgtttctttgctggtagactatattttacaaaaatttagtggtttagaatctataaatttaattgttcccgccccttttacaacagagcgtattaatcaaccagttcaattaattgccaaagaactaagtgatcgcttgaatattccatattctcctattttaagaaaatctagctcacacacaccactcaaaaatattgaagaaaaatcagaaaaactagaaatactgaataattccatcacaattgacaatatagatctatccaataagaatattttagtaattgatgatttatttgatagcggagcaacattggaaatatcaactgaaaaattgttttcaaaaaatgctagatctgtaattgttttagcaatgacaaagactagaggataa

SEQ ID NO: 39451 - DNA, 291 bp, Neisseria meningitidis
ttgaaggttcccgcaaaacgctatttcacgctggacgagttgtgcggactgttgcaaatcagcccctatggttttgcgcaatggcagcataatcacggtgtggttgtcggttacggcggcgaacgctacacccgtttggatgtggtgaaactgttgaaattgcagagcacgtttgcaccgtatgcagaaggtgcggaatcgggttcggacggcaaccgtccggttacgcttcaggaaatcggagacggtctgaaagagctgttggcggatttggataaggaattgtgctga

SEQ ID NO: 39452 - DNA, 1383 bp, Neisseria meningitidis
atggcaagcatcgcccgcgacatcttcaaagcctacgacatccggggtattgtcggcaaaaccctgaccgacgaagccgcctaccttatcggcaaagccatcgccgccaaagccgccgaaaaaggcattacccgcatcgcgctcggacgcgacggacgcttgagcggtcccgaactgatggaacacatccggcgcggctttaccgacagcggcatcaatgtcctcaatgtcggtatggttgccactcctatgctctacttcgccgccgtcaacgaatgcggcggcagcggcgtgatgattaccggcagccacaatccgcccgattacaacggctttaaaatgatgctcggcggcgacacgcttgccggcgaagccatccaagaacttttgtccatcattgaaaaagacggttttgctgccgccggcaaacaaggcagcgtcaccgaaaaagacatctccggcgaatacctcaaacacattaccggacacatcaggctcaaacgcccgatgaacatcgccattgacgcgggcaacggcgtgggcggcgcgtttgccggcaaactctacaaaggcttgggcaacgaagtaaccgagcttttctgcgacgtggacggcactttccccaaccaccatcccgacccatccaaaccgaaaaacctgcaagatttgattgccgcgctgaaaaacggtgatgccgaaatcggcttggcgtttgacggcgatgccgaccgcttgggtgtggttaccaaagacggcaacattatttatcccgaccgccaactgatgctgttcgcccaagacgttttgaaccgcaatcccggcgcgaaagtcattttcgacgtgaagtccacccgcctgcttgcgccttggattaaagaacacggcggcaaagccataatggaaaaaaccggccacagctttatcaaatccgccatgaaagaaaccggcgcgccggttgccggcgaaatgagcggacacatcttcttcaaagaacgctggttcggcttcgacgacggtctgtacgccggcgcacgcctcttggaaatcctgtctgcctccgataatccgtccgaagtgttaaacaacctgccgcaaagcatttccacgcccgaactcaacatcgccctgcccgaaggcagcaacggccatcaggttatcgacgaactcgccgccaaagccgaatttgaaggcgcaaccgaaatcatcaccatcgacggtctgcgcgttgaatttcccgacggcttcggtctgatgcgtgcttccaataccacgccgattctggtgttgcgttttgaggcggatacgcaagaagccatcgagcggattcaaaaccaattcaaagccgtcatcgaaagcaatccgaatctaatctggcctctgtaa

SEQ ID NO: 39453 - DNA, 759 bp, Neisseria meningitidis
atgaaaaaagtcagcgtattgattgttgccaaaaacgaagcaaaccacattcgggaatgtattgaaagttgccgtttcgataaagaagttatcgttatcgacgaccacagcaccgacaatactgccgaaattgccgagggtttgggtgcaaaagtcttccaacggcatttgaacggggatttcggagcgcaaaaaacatttgccatcgaacaggcaggcggagaatgggttttcctgattgatgcagacgaacgctgcacgccggaactatctgatgaaatctcaaaaattgtccaaaccggcgattatgccgcctattttgtcgagcgccgcaaccttttccccaaccatcccgccacacacggcgcgatgcgtcccgacagcgtatgccgtttgatgccgaagaaagacagttcggtgcaaggcaaagtacacgaaaccgtacaaaccccctaccccaaacgccgtctgaaacattttatgtaccattatacgtacgacaactgggaacaatatttcaacaagttcaacaaatatacttccatctcagccgagaaataccgagagcagggaaagcccgtgcgtttcgttagggacattatcctccgtccgatttggggttttttcaaaatttatattctgaacaaagggtttcttgatggaaaaatgggttggattatgtccgtcaaccacagctattacacgatgattaaatatgtcaaactatattatctgtacaaatctggcggaaaattttaa

SEQ ID NO: 39454 - DNA, 711 bp, Neisseria meningitidis
  misc_feature 4, 5, 6, 7, 8: 'n' is a, c, g or t
gtgnnnnncgaacgcatttgcgccgacatcggcggtttcgcgcaggcggtttcgacattttttggaacaggcggttgcggggcaaacgttaccgtaccgttcaaacaggaagcgtttcatctggcggacgagcattccgaccgcgctttggcagcaggtgcggtcaatacgctgattctgttgaaaaacggcaagctgcgtggcgacaataccgacggtatcggtttggccaacgacatcacgcaggtcaaaaacattgccattgagggcaaaaccattttgcttttgggcgcgggcggcgcggtgcgcggcgtaattccggttttgaaaggacaccgccctgcccgtatcgtcgttgccaaccgcacccacgccaaagccgaagaattggcgcggcttttcggcattgaagccgtcccgatggcggatgtgaacggcggttttgatatcatcatcaacggcacgtccggcggcttgagcggtcagcttcctgccgtcagtcctgaaattttcctcggctgccgccttgcctacgatatggtttacggcgacgcggcgcaggagtttttgaactttgcccaaagcaacggtgcggccgaagtttcagacggactgggtatgctggtcggtcaagcggcggcttcctacgccctctggcgcggatttacgcccgatatccgccctgttatcgaatacatgaaagccatgtaa

SEQ ID NO: 39455 - DNA, 1155 bp, Neisseria meningitidis
atgaaatttaccaagcaccccgtctgggcaatggcgttccgcccattttattcgctggcggctctgtacggcgcattgtccgtattgctgtggggtttcggctacacgggaacgcacgagctgtccggtttctattggcacgcgcatgagatgatttggggttatgccggactggtcgtcatcgccttcctgctgaccgccgtcgccacttggacggggcagccgcccacgcggggcggcgttctggtcggcttgactatcttttggctggctgcgcggattgccgcctttatcccgggttggggtgcgtcggcaagcggcatactcggtacgctgtttttctggtacggcgcggtgtgcatggctttgcccgttatccgttcacagaatcaacgcaactatgttgccgtgttcgcgctgttcgtcttgggcggcacgcatgcggcgttccacgtccagctgcacaacggcaacctaggcggactcttgagcggattgcagtcgggcttggtgatggtgtcgggttttatcggtctgattggtacgcggattatttcgttttttacgtccaaacggttgaatgtgccgcagattcccagtccgaaatgggtggcgcaggcttcgctgtggctgcccatgctgaccgccatgctgatggcgcacggcgtgatgccttggctgtcggcggctttcgcgtttgcggcaggcgtgatctttaccgtgcaggtgtaccgctggtggtataaacccgtgttgaaagagccgatgctgtggattctgtttgccggctatctgtttaccggattggggctgattgcggtcggcgcgtcttatttcaaacccgctttcctcaatctgggtgtgcatctgatcggggtcggcggtatcggcgtgctgactttgggcatgatggcgcgtaccgcgctcggtcatacgggcaatccgatttatccgccgcccaaagccgttcccgttgcgttttggctgatgatggcggcaaccgccgtccgtatggttgccgtattttcttccggcactgcctacacgcacagcatacgcacctcttcggttttgtttgcactcgcgcttttggtgtatgcgtggaagtatattccttggctgattcgtccgcgttcggacggcaggcccggttga

SEQ ID NO: 39456 - DNA, 318 bp, Neisseria meningitidis
atgaacaagccgtttatcactcaggcgcagttggcactttataaatatcagccgtctagcaagtattttgggcaatcgatggcattaattgctcagaaagaatttgaagaatttgttaataacgtaaaagagtacgatattttagagagtttctcttatttcttaaataagagagtcgcacataatatttggaagatttatttttctgatgaatctgttatttttataagaaaatcagaagagaacggaaaaactgttcatgaattcgtttatcaagagtacaccgatagttctgattttaattctatgttcgagtaa

SEQ ID NO: 39457 - DNA, 969 bp, Neisseria meningitidis
atgaaaattttgcttgtccgtttgtctagtatgggcgatttaattcacactttgcccgcaattgaggatttggcgcgacaatgccctgatgtagaactccattggttgtgtgaagctggatttacagatattgcgcgcctgcatccgtttgtgaaaaaaatccatgtgatgaaatggcggcaatggcgcaaacatctctttcaggctgaaacttggcgggaaatgggtcatctgaaacagactttgcggcaggaagcatttaattttgtattggacagtcaaggtctgattaaaagcgcgtgtttcgctaaaatggcgaaatcccctatttatggtttggataaaaatagcgcgcgcgagggactggctgcgctggcgtatgcgaaaacatacgctgtaccgaaagggaaaaatgctgtttggcgcaatcgtgagctgttcgcccaagtatttgggtatgcgatgcctgaaacgcaggtatttggcttgactgttcctgaggtaggccgtctgaaaaatttagcgcagccgtattatgcggctttgcatgcgaccagtcgggacagtaagttatggcctatggaaaactggcggtcgttgctgcaaaagttgaatgaagaacagcaatgcaatatttacctgccttggggaaatgaagatgaaaaaacgcgtgccaaacagattgcagacggactgccgtttgctattgtgtgcgacaaaataaatttattgcaggcagcgtatctgctgaaatacgcggtcggaattgtcggcgtggataccggtttgctgcatttggcaaatgccttggaaaaacctgtggtcggcatttataccgataccgatccgattaaaacaggcgttcaggtttcgccaattgcaaaaaatttgggcaatatcgggcagattccgaccgcagatttggtttatcaagcgctgatggattgtgttgcagcagataaaggctaa

SEQ ID NO: 39458 - DNA, 1176 bp, Neisseria meningitidis; identical to SEQ ID NO: 38454

SEQ ID NO: 39459 - DNA, 525 bp, Neisseria meningitidis
atgtcattgaacaaagtcatcctcatcggccgcctcggacgcgatcccgaagtgcgctatatgcccaacggcgaggcggtttgtaatttcagcgtcgccaccagcgaaacttggaacgaccgcaacggccaacgtgtagagcgtactgagtggcacaacatcaccatgtaccgcaaactggcggaaattgccgggcaatacctcaaaaaaggcgggctggtttatctggaaggcagaatccaaagccgcaaataccaaggcaaagacggcatcgaacgcaccgcttacgatattgtcgccaacgaaatgaaaatgttgggcgggcgcaatgaaaacagcggcggtgcgccttacgaggaaggttacggtcagagtcaggaggcttaccaacgccccgcgcagcaaagccggcagcccgcctccgacgcgccgtcccatccccaagaagcaccagccgcgccgcgccgccaacccgtgcctgccgccgccccggtcgaggacattgacgacgatatcccgttctga

SEQ ID NO: 39460 - DNA, 3135 bp, Neisseria meningitidis
atgaataaaactttaaaaaggcgggttttccgccataccgcgctttatgccgccatcttgatgttttcccataccggcggggggggggggggggcgatggcgcaaacccataaatacgctattatcatgaacgagcgaaaccagctcgaggtaaaggggaatgggcaatattcaacaataaaggacaaagacagggagcgggtatttgaccatacgaactggagagacaggttcggcatcacaaacaattttatctcattcaacaatagcgatgagcttgtttctcaacaaagcggtactgccgtttttggcacagccacctacctgccgccctacggcaaggtttccggttttgatgccgacgggctggaaaagcgcaacaatgccgtcgattggattcgtaccacccgcatcgcgctggcaggctacagatacgacaatgtcgtatgcagaagcaccacagactgtcccaaacttgtctataaaacccgattttccttcgataatcccgacttggcaaaaacaggagtcgggctggataagcacacagagccaagccgcgacaattcgcccatttacaaattgaaggatcatccatggttgggcgtgtctttcaatttgggtgccgagggtaccgccaaaaatggtaagacaatcaacaaattggtatcttcttttaatgaaaagaatagtaataacaacctcgtctataccacggaaggccgcgatatttccttgggcgactggcagcgcgaaacgaccgccatggcctattatctgaacgccaaactgcacctgctggacaaaaaagggattaaagatatcgcccaaggcaaaacagtggatttgggcaccttgagaccgcgcgtcgagacgacaggacgaagctggctaaatttttgggctaagtgggacattaaagataacgggcagattccggtcaagctcggcctgccggaagtcaaagcaggccgctgcatcaacaaagcgaaccccaatcccaaagcccaagccctttcccccgccttgaccgcccccgcgctgtggttcggagctgggcaagatggtaaggcggagatgtattccgcttcggtttccacctaccccgacagttcgagcagccgcatcttccttcaaaatctgaaaagaaaaaacgaccccaacaaacccggccgctattccctcgcagacttgagtgcgtcggatattcaaagtaaagagccgactttcacaagtcggcaaacaatcatccgattggatggcggcgtacagcagatcaaactggataaaagcaatgaggccaccggtttaaatggaaatgacggcaaaaacgacactttcggcattgttagtgaagggagcttcacgcctgatgtcagcgagtggaaaaaagtgctgctgccttggacggttcggggttctgctgatgacggtcgatttaaatcaattaaccaagaatcaagcaaatacagccaaagataccgcatccgcgaaaacggcaacaatagcaagcgtgatttgggcgacatcgtcaacagccccatcgtggcggtcggcgagtatttggctacttccgccaacgacgggatggtgcatatcttcaaacaaagcggcggggacaagcgcagctacaatctgaagctcagctacatccccggcacgatgccgcgccaatattttgataacgacacttccgctctcaaagactccaccctcgccaaagagctgcgcacctttgccgaaaaaggctatgtgggcgaccgctacggcgtggacggcggctttgtcttgcgccgcattacagatgaccaagacaagcaaaaacatttctttatgtttggtgcgatgggcctgggcggcagaggcgcgtatgccttggatttgaccaaagccgacagcaataacccgaccgccgtttccctgtttgatgtcaaaaatggcaataatggcaagaatagcaataatagcaataatagcgtgcaattaggctacaccgtcggcacgccgcaaatcggcaaaacccacaacggcaaatacgccgccttcctcgcctccggttatgcgactaaagacattaacaacggcgacaataaaaccgcgctgtatgtgtatgatttggaaagcaacaacggtacgccgattgcaaaaatcgaagtacccaacggcaagggcgggctttcgtcccccacgctggtggataaagatttggacggcacggttgatatcgcctatgccggcgatcgcggcggcagtatgtaccgctttgatttaagcggcaacaacccgaccagttggtctgcacgcgccattttcagcggcaacaaaccgattacttccgcgcccgccatttcccaactgaaagacaaacgcgtggttatcttcggcacgggcagcgatttgagtgaagaggatgtggacagcaaagaaatccaacacgtttacggtatttttgacaatgacacagacacgggtacggcgcaagacgggcagggcaaagggctgctcgagcaaaagctggaaaaagacaaagacggcaaaacgctgtttttaagcgactacaaaaggtctgacggctcgggcgacaagggctgggtagtgaaattggaagccggacagcgcgttaccgtcaaaccgaccgtggtattgcgtaccgcctttgtaaccatccataaatatacgggtaatgacaaatgcggcgcggaaaccgccattttgggcatcaataccgccgacggcggcaagctgaccaagaaaagcgcgcgcccgattgtgccggccgacaatacggctgtcgcgcaatattccggtcataagcaaaccgccaaaggcaaatccatccctataggttgtatggaaaaaaacaatggaatcgtctgcccgaacggatatgtttacgacaaaccggttaatgtgcgttatctggatgaaaagaaaacagacggattttcaacaacggcagacggcgatgcgggcggcagcggaacattcaaagagggtaaaaaacccgcccgcaataaccggtgcttctccggaaaaggtgtgcgcaccctgctgatgaacgatttggacagcttggacattaccggcccgacgtgcggtatgaaacgaatcagctggcgtgaagtcttctactga

SEQ ID NO: 39461 - DNA, 312 bp, Neisseria meningitidis
atggcaaaccaaaaaatccgtatccgcctgaaagcttatgattacgccctgattgaccgttctgcacaagaaatcgttgaaactgcaaaacgtaccggtgccgttgtaaaaggcccgattcctttgccgaccaaaatcgagcgtttcaacattttgcgttctccgcacgtgaacaaaacttcccgtgaacaattggaaatccgcacccacttgcgcctgatggacatcgtggattggaccgataaaactaccgatgcgctgatgaagctggatttgtcggccggtgttgatgtagaaatcaaagtccaataa

SEQ ID NO: 39462 - DNA, 1089 bp, Neisseria meningitidis
atgagcgactacacgcagcagcttcaagataaaaaagaccaccttaaaaccctttttgcaggtttggatgttcctgagtgggaagtgtacgaatctccggacaaacattaccgtatgcgtgccgagttccgtatttggcacgaaggcggtgaaatgttttatgccatgtttgaaaaaggacaaaaggctggcggggcaagcctgatccgttgcgaccgttttgaagcggcttccgaagccgtcaaccgcctgatgccagaattgattgccgttgccgcccaatctgccgaactgagaaaccgttggtatgccgtcgaatttttgtctacgctcagcggggaaatgctggttaccatgatttaccacaaaaggcttgataatgagtggatgcaggcggcgcaagcgttacagcaacagttggatatttccgtcatcgggcggagcaggggacagaaaatagtcttaaaacaggactatgtaacggaaactttgaaggtcggcaaccgggatttccattatcggcaaattgaaggcggttttacccaacccaatgctgccgtgtgccggaaaatgctcgaatgggcgtgccgcgcggcggaaggactgggcggggatttgctcgaactatattgcggaaacggcaatttcaccctgcctttatctgaaaagtttgaacgtgttttggcaaccgaaatctccaaaacctccatcagcgcggcgcaatggaatattgaggcaaacgggataggcaacatcaaaatcgcccgtctgtctgccgaagaatttaccgaagcctataccggcaaacgtgagtttaaacgccttaaggatggtggtattgctttgacggattacgcattttccactattttcgtcgatccgccgcgtgccggtatcgatgaggaaactttgaagctggtgtcgcagtttgacaacatcatctacatttcctgcaatcccgaaacgctgcgtgccaatttggacaccttggcggaaacccatgcggtcgaacgtgccgccttgttcgaccaattcccgtttacgcaccatatcgaaagtggtgtattgttgaaaaagaaaatcctttga

SEQ ID NO: 39463 - DNA, 1011 bp, Neisseria meningitidis
atgtccatcaaaatcctgattatttctcccagttggataggcgactgcgtgatgacccagcccttgttccgccgtttgaaggaacttcaccccggttgcacgattgatgtgttcgcaccgaagtggtcgatggcggtgtttgagcgtatgccggaagtgaatgagattcttgaaaatccgttcggacacggtgcgttggagttgaaacgccgttggcgggtcggtagggatttggggcggcgcggatacgatcaggttatcgtgttgcccggttctttgaaatcggcaatcatcgcgctggcgacaggtatcggtaaaaggacgggttatgtcggtgaaagccgttattttttgttgaacgatatacgcaggctggataaggaacgtctgcctttgatggtggacagatatacggctctcgcgcatccgagccaggaggattttgacgggcattcgggattccccgagttttccattgatgaacggcggcgggaaatttctgtcgaaacctttggcttggatattggaaagcctgttctggctttttgtccgggtgcggaattcgggccggcaaagcgttggccgacaaggcattttgccgagttgggcaaacattatctggcggcgggttggcaggtttggttgttcggttcgcaaaaagatgatgaaattgccgaggaaatcaaccgcctttcagacggtatgtgtgtcaatttgtgcggcaaaaccgatttgtcgcaggcaatggatttgctgtcgttggcggacacggtcgtgtgcaacgacagcgggctgatgcacttggcggcggcattgggcaggaaagtggtggcggtttacggttcttccagcccgacgcatacgccgcctttgagcgacagggcgaaaatcgtcagcctccatttggaatgttccccgtgttttaagcgggaatgtccgctagggcataccgactgcctcaacaagctgtatcccgagaagattgtgcaggcggttgaagaggcggtatga

SEQ ID NO: 39464 - DNA, 1065 bp, Neisseria meningitidis
atgttggtattgggaatcgaatcttcttgcgacgaaacaggcgttgcgctgtatgacaccgaacgaggattgcgggcgcactgtctgcacacgcagatggcaatgcacgccgaatacggcggggttgtgccggagctggcaagccgcgaccatatccgccgccttgttccgttgacggaaggctgtctggcgcaggcaggcgcatcgtatggcgacattgacgcggttgcctttacgcaggggcccggtttgggcggcgcgttgctggcgggttcgagttacgccaatgccttggcttttgcgctggataagcctgttattcccgtccatcatttggaagggcatctgctgtcgccgctgttggcggaggaaaaacccgactttccttttgtcgcgctgttggtttcgggcgggcatacgcagattatggcggtcaggggcataggcgactacgcgcttttgggcgagagcgtcgatgatgcggcgggcgaggcattcgacaaaacggcgaaactgctgggcttgccgtatccgggcggtgcgaaactgtcggaacttgcggaatcgggcaggcccgaagcgtttgtttttccgcgcccgatgattcattccgacgatttgcagatgagtttttcaggtttgaaaaccgctgttttgactgccgtcgagaaagtgcgcgcggaaaacggggcggatgacattcctgagcagacacgcaacgacatctgccgtgcgtttcaagatgcggtagtcgatgtgttggcggcgaaagtgaaaaaagccctgttgcagacagggttcagaaccgtagtggtcgccggcggggtcggtgcaaaccgcaaactccgtgaaactttcggcaacatgacggtgcaaatcccgacccccaaaggcaagccgaaacatccgtccgaaaaagtcagcgtgtttttcccgccgacggcatactgcacggacaacggtgccatgattgcctttgcaggcgcgatgcatttgaaaacgggtagggaagccggtgcatttaatgtacgcccgcgctggccgctgtcggaaatcgtcaaatga

SEQ ID NO: 39465 - DNA, 1896 bp, Neisseria meningitidis
  misc_feature 6, 7, 8, 9, 10: 'n' is a, c, g or t
gtgtgnnnnntcggtttggcgattatgcgcttaaactcttcaatactcgacctgcccccgacaaaacaatatttccaatccggcagcctgtggagcgagctgcgccaaggcttccggatgggcgaagtcaatcccgaactggtacgccgccacgaaagcaaattcatcgcaagccacagctatttcaacagggtcatcaaccggagtagaccctatatgtaccatatcgccaacgaagtcaaaaaacgcaatatgcccgccgaagccgccctgcttcccttcatcgaaagcgcgttcgtcaccaaagccaaatcacacgtcggcgcatcgggcctgtggcagtttatgcccgctaccggcaggcattacggcttggaaaaaacaccggtttacgacggcaggcacgacgtttacgccgccaccgatgccgcactcaactacctgcaatacctctatggactgttcggcgactggccgctcgcctttgccgcctacaactggggtgaaggaaacgtcggacgcgccatcaaccgcgcccgcgcccaagggctcgaaccgacctacgaaaacctgcgtatgcccaacgaaacgcgcaactatgttcccaagctgctcgccgtgcgcaacatcattgccgccccccaatctttcggcatgaatatcagcgacatagacaataaaccctattttcaggcaatcgaaccggaccgtccgctcgacaacgaagccatcgcccggcttgccggcatcacgcaaagcgagctgctcgccctaaaccccgcattcaacgtccccgcgttcatccccaaaagcaaacgcaaactgctgcttcctgtcgcatccgtccaaaccttccaaagcaactacctcaacgccgcacccgacagcctgttttcatgggaagtctatacgcctgccgccaaaaccagcctgtccgacatctcgacggcaaccggcatgagcattgccgacatcaaacgcctcaacaacctgaacggcaaccttgtcaacgcaggacgcagcatccttgtcgccaagaacggcaaaacccttcagacggcatcggaatccgtcgtttccatcgacatcgacaatacgcccgacacctaccgttccaatatgccggcaggcacggtgaacgtcggcattgcccgaatccgacccgccgccgcacagacagcggacattaccgtcgcacctttgccgcagaaaaccgtccgtacggaacccgatccccttgtccgtattgccgaacctgcccttgcgacagccgcagcgcaacctcaaaccgaaaaacagaccgccatgccgtctgaaacccaaaccgcaacactcgcgcagatcatcccccaaaacgacatgcaggcggcagacgaactcatgcagcttgttgcccgaaacaacctgcgccgacaggctgaagaaaccatctccgccgtcatcggcacgcctgacacagttgccgaacacaacatttcctcatctccgcaacataccgttgccgccgacggcaaacgccgggcacgtttggaaacgcgcgtagccaaagctgccgacggcgaagccgaaatctccccgctccatgccagcatccaccgcgttgtagaaggcgacaccctgttcaacattgccaaacgctacaacgtcagcgtagccgacctgattgtcgccaacaacatcaaaggcaacaccatccaaaaaggacaggtactccgcctggcgcaggcagcccctgcccaaacccgtattgaaaaagtatcctacaccgcgcgcaaaggcgacaccttcaaaagtatcgccgcgcgcttcaatatccatatcgacgacatccgccggctcaatcccaacctgaacaccatcaatccgggacagagggtcaaactgattggaagctga

SEQ ID NO: 39466 - DNA, 816 bp, Neisseria meningitidis
atgagaccatatgctactaccatttatcaactttttattttgtttattgggagtgtttttactatgacctcatgtgaacctgtgaatgaaaagacagatcaaaaagcagtaagtgcgcaacaggctaaagaacaaaccagtttcaacaatcccgagccaatgacaggatttgaacatacggttacatttgattttcagggcaccaaaatggttatcccctatggctatcttgcacggtatacgcaagacaatgccacaaaatggctttctgacacgcccgggcaggatgcttactccattaatttgatagagattagcgtctattacaaaaaaaccgaccaaggctgggttcttgagccatacaaccagcaaaacaaagcacactttatccaatttctacgcgatggtttggatagcgtggacgatattgttatccgaaaagatgcgtgtagtttaagtacgactatgggagaaagattgcttacttacggggttaaaaaaatgccatctgcctatcctgaatatgaagcttatgaagataaaagacatattcctgaaaatccatattttcatgaattttactatattaaaaaaggagaaaatccggcgattattactcatcggaataatcgaataaaccaaactgaagaagatagttatagcactagcgtaggttcctgtattaacggtttcacggtacagtattacccgtttattcgggaaaagcagcagctcacacagcaggagttggtaggttatcaccaacaagtagagcaattggtacagagttttgtaaacaattcaaataaaaaataa

SEQ ID NO: 39467 - DNA, 807 bp, Neisseria meningitidis
atgagcaccttcttccggcaaaccgcacaagccatgattgccaaacacatcgaccgcttcccgctattgaagttggaccaggtgattgattggcagccgatcgaacagtacctgaaccgtcaaaaaacccgttaccttcgagaccaccgcggccgtcccgcctacccgctgttgtccatgttcaaagccgtcctgctcggacaatggcacagcctctccgatcccgaactcgaacacagcctcattacccgcatcgatttcaacctgttttgtcgttttgacgaactgagcatccccgattacagcaccttatgccgctaccgcaactggctggcgcaagacgacaccctgtccgaactgttggaactgatcaaccgccaactgaccgaaaaaggtttaaaaatagagaaagcatccgccgccgttgttgacgccaccattattcagaccgccggcagcaaacagcgtcaggctatagaagtcgatgaagaaggacaagtcagcggccaaaccacaccgagtaaagacagagatgcccgttggataaagaaaaacggcctctacaaactcggttacaaacaacatacccgtaccgatggggaaggctatatcgagaaactgcacatcacccccgccaatgcccatgagtgcaaacacctgtcgccgttgttagaagggatagctgaaagtacgaccgtctatgccgacaaaggctatgacagtgcggaaaaccggcaacatctgaaagaacatcagttgttggacggcattatgcgcgggcagcctatttcggactgctcaaagtga

SEQ ID NO: 39468 - DNA, 501 bp, Neisseria meningitidis
atgacccgtttgacccgcgcgtttgccgcggctctgatcggtttgtgctgcaccgcaggcgcgcacgccgacaccttccaaaaaatcggctttatcaacaccgagcgcatctacctcgaatccaagcaggcgcgcaagattcaaaaaacgctggacagcgaattttccgcccgtcaggacgaattgcaaaaactgcaacgcgaaggtctggatttggaaaggcagcttgccgaaggcaaactcagaaacgcaaaaaaggcgcaagccgaagaaaaatggcgcgggctggtcgcagcgttccgcaaaaaacaggcgcagtttgaagaagactacaacctccgccgcaacgaagagtttgcctccctccagcaaaacgccaaccgcgtcatcgtcaaaatcgccaaacaggaaggttacgatgtcattttgcagaacgtgatttacgtcaacacccaatacgacgttaccgacagcgtcattaaagaaatgaacgcccgctga

SEQ ID NO: 39469 - DNA, 1065 bp, Neisseria meningitidis
atggaaaaagaattcaggatattaaatatcgtatcggccaagatttggggtgggggcgaacaatatgtctatgatgtttcaaaagcattggggcttcggggctgcacaatgtttaccgccgtcaataaaaataatgagttgatgcacagacgcttttccgaagtttcttccgttttcacgacacgccttcacacgctcaacgggctgttttcgctctgcgcgcttacccgctttatccgggaaaaccgcatttcccacctgatgatacacaccggcaaaattgccgccttatccatacttttgaaaaaactgaccggggtgcgcctgatatttgtcaaacataatgtcgtcgccaacaaaaccgatttttaccaccgcctgatacagaaaaacacagaccgctttatttgcgtttcccgtctggtttacgatgtgcaaaccgccgacaatccctttaaagaaaaataccggattattcataacggtatcgataccgatcggttccctccctctcaagaaaaacccgacagccgtttttttaccgtcgcctacgccggcaggatcagtccggaaaaaggattggaaaacctaattgaagcctgtgtgatattgcatcggaaatatcctcaaatcagactcaaattggcagggcacggacatcctgattatatgtgccgcctgaagcgggacgtatctgcttcaggagcagaaccatttgtttcttttgaagggtttaccgaaaacattgcttcgttttaccgccaaagcgatgtcgtggttttgcccagcctcgtcccggaggcattcggtttgtcattatgcgaggcgatgtactgccgaacggcggtgatttccaatactttgggggcgcaaaaggaaattgtcgaacatcatcaatcggggattctgctggataggcttacgcctgaatctttggcggacgaaatcgaacgcctcgtcttaaaccccgaagcaaaaaacgcactggcaacggcagctcatcaatgcgtcgccgcccgttttaccatcaaccataccgccgacaaattattggatgcaatataa

SEQ ID NO: 39470 - DNA, 1422 bp, Neisseria meningitidis; identical to SEQ ID NO: 38403

SEQ ID NO: 39471 - DNA, 333 bp, Neisseria meningitidis
atgcagattttatcttttcagccggacattgcggaacgtatgctggaaggtacggaaggcgagtcggtcaacgaaaacgcacaattcgtccgtacggacaacggctattggattgcgtggcatgaaggcgtagcggcactgcttgcgcccgatacgccgccgggcattccctgtttttgggtggaaggcgcggaaagccttgaagagttgtgcgccatggtggaacgcggcgagtttgacgaagtggaagagtttgacggcgatgacgacgaatggctcgaaacggcacagggttgcgggcaccacggcgacgcttgcgcctgcggacattaa

SEQ ID NO: 39472 - DNA, 198 bp, Neisseria meningitidis
atgaaatggaccgacacccggcgtatcgccgaagaactctatgacctgcacggcgaaaccatcgatcccagaaccgtgcgctttacccaactgcgcgacctgattatggcattgcccgaatttgacgacgaccccgcccgttgcggcgaacgcatcctcgaagccgtgcagcaggcatggatagacgaggcggaataa

SEQ ID NO: 39473 - DNA, 534 bp, Neisseria meningitidis
atgtttccccccgacaaaacccttttcctctgtctcagcgcactgctcctcgcctcatgcggcacgacctccggcaaacaccgccaaccgaaacccaaacagacagtccggcaaatccaagccgtccgcatcagccacatcgaccgcacacaaggctcgcaggaactcatgctccacagcctcggactcatcggcacgccctacaaatggggcggcagcagcaccgcaaccggcttcgattgcagcggcatgattcaattcgtttacaaaaacgccctcaacgtcaagctgccgcgcaccgcccgcgacatggcggcggcaagccgcaaaatccccgacagccgccttaaggccggcgacctcgtattcttcaacaccggcggcacacaccgctactcacacgtcggactctatatcggcaacggcgaattcatccatgcccccagcagcggcaaaaccatcaaaaccgaaaaactctccacaccgttttacgccaaaaactacctcggcgcacatactttttttacagaatga

SEQ ID NO: 39474 - DNA, 192 bp, Neisseria meningitidis
ttgccgaaattcggggaatgccctctccccagccctcccccacgggggagggggcaggttgcagcggattttgcggttgcaggcggtttgagaaagaatgcccgaaatatcaacagtgggaatttttcaggcagcctttatcgcaaggcagatgtaacaaacgccgcgagcgttttttcagacgacctttga

SEQ ID NO: 39475 - DNA, 423 bp, Neisseria meningitidis
atgaaaaaacaaatcaccgcagccgtaatgatgctgtctatgattgcccccgcaatggcaaacggcttggacaatcaggcatttgaagaccaagtgttccacacgcgggcagatgcgccgatgcagttggcggagctttctcaaaaggagatgaaggaaactgagggggctgcattatggtttgctcccgtgttggcaggtggtggcagatttgcactgacaggatttactcggcatggtttaaatcaggctatttctcgtggtggtgtgggagtttcaaataaagcgattatgaacactatgcgtaaccctacaaaaattacaagccaatcaggaggaagaacccgttttacaggagctgatggtggtgttgttttgaatagtcaaggtaaagtaattactacatggggcaaacctcgttaa

SEQ ID NO: 39476 - DNA, 612 bp, Neisseria meningitidis
atgaaattacaacaattggctgaagaaaaaatcggcgttctgattgtgttcacgctgcttgtagtcagtgtcggtctgttgattgaagttgtgcccttggcctttaccaaggcggcaacacagccggcgccgggcgtgaagccttacaatgccctgcaggttgccggacgcgatatttacatccgtgagggctgttacaactgccactcgcaaatgattcgtccgttccgtgcggaaaccgagcgttacggtcattactctgttgccggagagtcggtttacgaccatccgttccaatggggttccaaacgtaccggtcctgatttggcacgtgtgggcggccgctattccgacgaatggcaccgtatccacctgctgaatccccgtgatgtcgtgcctgagtccaatatgccggcattcccgtggcttgcacgcaataaagtcgatgtcgatgcaaccgttgccaacatgaaggctttgcgtaaagtaggtactccttacagtgatgaggaaattgcgaaagcgcctgaggctttggcaaacaaatccgagctggatgctgtagtcgcctatctgcaaggattgggtctggctttgaaaaacgtaaggtaa

SEQ ID NO: 39477 - DNA, 852 bp, Neisseria meningitidis
atgaacactttgaaatttaccaaaatgcacggtttgggcaacgattttatggtgattgacgcggtcagtcaggattttacccccgaggacgcgccgattgcggaatgggcggaccgcttccggggcgtgggcttcgaccagcttttggtggtcgggcgttcggaaaccgaaggtgtggatttccgttaccgtattttcaatgccgacggtagcgaggtcgagcaatgcggcaacggagcgcgttgttttgcccgttttgttgcagacaagggtttgaccgataagaaagaaatttgtgttgaaacggcaaatggcgttatttttccgaaattgtccgataacggcatggttacggtcaatatgggcaaaccgaggtttatgccgtctgaaataccgtttgtccccgaatcgggcgagggggatgatgcctgtatttacggggtgcatctcgaatccggcattcagcctgtcagctgcgtcaatatgggcaatccccatgcggtgattgtggtcgatgacgtggaatgcgcgccggtgcgcgaaaccggttcgcttatcgaaccgcacaggcagtttcccgaacgcgtcaatgtcggctttatgcagattgtcagccgaaccgcgattcgtttgcgcgtgttcgagcgcggcgtgggcgaaacccaagcgtgcggtacgggcgcgtgtgcggctgtggtggcgggtatccgtctggggttgttggatgaagggaaaacggtagaggtgattttgccgggcggaactttatatatcgaatgggcctgcggcggcgatgtgatgatgaccggccctgcggaaacggtgtttgaaggcgagttggcgtattcatga

SEQ ID NO: 39478 - DNA, 1170 bp, Neisseria meningitidis
atgagcgaatatctgtttacttccgaatcggtatccgaaggccatccggacaaagttgccgaccaagtatccgacgcgattttggatgccatcttggcgcaagaccccaaagcgcgtgtcgccgcagaaactttggtcaacacaggcttgtgcgtattggcaggcgaaatcaccaccaccgcccaagtggactacatcaaagtcgcacgcgaaaccatcaaacgcatcggctacaactcctccgagctgggctttgatgccaacggctgcgcggtcggcgtgtactacgaccagcaatctccggacatcgcccaaggcgtgaacgaaggcgaaggcattgacttgaaccaaggcgctggcgaccaaggtttgatgttcggctatgcctgcgacgaaaccccgaccctgatgccgtttgccatctattacagccaccgcctgatgcagcgtcaaagcgaattacgcaaagacggcctcctgccttggctgcgtcccgacgcaaaagcccaactgaccgtggtttacgatagcgaatccggcaaagtaaaacgcattgataccgtcgtcctctctacgcaacacgacccggaaatcggttatgaagagttgaaaaacgccgtcattgagcagattatcaagcccgtcctgccgtctgaactgctgaccgacgaaaccaaatacctgatcaacccgaccggccgcttcgtcatcggcggcccgcaaggcgactgcggtttgaccggccgtaaaatcatcgttgatacctacggcggcgcggctccgcacggcggcggcgcgttctccggcaaagacccgtccaaagtggatcgttccgccgcttacgcctgccgctacgttgcgaaaaacatcgtcgccgccggtttggcaacccaatgccaaatccaagtttcctacgccatcggcgttgccgaaccgacttcgatttccatcgacactttcggcacaggcaaaatcagcgaggaaaaactgattaccttagttcgcgaacatttcgacctgcgccccaaaggcatcgtccaaatgctcgatctcttgcgcccgatttacagtaaatccgccgcttacggacatttcggccgcgaagaacctgagttcacttgggagcgcaccgacaaagctgctgcattgagggcggcagcggggctgtaa

SEQ ID NO: 39479 - DNA, 876 bp, Neisseria meningitidis
atggcttacctgttaatcagcatcgtgttcagcgtatcggtttccattttgctgaaaatggcaaggaagaaaaaaatcgacatcgcgcaggcggtcgccgtcaattatgtggtcgcggtcatactgaccctgctggtattgaagccggatgtcggcaatatcggcgcatttttgccgacatggtggctgtttgccgcattgggcgtgctgctgccgtccgtatttgtcattatgggcaaatccgtagaatccgccggtatcgtcaaatccgacgcggcgcagcgtttgtcgctgtttttgccgattgttgccgccttgacgctgtttggcgaaaaactcagcgaaggcaaactgatcgggctgtgcctcgcatttgccgcactgttctgcctgctttggaaacacagcggtggcaaaaaatcaggaagcgcgtggcggcaggcggcattgctgctgggcgtgtgggcaggttacggcattatcgatatcctgttcaaacagcttgccaaaagcggcacggcatttgcgggcaacttgctggttgcatttgtgctggcgggtgtgctgatgtttgcctgcctgtttgccaaatcggtcagatggcgtgttgagagtgtggttggcggcatattcttgggcggtttgaattttatgaatatcgtaacctacatcaccgcgcaccaaatgatgaaggataatccgaccttggtttttgccggtatgaatatcggcgtgattgttttgggtacgctttcgggcgcattgttctttaaggaaaaaatcaacacaatcaatacggcgggaatcgtgttggcactgtgttctatcgcctgcctgttttattgggcggaggtcaaggtactgttcggcatataa

SEQ ID NO: 39480 - DNA, 486 bp, Neisseria meningitidis
ttgttgattcaatcggcattatgttttgaggcggaagcccatgaatatactaatattcaagagatggaatgggtgtctttattttctgatccgcaaagagacgatgatagtcttataacccttaaagatgaaaaaatcactgtaaaaaactatattgtgccttggtggaaaaaaggtgaaaactttagaaaattagaacttattacccctggtaaaaatgataatggaaatttaacggtaaatggaatttacggcatccaatcttttgcagacccgcaattaggatatacgcctgaattatcggtgaaaagcaataatgatattctatttaaaaataatctccaatctgttgacgtgaagccccattccggaaatatccatttggatgccaaaggaaaaattcaatttaatttgaatgttcccgatgttgatggggtacaagatgtagccagtggaaaaaaataccgacaaacaatagtgccttag

SEQ ID NO: 39481 - DNA, 864 bp, Neisseria meningitidis
atgttcgagccgctgtggaacaataaatacatcgaaagcgtgcagttgaccatcgccgagcagttgggcgtggaagagcgcggcgagttttacgacattaccggcgcgttgcgcgatatggtgcaaaaccatttgatgcagatgctgtgcatgactgcgatggaagcccccgccagcttggatgccgacgcggtgcgcgatgaaaaagtcaaagtcatcaagtcattgaagccgctgaccgtcgagtctgtcaatgaaaacgtcgtgcgcggacaatataccgccgccagaggcatgaacggctatcttgaagaaatcaacgttccgcaagacagctttaccgaaacctacgtcgccattaaagccgaaatcgaaaacgaacgctggaagggcgttcccttctacctgcgtaccggcaaacgcatggcgggcaaagtggcggaaatcgttttgaacttcaaagatttgaacagccatatttttgaaggcagtcgcaccgcgcccaaccggctcgttatcgagttgcaaccatatgaatccgtgcgcctctatacgcagatgaaaaccccgggggcaggaaataaggtcgaaaccgtgccgctggcaaccgatttgggcaaagcattggaaagccgccgcgcggaagcttacgagcgcctgctgctggatgtgattaacggcaaactcgctttgtttaaccgccgcgacgaacttgaagccgcgtgggaatatgtgatgccgattttggaaaactggacaaataacaccacgccgccgcacggctacggcgcacactcgtgggggcctgaagccgcgcgcgaactattggcgcgcgacggacacaagtggcacgaagagcagtaa

SEQ ID NO: 39482 - DNA, 492 bp, Neisseria meningitidis
atgaattccctctttgtggacaatactgttttcattacacggctgaaagccgggcatatcggcaggttggttcaggcgttgtttgaggagtggcacggatttgaaccgtggtcttctgtggataagattcgtgcctattacggcagatgtttgaaagatgacgaactgccgctggcttttgcggctgtggatgatttcggaaccctgttgggttcggctgcggtcaagcggcatgatatggaaagttttccacagtatgaatattggttgggtgatgtctttgttttacctgaatatcgcggaaaaggcattggcaggaggctggtcgcccactgcataggcgcagcgcgttcgctggggataaagttcttgtatctttatacgcctgatgtgcaaatattttatgaatcattcggctgggcggttgtcgggcgacatttccataacggcgaatgggttacggttatgcgtttggatatggataaggtttaa

SEQ ID NO: 39483 - DNA, 825 bp, Neisseria meningitidis
atgaaatggctcttcacccttttggcggtactcaatattgccgtattcggcggcacggtgggctataaattggccgttaaagcgacgggcggcgtgccggaaaaccgggccgtcgaaaacacgccccccgcaacgcccgccgccgacaatgcggcggcatccgtggaggatacggcggcactgctcaaaccgggcgacatcctgaccgaagaacaggcggagcagttgcgcttgaagaaagaagcggaacagaaaaaactgaaagagaaaaaacagcgtgaagaaaaagcccgccgcgaaaaactcgccgccgaaaaggcgcaggcggaacgcgaaaacggcgcggcggatgccttatgcgccgcgcaggcaagcctcacgatggacgaagacgactaccaccgcatcaaagggcttttgggcaaatggtcgcacgttgccagcaggagcgtcgaaaaacgcaccgccaaagccaaacctgccgacaaaacctaccgcgtcgtcctgcccgtttccgccgatgccgaaaatcaggcggcggagctgtctgccaaaggtttcaaccccataccgtttgacggcgcattgagtttgggtgtcggcaacagtcgggaaaacgcccaagccctgcaaaaccggcttgccggcgccggattcggcggggcgcatattgtcgaacactttgccgaagccgacaggcaggacgattctttgagcgtgtcgcgtatgacggttttgtttaccggcgtgaatgccgccgatgcggacgaaatccgtaaaatcacgtccctatacggcaaactgaacctcaagtcttgcaaatag

SEQ ID NO: 39484 - DNA, 738 bp, Neisseria meningitidis
atgattattttggacaaggtttccaagcattaccaaacgcgcgacaagacccgttttgccgctgtcgagccgaccagcctcgaaatccgcgacggtgaaatcttcgggctgatgggttattcgggtgcaggcaaatccaccctgttgcgcctgattaacctgttggaacgtcccgacagcggcaaggtcaacgtctgcggacaagagctgaccgcgctcgatgccgccgcattgcgtcaggctcggcagaatatcggcatggtgtttcagcagttcaacctgttgaacaaccgcaccgtcgccggcaacgtcgccttcccattggaaatcgccggatggccgtctgaaaaaatcgaagcgcgcgttgccgaatgtctcgaaatcgtcggactgaccgaacgcgccggtcactatcccgcccagctttccggcggacaaaaacagcgcgtcggcatcgcccgcgcgctcgcatccaagccgcaagtcatcctcgccgacgaacccacttccgccctcgaccccgccaccacgcgcagcgtcttggaatgtttggaagacatcaacaaacgcttcaacgtaaccatcgtcatcgtaacccacgaaatgagcgtcatcagacgactgtgcgaccgcgccgccctgttggataagggaaaagtcgtcgaaatcgtcgaagtacgcggcaaccaaatccacgcccgatccgacatcgggcgcgaactcatcagagaggactga

SEQ ID NO: 39485 - DNA, 273 bp, Neisseria meningitidis; identical to SEQ ID NO: 36489

SEQ ID NO: 39486 - DNA, 282 bp, Neisseria meningitidis
atgaacacaataccgctccacaccatactcaaacttatggcgcatcccgaacgtatggcgatactgatccaactgttggacagcgaacgcaatatcgccgaactggcaaaatccttatccctgccggccaccgccgtttccggccatttgagccgactgcgcgtggaaggtctggtggactttacgcgttaccaccgcattatcgaataccgcctgatttccgaagacgcggcaacgattctgcggacaatccgcgatttggaaaacaaacgcgcggtatag

SEQ ID NO: 39487 - DNA, 750 bp, Neisseria meningitidis; identical to SEQ ID NO: 36645

SEQ ID NO: 39488 - DNA, 864 bp, Neisseria meningitidis
gtggaaaatgttgaaacacatagccaaaaccaccgcaagcgattgattggcacattttttctggtcggactggaaaaccttttgatgctggtgtatccggtgtttggcggctgggcgattaatgccgtgattgcggggcaggcgtggcaggcgttgctgtacgctttggttgtgcttttgatgtggctggtcggtgcggcgcggcggattgccgatacgcgcacgtttacgcggatttataccgaaatcgccgtgccggttgtgttggaacagcggcagcggcaagtcccgcattcggcggtaactgcgcgggttgccctgtcgcgtgagtttgtcagcttttttgaagaacacctgccgattgccgcgacatccgtcgtatccatattcggcgcgtgcatcatgctgctggtgctggaattttgggtcggcgtgtcggcggtgggcatacttgcgttgtttttatggcttttgccacgttttgccgccatcagcgaaaacctgtatttccgcctgaagaacagcttggaacgcgacaaccactttatccgaaaaggcgacgagcggcagctggaccgccattacggactgcttgcgcgcctgcgtgtgctgatttccaaccgcgaagccttcggctatctctgcgtcggcacggcgatgggtattttgttcggctttgcttttgtgatgatgacgctcaaaggctacagcagcgcggggcatgtctattcggtcggcacttatctgtggatgtttgccatgagtttggacgacgtgccgcgattggtcgaacaatattccaatttgaaagacatcggacaacggatagagtggtcgaaacggaacatcaaagccggaacttga

SEQ ID NO: 39489 - DNA, 771 bp, Neisseria meningitidis
atggaacccgaacgcctgcaaaaagtgcttgccgcgtccggcgtcggctcgcgccgcgaaatggaagaatggattaccaacggctggataacggtcaacggcaaaaccgctcaactgggcgacaaagtcacccccgacgaccacgttaccgtcaaaggcagcatcatcaaactcaaatgggccgaccgcctgccgcgcatcatcctatattacaaacaagaaggcgaaatcgtttcccgcgacgacccgcaaggccgcgtcagcatattcgaccgcctgccgcaggccgccagcagccgctgggtcgccatcggacgcttggacatcaacaccagcggacttctgattctcaccacctccggcgaactcgtccaacgtttcgcccaccccagcttcgaagtcgaacgcgaatacgccgtgcgcgtactgggcgggctgaccggcgaacaaatgcgcgtcctcaccgaagaaggcgtgatgctcgaagacggcttggcaaaagtcgaacgcatccgcgaacaaggcggcgaaggcgcgaacaaatggtacaacgtcgtgattaaagaaggccgcaaccgcgaagtgcgccgcatttttgaaagccaaggactcaccgtcagccgcctcgtgcgcatcggcttcggtcccatcggactgcccaaccgcctcaaacgcgggcagttctacgaactcaaccccgccgaagtcgccaacatcatcaaatgggcggacatgctgctgccgggcgaacgccgccgcaaaaaagcctaa

SEQ ID NO: 39490 - DNA, 1788 bp, Neisseria meningitidis
atgagcttagttgaattgaaagtgcccgacattggcggacacgaaaatgtagatattatcgcggttgaagtgaatgtgggcgataccatcgccgttgacgacaccctgattaccttggaaaccgacaaagcgacgatggacgtgcctgccgaagttgcgggcgtggtcaaagaagtgaaagtcaaagtcggcgacaaaatctccgaaggcggcttgattgtagtcgttgaagccgaaggcgcggctgcctctcctaaagccgaagcacctgttgctgcccctgcgcaagaagcacccaaagctgccgctcccgctccgcaagccgcgcaattcggcggttctgccgatgccgagtacgacgtggtcgtattgggcggcggtcccggcggttactccgctgcatttgctgctgccgatgaaggcttgaaagtcgccatcgtcgaacgttataaaaccttgggcggcgtttgcctgaacgtcggctgtatcccttccaaagccctgttgcacaatgccgccgttatcgacgaagtgcgccacttggctgccaacggtatcaaataccccgagccggaactcgacatcgatatgcttcgcgcctacaaagacggcgtggtttcccgcctcacgggcggtttggcaggtatggcgaaaagccgtaaagtggacgttatccaaggcgacgggcaattcttagattcgcaccacttggaagtgtcgctgactgccggcgacgcgtacgaacaggcagcccctaccggcgagaaaaaaatcgttgccttcaaaaactgtatcattgcagcaggcagccgcgttaccaaactgcctttcattcctgaagatccgcgcatcatcgattccagcggcgcattggcactgaaagaagtaccgggcaaactgctgattatcggcggcggtattatcggtctcgagatgggtacggtttacagcacgctgggttcgcgtttggatgtggttgaaatgatggacggcctgatgcaaggcgcagaccgcgacttggtgaaagtatggcaaaaacaaaacgaataccgttttgacaacatcatgatcaacaccaaaaccgttgcagtcgagccgaaagaagacggcgtttacgttacctttgaaggcgcgaacgcgcctaaagagccgcaacgctacgatgccgtattggttgccgccggccgtgcgcccaacggcaaactcatcagcgcggaaaaagcaggcgttgccgttaccgatcgcggcttcatcgaagtggacaaacaaatgcgtaccaatgtgccgcacatctacgccatcggcgacatcgtcggtcagccgatgttggcgcacaaagccgttcacgaaggccacgttgccgccgaaaactgcgccggccacaaagcctacttcgacgcgcgcgtgattccgggcgttgcctacacttcccccgaagtggcgtgggtgggcgaaaccgagttgtccgccaaagcctccggccgcaaaatcaccaaagccaacttcccgtgggcggcttccggccgtgcgattgccaacggttgcgacaacggctttaccaagctgattttcgatgccgaaaccggccgcatcatcggcggcggcattgtcggtccgaacggtggcgacatgatcggcgaagtctgccttgccatcgaaatgggctgcgacgcggcagacatcggcaaaaccatccacccgcacccgaccttgggcgaatccatcggtatggcggcggaagtggcattgggtacttgtaccgacctgcctccgcaaaagaaaaaataa

SEQ ID NO: 39491 - DNA, 456 bp, Neisseria meningitidis
atgaaaaaaccgaaaatcctttttgtctgcctcggcaacatctgccgttcgccgatggcggaatacattttgcgccgccgcgccgccgaagcgggcattccccttgaagcggacagcgcggggacatcgggctggcacgacggcgaagatatgcaccgcgagacggcaaagatattgaaaaaacacggtatcgatgcttcaggctttaccagccgcaaaatccgccaaagcgatgcggcggcgtttgactgcatcatcgcgatggacggcaagaatttgtccgaattggaaagaaccttcggcaggcggccggaaaaaatattcaagctgaccgacctgatacccgaaagcggttacgaccatgtccccgatccgtggtatacgggcgattttgaagaaaccttcaggcttgcggatgcgggctgtcgggcattgttggaaaagatttccaaataa

SEQ ID NO: 39492 - DNA, 1212 bp, Neisseria meningitidis
atgattattgatgtaaaagtacctatgctgtctgaaagcgtatctgaaggcacgctcttggaatggaagaaaaaagttggcgaagcagttgcccgtgacgaaatcctgatcgatatcgaaacggacaaagtggttttggaagtaccttctccacaagccggcgtattggttgaaatcgtagcgcaagacggtgaaaccgttgttgccgaccaagttttggcacgtatcgataccgctgctactgccgctgctgaagcacctgccgctgctactgccgctgctgaagcacctgccgccgctcctgccgaagctgccccggccgccgctcctgctgctgcacaaaacaacgccgctatgcctgccgccgccaaactggctgcagagagcggtgttgacgtgaacgcattgcaaggttccggccgtgacggtcgcgtattgaaagaagacgtacaaaatgccgcagccaaacctgccgcagccgctgctcctgccgttgcacttcctgccggcgcacgtcctgaagaacgcgtaccgatgagccgcctgcgtgcccgtgttgcagaacgcctcttggcttctcaacaagaaaacgccattctgactacattcaacgaagtcaacatgaaaccaatcatggacttgcgtgcgaagtacaaagaaaaattcgagaaagaacacggcgtgaaactgggctttatgtccttcttcgttaaagccgctgttgcagccctgaaaaaatacccggttgtgaatgcttctgttgacggcaaagacattgtgtaccacggctacttcgacatcggtatcgcgattggcagcccacgcggtttggttgtgccaatcctgcgcgatgccgaccaaatgagcattgccgacatcgaacaagcaattgttgattacgcgaaaaaagccaaagacggcaaaatcgctatcgaagatctgaccggcggtacattcagtattaccaacggcggtactttcggttctatgatgtccaccccgatcatcaatccgcctcaatctgcgattttgggtatgcacgccactaaagagcgcgctgtggttgaaaacggccaagttgttgtccgtccaatgatgtatctggctctgtcttacgaccaccgtatcattgacggccgcgaagctgtattgaccttggtagccattaaagacgcgttggaagacccagcccgcctgttgttggatctgtaa

SEQ ID NO: 39493 - DNA, 840 bp, Neisseria meningitidis
ttggggaattttgcaaaggtctcaaattgtgaattctgggataaaattaattataatcgggctgcccaagccgccgagcagcgggcaaagcaggcgcaggaaacaccgaaagagccgccgaaacaggaagagcactttatcgccaagctgccgaacgacaagctaatgacgatatacaggctgtttcaaaaacaactggacgacatgcgcggcttggagcgcgatatagaacgcggagattggtacatcaatgcgcgataccgcatgaacgaaaaccgaaacaaaataagggcgctggaagacgacaacaaacggctgcatcacgactattgggcagtccaagaccaaggcgaaaaccgctttttcggcatgggtaaaatcggcgcaaaactggttaaggaaaacgagaagcagcaacacatcaacgaacggcatggagcgaacgtgcgagaaatccggcggctgaaaacagaaaacgaaaaactggaagggcagtatagcgacaagttggccgccgacgtggtcaaagtacgcgacaggtttaacgaagaactggacaatgtccgcagggaaatcggcaaacggccgatggaagaattcaggaacgtatttttgcaggcagcccaagaagcacagacgacaatagggcagaaggcggttcaaatcgaactggaaaaattccccctgaacggcagcccttcggccaagcgaatcgcgttttatttcggcgcgcagcggataagggaagtagagcagaaggagcgggaagaccagcgcaaagagcaggagcggcaggcgcggcgtatggagcgggacgacggccacggcatcggcatgtag

SEQ ID NO: 39494 - DNA, 1227 bp, Neisseria meningitidis
atgacctttttacaacgtttgcaaggtttggcagacaataaaatctgtgcgtttgcatggttcgtcgtccgccgctttgatgaagaacgcgtaccgcaggcggcggcaagcatgacgtttacgacgctgctggcactcgtccccgtgctgaccgtgatggtggcggtcgcttcgattttccccgtgttcgaccgctggtcggattcgttcgtctccttcgtcaaccaaaccattgtgccgcagggcgcggacatggtgttcgactatatcaatgcgttccgcgagcaggcgaaccggctgacggcaatcggcagcgtgatgctggtcgttacctcgctgatgctgattcggacgatagacaatacgttcaaccgcatctggcgggtcaattcccagcgtccgtggatgatgcagtttctcgtctattgggctttactgacgttcgggccgctgtctttgggcgtgggcatttcctttatggtcggctcggtacaggatgccgcgcttgcctcaggtgcgccgcagtggtcgggcgcgttgcgaacggcggcgacgctgaccttcatgacgcttttgctgtgggggctgtaccgcttcgtgccaaaccgcttcgttcccgcgcggcaggcgtttgtcggggctttggcaacagcgttttgtctggaaaccgcgcgctccctcttcacttggtatatgggcaatttcgacggctaccgctcgatttacggcgcgtttgccgccgtgccgttttttctgttgtggctgaacctgttgtggacgctggtcttgggcggcgcggtgctgacttcttcactctcctactggcagggagaagcgttccgcaggggcttcgattcgcgcggacggtttgacgacgtgttgaaaatcctgctgcttctggatgcggcgcaaaaagaaggcaaagccttgcctgttcaggagttcagacggcatatcaatatgggctacgacgagttgggcgagcttttggaaaagctggcgcggtacggctatatctattccggcagacagggttgggtgttgaaaacgggggcggattcgattgagttgaacgaactcttcaagctcttcgtttaccgtccgttgcctgtggaaagggatcatgtgaaccaagctgtcgatgcagtaatgatgccgtgtttgcagactttgaacatgacgctggcagagtttgacgctcaggcgaaaaaacagcagcaatcttga

SEQ ID NO: 39495 - DNA, 618 bp, Neisseria meningitidis
atgtccgcttatcgaaaaggcaacatctttatcatttcggccgcttccggcacgggcaaaaccacgctggtgtcgcggctgttggcaaaccataacggtttgcgcgtttccgtgtcgcacacgacgcgcccgccgcgtgaaggcgaagcaaacggcgtacattatcactttgtttccaaagaagagtttgagtcgcttatcgcacaggaggcttttttggaatacgcagacgtattcggcaactattacggcacaagcgcggagggcgtgaatgcgttggcggcggcaggttatgacgtgattttggaaatcgacgttcagggcgcggcgcaggttcgagatgcgctgcctgaagctgtcggcatctttatcctgccgccgtctttcgatgtgcttgccgcgcgtctcaacggacgcgggacggacagtcaggaagttatccaaaggaggcttgcgaaggcaaggcatgaaatcgaacagtccgtattgttcgactttgtcgtggtcaatgatgacttggcgcgggcggaggaggatttgcgccatattgtgaatgcctgccgtctgaaaaggtcgcggcaactgggatttattgcagatttgttggaaaattcctaa

SEQ ID NO: 39496 - DNA, 630 bp, Neisseria meningitidis
atggcagcccatctcgaagaacaacaagagttagacaactttaaatatttttggaaaaccacgggcaaatggctgtttgccgtgctgattttggcggcgctcggctacttgggatacacggtttaccaaaaccgtgcggcttcccaaaatcaggaagccgctgccatattggcagaaatcgtagaaaaggcgcaaaacaaagccccgcaaagcgaaatcaatgccgaattgaccaaactccaacaaagctacccgcattccatttccgccgcccaagccacgctgatggcggcggcaaccgaatttgacgcgcagcgttacgatgttgctgaaggccatttgaaatgggtgttgtccaaccaaaaagacagcctgattcaagcgttggcggcacagcgtctgggcgttgtgttgttgcaacaaaaaaaatacgatgccgcacttgccgcgctcgacacgccggttgaagcggacttcgcccccctgctgatggaaaccaaaggcgatgtctatgccgcacagggaaaaagccaggaagccttaaaaaactacggacaggctttagaaaaaatgcctcaagattctgtcggtcgcgaattggttcaaatgaaacttgattcgctgaaataa

SEQ ID NO: 39497 - DNA, 474 bp, Neisseria meningitidis; identical to SEQ ID NO: 38731

SEQ ID NO: 39498 - DNA, 1134 bp, Neisseria meningitidis; identical to SEQ ID NO: 38916

SEQ ID NO: 39499 - DNA, 807 bp, Neisseria meningitidis
atgtggcattgggacattatcttaatcctgcttgccgtaggcagtgcggcaggttttattgccggtctgttcggcgtaggcggcggcacgctgattgtccctgtcgttttatgggtacttgatttgcagggtttggcacaacatccttacgcgcaacacctcgccgtcggcacatccttcgccgtcatggtcttcaccgccttttccagtatgttggggcagcacaaaaaacaggcggtcgactggaaaaccgtatttgcgatgatgccgggtatgatattcggcgtattcacgggcgcactctccgcaaaatatatccccgcgttcgggcttcaaattttcttcatcctgtttttaaccgccgtcgcattcaaaacactgcataccgaccctcagacggcatcccgcccgctgcccggactgcccggactgactgcggtttccacactgttcggcacaatgtcgagctgggtcggcataggcggcggttcactttccgtccccttcttaatccactgcggcttccccgcccataaagccatcggcacatcatccggccttgcctggccgattgcactctccggcgcaatatcgtatctgctcaacggcctgaatattgcaggattgcccgaagggtcactgggcttcctttacctgcccgccgtcgccgtcctcagcgcggcaaccattgcctttgccccgctcggtgtcaaaaccgcccacaaactttcttctgccaaactcaaaaaatccttcggcattatgttgcttttgattgccggaaaaatgctgtacaacctgctttaa

SEQ ID NO: 39500 - DNA, 687 bp, Neisseria meningitidis; identical to SEQ ID NO: 38997

SEQ ID NO: 39501 - DNA, 390 bp, Neisseria meningitidis
atgtccaaaaccatcatccacaccgacaaagcccccgccgccatcggcgcgtacagccaagccgtccgagcaggcgacaccgtttacatgagcggtcaaatccccctcgatcccgccacgatgaccgtcgtcggcaacggcgatttccgcgccgaagcgcgccaagtgttccaaaacctgcaagccgtcgccgaagcggcaggcggcacgctggccgacatcgtcaaactcaacgcctacctgaccgacttgggcaattttgccgtcttcaacgaagtcatggcggaatttatcgccgagcccttccccgcccgcgccgccgtcggcgttgcctcgctgcccaaaggcgtgcaggtcgaagccgaagccgtcctcgttttgaacgcataa

SEQ ID NO: 39502 - DNA, 2526 bp, Neisseria meningitidis
atgaatccaaactcaaaacataacactaactttaccaatcttcttaaaccgtctgatagtgatataaaacaatttgccgcacaacacatccgccacctcaccgacctgctcaaccgctatgcctacgaatactacaccctcgacgcgcccagcgtacccgatgccgaatacgacaaattattccgcgagctcgaagcgttggaacgaaaccatcccgagctcaaactgcccgacagtccgacccagcgcgtcggcggcgagcctttagcgggatttgccgaagtacgccacgaagtgccgatgctgtcgctgaccaacgctttttccccgcaagatgaaaacggcgtgttcgaccatgccgaaatgtacgctttcgaccaacgcgtgcgcgacggtttggacggcggcaatcccgaatacgttatcgaacctaaattcgacggcctcgccatcagcctgctctatcgcgacggcgtattgattcaagcagcaacgcgcggcgacggcacgacgggcgaagacgttacccaaaacatcaaaaccgtatccaacatccccttgcggctgcacggcgaaaatacgcccgaactcatcgaagtacgcggcgaagtactgatgcaaaaagccgattttgccgccctcaataaaagacaagccgaaaacgggcaaaaaccctttgccaatccgcgcaacgccgccgccggcagcctacgccaactcgattcgcgcatcaccgcgcagcgcaaactgcactttttcccctactccgttgcccgccagcaaggcggtttcgtcgcggaagaacacatccaagaactcgcctatttccaagcactcggcttcagtctgcccaatggcaatttcggctgtttcaaaaatatcgacgaagtattggcgttttacggacacatgcagcaaaaacgccccgaactgccctacgaaatcgacggcatggtcgtcaaagtcaacagcttggcgcaacagcacgaactcggcttcatctcccgcgcgccgcgttgggcggttgcccacaaattccctgccgaagaagccctgaccattgtcgaagcgattgacgtgcaaatcggcaggacgggcgcggtaacgccggttgcccgattacaacccgtattcgtcggcggcgtaaccgttaccaacgccaccctgcacaatcaggacgaagtatcgcgtaaagacgtgcgcgtcggcgataccgtcgtcgtgcgccgcgctggagacgtgattcccgaagtcgtgcgtgtgatttttgaacgccgcccgatgcaggaaaccgccgttgctgtttcagacggcatcgggcatcggcaggacgatttgtttgccgaagcaccggctgcaaaccaaacccaatccgttccgctctacaagccctaccgcctgccgacccattgccccatctgccgcagcgaaatcgaacgcgaagaaggcgaagccgtcgcccgatgcagcggcggtatgctttgtcaggcacaacgcgcgcaaggcttaatccacttcgcctcgcgcaaagccatggacatcgacggcttgggtgaaaaacaaatcgaacagctggtcgcccaagacctcgtcctccacttcgccgacctctaccgcctcgatattccgaccctgcaaaaaatgaaggaaacggcggacaaaaccgttgccgaatcggatcaaatgccgtctgaaggcagttcggtcggcgcgtcgggcaaacataaaaaacaaccggtcaagtgggcggaaaacatcctcgcaggcatagaatccggcaaaacgcccgaactcgcgcgcttcctgttcgcgctcggcatccgccacgtcggcgaacgcaccgccaaaacgctggcacaggcattcggcacattggaacgcgtccgccgcgcacccgaacccgtcctcgcctgcctgcccgacatcggtacggtagtggcgcgttccattgcccacttcttcgcccaagccgaacagcaggcgatgatagacgaactgctcgccgcaggcgttgccccgcaaacccaagccgttaccatcccgcccgcccgccacgccgaaccgcaacgctggatcgcccgcctgcccgacttcaaaattagcgaaaacaaagcccaagccttatgggaactcgctggtaaaaacatagaaggtctacaaaacgacaaagccctccccgccgactggcaagcatggcgcagcgaaccacaaaacgccgccctactcgaaaacctgaaaaccttcttcgcgcaaatgccgtctgaagacgaggcggcgcaaggttcagacggcatcaataaagccgtagcgggcaaaaccttcgtgttaactggcacactgcccaccctcaaacgcgaccaagcccaatccctaatcgaagccgcaggcggcaaagtttccggcagcgtttccaaaaaaaccgattacgtcgtcgctggagaagccgcgggcagcaagctggaaaaagccaatgccttgggtgtttccatcctcagcgaagccgaactgcttaccctgctcggctga

SEQ ID NO: 39503 - DNA, 1383 bp, Neisseria meningitidis
  misc_feature 6, 7, 8, 9, 10: 'n' is a, c, g or t
gtgtgnnnnnacaccaaagacgacggcagcgtcagtatgctgctgcccgactttgtccaactggttcaaagcgaaggcccggcagtcgtcaatattcaggcagcccccgccccgcgcacccaaaacggcagcggcaatgccgaaaccgattccgacccgcttgccgacagcgacccgttctacgaatttttcaaacgcctcgtcccgaacatgcccgaaatcccccaagaagaagcagatgacggcggattgaacttcggttcgggcttcatcatcagcaaagacggctatattctgaccaatacgcacgtcgttaccggcatgggcagtatcaaagtcctgctcaacgacaagcgcgaatataccgccaaactcatcggttcggatgtccaatccgatgtcgcccttctgaaaatcgacgcaacggaagagctgcccgtcgtcaaaatcggcaatcccaaagatttgaaaccgggcgaatgggtcgccgccatcggcgcgcccttcggcttcgacaacagcgtgaccgccggcatcgtgtccgccaaaggcagaagcctgcccaacgaaagctacacacccttcatccaaaccgacgttgccatcaatccgggcaactccggcggcccgctgttcaacttaaaaggacaggtcgtcggcatcaactcgcaaatatacagccgcagcggcggattcatgggcatttccttcgccatcccgattgacgttgccatgaatgtcgccgaacagctgaaaaacaccggcaaagtccaacgcggacaactgggcgtgattattcaagaagtatcctacggtttggcacaatcgttcggtttggacaaagccggcggcgcactgattgccaaaatcctgcccggcagccccgcagaacgtgccggcctgcaggcgggcgacatcgtcctcagcctcgacggcggagaaatacgttcttccggcgaccttcccgttatggtcggcgccattacgccgggaaaagaagtcagcctcggcgtatggcgcaaaggcgaagaaatcacaatcaaagtcaagctgggcaacgccgccgagcatatcggcgcatcatccaaaacagatgaagccccctacaccgaacagcaatccggtacgttctcggtcgaatccgcaggcattacccttcagacacataccgacagcagcggcggacacctcgtcgtcgtacgggtttccgacgcggcagaacgcgcaggcttgaggcgcggcgacgaaattcttgccgtcgggcaagtccccgtcaatgacgaagccggtttccgcaaagctatggacaaggcaggcaaaaacgtccccctgctgatcatgcgccgtggcaacacgctgtttatcgcattaaacctgcaataa

SEQ ID NO: 39504 - DNA, 678 bp, Neisseria meningitidis
atgcaagctgattttaaccgtcccgtcctcgccgtcgataccggtacttcccatttgtcgctcgcgctgcgcgccgacggcgaaacccacctgttccatcaagaggccggcagccgccaatccgaactgatcctgccggaaatccgcactctattccgaaatgcgggcattaccgccgccgatttgggggcgattgtttatacgaaaggtcccggcgcgtttaccggactgcgtatcggcatcggtgtggcgcaaggtttggcaacgccgtttgatacccctttaatcggcatccccacgctcgatgccgccgcctcgctgccgccgccgcaaagctgcatactcgccgctgcggacgcgcgtatgggcgaagtgttttatgcgtggttcgacacgctgaaccgccgccgtttgagcgattatcaggtcgggcgggcggcagacatccggctgccggagggatgtgccttttcagacggcataggcagcgcgttcgcgttggaagaaacgccgccgttttcaggcaaacccgatatgccgaccgccgccgacttcctcaatctggcggcggaaggcggttttcccgccgtcgctgctgcacactccgaactgctctacgtccgcaacaaaatcgccctaaccgccaaagaacaggcggaacggaaagcccgaacatga

SEQ ID NO: 39505 - DNA, 396 bp, Neisseria meningitidis
  misc_feature 381, 382, 383, 384, 385: 'n' is a, c, g or t
atgacagcccttttttacctgccttttccgtggttcgcggaggaaacgattaatctcaccgccgccgtcatttttgccgttgccgccttaaccgactggtttgacggatttttggcaagactgtggaaacagacttccgatttcggcgccttcctcgatcccgtcgccgacaagctgatggttgccgtatcgctacttttactggtcaaactcgaccggacctatgttttgtttgccatgatcattatcggcagggaaattaccatttccgcattgcgcgaatggatggcgcaaatgggcaaaaggaacagcgttgccgtcgccaccgtcggtaagttcaaaaccgccgcgcaaatgctggcaattttcctgctgctgctnnnnncacacacttaa

SEQ ID NO: 39506 - DNA, 915 bp, Neisseria meningitidis
atgaaacaaatcaatcatacattgcaacaaaaactggctgaatttaaaaccaaatcaggcatgaaccaaacccaactggcacgcggtatcggtacttcgccggcatccatcagtatgtatctgaacggcacttatgcggaaaaaggcggcaattatgaaaccatcgagccgaaaatcgaggcgtttttggagatgcaggacagtaaggcgcgacgtgaagagctggtgttgggatttgtatcgactaagacgacacgccgaatcgtggaagcgatgcgcaatgcgcacgaaggcggcgagatttccgttatctacggtcaggcgggtttgggcaagacgcaggcggtcaaaaactactgcgagaaaaaccctgcagccatcttgattgaggctaatccgagctttacggctttggtcttgatgcgcaagttggcgacggcggcgaaggtatcggcgatgggcagcttgaatgatttgtttgaatcggtatcggacagattgcgtgattcaggccatctgattgtggtcgatgaagcggaaaacctgccattacgcgcccttgagattatccgccgactgcacgatgagactggctgcggtttggtgttgagcggtatgccccgactggtggcgaatttgcgcggtaagtatggcgagttggtacagcttcacagtcgtgtggcgggtgcgctgaatctaggtgatacgatgcccgacgcagagttggaacagattgcgcgggcaaccctacccgaagccgatgatgaaacgattgcggaactggttaagcatagcaatggtaatacacggcgtatgagcaagttgatgcgcggatcagtacgggtagcgaataaaaacggtattcgaatgcaagcgggaatcgtgaaaaaatattcgacattgattatccgatag

SEQ ID NO: 39507 - DNA, 2880 bp, Neisseria meningitidis
atgagtaacacaaccgtagaacaatttgccgccgagctgaaacgccccgtcgaagacctgttgaaacagttgaaagaagccggcgtcagcaaaaacagcggcagcgattccctgacgctggacgacaaacagcttctgaacgcctacctgaccaagaaaaacggcagcaacggcggcaccatcagcatccgccgcaccaaaaccgaagtcagcaccgttgacggcgtaaaagtcgaaacacgcaaacgcggacgcactgtcaacattccttctgccgaagaattggcagcacaggtaaaagccgcccaaacccaagccgcacctgtccggccggagcagacggcagaagacgcggcaaaagcccgagccgaagctgccgcacgtgcagaagcccgtgccaaggcagaagcggaagcggcaaaactgaaagcggcaaaagcaggcaacaaagccaaacctgccgcgcagaaacccaccgaagcaaaagccgaaaccgcacccgttgcggcggaaaccaaacccgccgaagaaagcaaagcgggaaaagcccaagccgacaaaatgccgtctaaaaaacccgccgagcccaaagaaaaagccgccaagccgaaacacgagcgaaacggcaaaggcaaagatgccaaaaaaccggcgaaacctgccgtgccgcaacccgtggtcagcgcggaagaacaggcgcaacgcgatgaagaagcacgccgtgccgccgcacttcgcgcccaccaggaagccctgttgaaagagaaacaggaacgccaggcacgccgcgaagccatgaaacaacaggcagaacaacaggcaaaagccgcacaggaagccaaaaccggcagacagcgtcccgccaaacctgccgagaaaccgcaggcagccgcgccggccgtcgaaaacaagcctgtcaatccggcaaaagcgaaaaaagaagaccgccgcaaccgcgatgacgaaggtcaaggccgcaacgccaaaggcaaaggcggaaaaggcgggcgcgaccgcaacaatgcacgcaacggcgacgacgagcgcgtacgcggcagcaaaaaaggcaaaaaactcaaactcgagccgaatcaacacgccttccaagcaccgaccgaacctgtcgtacacgaagttttggtgcctgaaaccattaccgttgccgatttggcgcacaaaatggcggtcaaaggcgtggaagtggtcaaagccctgatgaagatgggcatgatggttaccatcaaccaatccatcgaccaagacaccgccctgattgtcgtcgaagaactcggacacatcggcaaacccgccgcagcggacgaccccgaagccttcttggacgagggtgcggaagcagtggaagccgaagcattgccgcgtccgcccgttgttaccgtgatgggtcacgtcgaccacggcaaaacctcgctgctggactacatccgccgtaccaaagtggtacagggcgaagcgggcggcattacgcagcacatcggcgcgtaccacgttgaaacccctcgcggcgtgattaccttcttggacaccccgggtcacgaagcctttaccgctatgcgcgcacgcggtgcgaaagcaaccgacatcgtgattcttgtggtcgccgccgacgacggtgtgatgccgcaaaccatcgaagcgattgcccacgccaaagcggcaggcgtaccgatggtggttgccgtcaacaaaatcgataaagaagccgccaacccagagcgtatccgccaagagctgaccgcacacgaagtcgtgcctgacgaatggggcggcgatgtacagtttatcgacgtttccgctaaaaaaggcctgcacatcgatgcattgctcgaggcagtcttgctcgaagccgaagttttggaactgaccgcacctgtcgatgcgcccgccaaaggcatcatcgtcgaggcgcgcttggacaaaggccgcggcgcggttgccacattgctggttcaaagcggtacgctgaaaaaaggcgacatgctgctggcaggtaccgcattcggtaaaatccgtgcgatggttgacgaaaacggcaaagccatcaatgaagccggcccgtctatccctgtcgaaatcctcggcttgtccgacgttccgaacgcaggcgaagatgcaatggtattggctgatgagaaaaaagcgcgcgaaatcgccctcttccgtcaaggcaaataccgcgatgtgcgccttgccaaacaacaggcggcgaagctggaaaatatgttcaacaatatgggcgaaacccaggcccaatctttgtcggtcatcatcaaggcagacgtgcaaggttcttacgaggctttggcgggcagtctgaaaaaactgtccacagacgaagtgaaagtgaacgtgttgcacagcggcgtgggcggcattaccgaatcggatgtcaaccttgccatcgcgtccggggcgttcattatcggctttaacgtgcgtgcagatgcctcttcgcgcaaacttgccgaaaatgaaaatgtggaaatccgctactacaacatcatctatgatgccatcgacgacgtgaaagccgccatgagcggtatgctttccccggaagagaaagaacaggttaccggtacggtcgaaatccgtcaggtcatctccgtttccaaagtcggcaacattgcaggctgtatggttaccgatggtgtggtcaaacgcgattcccatgtccgcctcatccgcaacaacgtggtcatccacacgggcgaactggcttcgttgaaacgctataaagacgacgtaaaagaagtccgcatgggctttgagtgcggtctgatgctcaaaggctacaacgaaatcatggaaggcgaccaactggaatgcttcgacatcgtcgaagttgcccgcagcctgtaa

SEQ ID NO: 39508 - DNA, 933 bp, Neisseria meningitidis; identical to SEQ ID NO: 38585

SEQ ID NO: 39509 - DNA, 321 bp, Neisseria meningitidis
atgttcggcaagcagctttttgaagaagtcggttcgaaaatcagcgaaaccatcgccaacagccctgccaaagatgtggaaaaaaatattaaggcgatgctgggcggcgcgttcaaccgtatggatctggttacgcgcgaagaattcgacatccagcagcaggttttaatcaaaactcgtaccaaactggcggctttggaagcgcgtttggcaaaactcgaagccgcgcaaaatcccgaacgggcagcattggaagcggctgaagccgctgccgaagaagccgtcgccgaaatcaggcagcaaaccgaagccggcgaataa

SEQ ID NO: 39510 - DNA, 390 bp, Neisseria meningitidis
atgaaaaacgttcaaaaaggctttacgctgctcgagctgatgattgccgtcgccatcctcggcatcctgacgctcatcacctacccttcctataaaacctacatccggcgcgtccgcctgtcggaagtcaggacgaccctgctgcacaacgcgcagaccatggaacgttactaccgccaaaaagggacgtttaaaacctacgacaaaaacaaactgaaacaaaacgaatatttcgatatcactttaagcgaagtcagccccgaccactttacccttcaggccgaccccaatcccaccaccaacgacggcgaaacctgcgtcgttacgctcaacgacggcggtaccattgccgcttccggtacaaaccaatcctgccccggcttcgactaa

SEQ ID NO: 39511 - DNA, 969 bp, Neisseria meningitidis
atgaaactcaccctcgccctcccctcgctcaatttggatgaagacgaaatccgaatacctctatgcctgcccgccttcaacaaaatcctgcaatacggctcgctgcaccgccaaagctgcacggcttcggcattttacgcgcgttatttgtggtgcggcagactggcggaacgcgcggcgcaaagcctgaatatgccgtctgaagccgtcgcgctcgccacgcccgtctggcaaaagatggggatgcatcaggcaaatgtgctaacggcggaatatctgaacgtcggtacggatgaagcggaacggctctgccgcgacctgtcggcgttttacggcgacattccatggcgtttcgttcccgtcctgcccgaattatggctggtttcccttccttgcgcgtaccgctggggcgcgaagcccgttttggacttgggcggattgttgggcgcggacgatcagccggacggagaagatgcgttggaatggctgcgcgtccaaaccgaaatccaaatgtggctggcggcgcaccccgtcaaccataaccgcaaaaaacgcgggctgcccgagttgaacggcttatggctttgggacggcacaaacggcggcgcgcaaggcggcacacttttcgccgatacggtttggagccgtttccaccccgaccgccgcgcattgcccgacaacttccgcgcctatgaagaaacggcggcacacctgcctgacacgcaccatatcctgtttatggacgatttgcgcctgaccgccctgacaggggacagggagcggtatgcggcaatattgcagcagtgggaagaacgctggttcgcaccgctttacgaagccgtccgtaccggcaaaatcaaacggctggacatcaccacggacggacaacacggcggtacgctgaccttcaaacccgccgacaggtggaaattttggcgcggcgcgaaaacctttgacggaatctggtga

SEQ ID NO: 39512 - DNA, 510 bp, Neisseria meningitidis
atgattatcctgcacaccaacaaaggcgacatcaaaatcgaactcgatttcgacaaagcccctgttaccgccaaaaacttcgagcaatacgtcaaagacggcttctacgacggcgtaatcttccaccgcgtcatcaaaggcttcatgattcaaggcggcggcatggatgaaaacatgaacgaaaaagaaacccgcgatccgattcaaaacgaagcgtccaacggcctgcccaacgataaatacaccatcgccatggcacgcacttccgacccccattccgccagcgcgcaattcttcatcaacactgccgacaacgctttcctgaacttccgttctaaagagctgtacggcaaaaccgtcgtccaagactggggctatgccgtattcggtaaagtcgttgacggttttgacgttgtcgatgccatcgaaggcgtttctaccaaacgtcatggttaccacgacgacgtaccgagcgaacctgtcgtcatcattaaagccgaagcggtataa

SEQ ID NO: 39513 - DNA, 1449 bp, Neisseria meningitidis
atgaaaggcgatattggcgtaatcggtttggcggttatggggcaaaacctgattttgaatatgaacgattgcggatttaaggttgtcgcctacaaccgaacaatcggtaaggtggacgaatttttaaacggcgcggcaaaagggacgggcattatcggcgcgtattccctgcaagacttggtcgataagctggaaaaaccgagaaaaatcatgatgatggttcgcgcaggttcggtggttgacgactttatcgaacaactgcttccgttgttggaaaaaggcgacatcattatcgacggtggcaatgccaattaccccgacacgacacggcggacacattaccttgccgaaaaagggattttgtttgtcggcatgggggtctccggcggagaggaaggtgcgcggcacggcccgtctatcatgccgggcggagatgagcgcgcatgggaagctgttaaaccgattttccaggcgattgctgcgaaaacccctcaaggtgagccgtgttgcgattgggtcggcagggatggtgcgggacatttcgtcaaaatggtgcataacggcatcgaatacggcgatatgcagttgatttgcgaagcgtaccagttcatgaaagacggtttgggactgtcctacgacgaaatgcaccgcgtgtttgccgagtggaacaaaaccgagctggattcttatctgattgaaatcacagcggcaattttgggctataaggacgaaggcggcgaaccgctggtcgagaaaatcctcgatacggcagggcaaaaaggcacgggcaaatggacgggcatcaatgctttggatttgggtattccgttgacgctgatttccgaagcggtattcgcccgctgcgtttcgtcgttcaaagaacagcgcgtgcagaccggcaagctgttcgcccgaaccgttacgcccgtcgaaggcggcaaacaagaatgggttgaggcgttgagacaggccctgcttgcatccaaaatcatttcctacgcacaaggctttatgctgatccgcgaagcgggcgaaagctacggctgggatttggactacggcaacactgcgctgctgtggcgcgaggggtgcatcattcgcagcgcattcttaagcaatatccgcgacgcgtatgaaaacaatcccgatttggtgttcttgggtgcggatccgtatttcaaaaatattttggaaaactgcctgccggcgtggcgcaaggtggttgctagggcggtcgaatgcggcatccctatgccttgcatggcttcggcgattacgttcttggacggctacacgaccgaacgtctgcctgccaatctcttgcaggcacagcgcgactacttcggcgcgcacacttacgaacgcaccgacaaaccgcgcggcgagtttttccataccaactggacgggcaagggcggagataccgcttcgacaacctacgatatttga

SEQ ID NO: 39514 - DNA, 480 bp, Neisseria meningitidis; identical to SEQ ID NO: 38692

SEQ ID NO: 39515 - DNA, 1209 bp, Neisseria meningitidis; identical to SEQ ID NO: 38616

SEQ ID NO: 39516 - DNA, 1179 bp, Neisseria meningitidis
atggcaaaaatgatgaaatgggcggctgttgcggcggtcgcggcggcagcggtttggggcggatggtcttatctgaagcccgagccgcaggctgcttatattacggaaacggtcaggcgcggcgacatcagccggacggtttctgcaacaggggagatttcgccgtccaacctggtatcggtcggcgcgcaggcatcggggcagattaagaaactttatgtcaaactcgggcaacaggttaaaaagggcgatttgattgcggaaatcaattcgacctcgcagaccaatacgctcaatacggaaaaatccaaattggaaacgtatcaggcgaagctggtgtcggcacagattgcattgggcagcgcggagaagaaatataagcgtcaggcggcgttatggaaggaaaacgcgacttccaaagaggatttggaaagcgcgcaggatgcgtttgccgccgccaaagccaatgttgccgagctgaaggctttaatcagacagagcaaaatttccatcaataccgccgagtcggaattgggctacacgcgcattaccgcaacgatggacggcacggtggtggcgattctcgtggaagaggggcagactgtgaacgcggcgcagtctacgccgacgattgtccaattggcgaatctggatatgatgttgaacaaaatgcagattgccgagggcgatattaccaaggtgaaggcggggcaggatatttcgtttacgattttgtccgaaccggatacgccgattaaggcgaagctcgacagcgtcgaccccgggctgaccacgatgtcgtcgggcggctacaacagcagtacggatacggcttccaatgcggtctactattatgcccgttcgtttgtgccgaatccggacggcaaactcgccacggggatgacgacgcagaatacggttgaaatcgacggcgtgaaaaatgtgctgattattccgtcgctgaccgtgaaaaatcgcggcggcaaggcgtttgtgcgcgtgttgggtgcggacggcaaggcggcggaacgcgaaatccggaccggtatgagagacagtatgaataccgaagtaaaaagcgggttgaaagagggggacaaagtggtcatctccgaaataaccgccgccgagcagcaggaaagcggcgaacgcgccctaggcggcccgccgcgccgataa

SEQ ID NO: 39517 - DNA, 1539 bp, Neisseria meningitidis
atgttccattccatcgaaaaatacagaacgcccgcccaagtccttttggggctgattgcattaaccttcgtcggcttcggggtcagcacggtatcccatccgggtgccgactacatcgtccaagtgggcgacgaaaaaatcagcgaccactccatcaacaacgctatgcaaaatgaacaggcggacggcggcagcccttcgcgcgacgcggtgttccaatccctgctgcaacgcgcctacctgaaacagggcgcgaagctgatgggcatttcggtttcttccgaacaaatcaagcagattatcgtggacgatcccaatttccacgacgcaaacggcaaattcgaccacgcgcttttaaaccgctacctttcccaacgtcatatgtctgaagaccagtttgtcgaagaaatccgcgatcagtttgccttgcagaatttggtaaacctcgtccaaaacggcgtattggtcggcgacgcgcaggcggaacagctgatcaggctgacgcaggtcaaccgcaccatccgttcgcacactttcaaccccgacgaattcatcgcccaagtcaaagtgtctgaagccgatttgcagaagttttataacgcaaacaaaaaagactacctgcttcccaaagcggtcaaattggaatatgtcgccttgaatctgaaagactttgcagacaaacagaccgtcagcgaaacagaagtgaaaaatgcgtttgaagagcgcgtggcgcgtttgccggcaaatgaagccaaaccttctttcgagcaggaaaaagccgccgtagaaaacgaattgaaaatgaaaaaggcggttgccgacttcaataaggcaaaagaaaagctgggcgatgacgcgttcaaccatccttcctcgcttgccgaagccgccaaaaacagcggtttgaaagtcgaaacccaagaaacttggctgagcaggcaggatgcgcaaatgtccggtatgcccgaaaacctgatcaatgccgttttcagcgacgacgtattgaagaaaaaacacaattccgaagtgctgaccatcaacagcgaaaccgcgtgggtcgtccgcgccaaagaagtccgcgaagagaaaaccctgccgtttgccgaagccaaagacgcggtacgtcaggcttatatccgtaccgaagccgccaaacttgccgaaaacaaggcaaaagacgtgcttacccaactgaacggcggcaaggctgttgacgtgaaatggtcggaagtgtccgttttgggcgcacagcaggcaaggcagtccatgccgcccgaggcttatgcggaactgctgaaagcaaaaccggcaaacggcaaacccgcctacgtcaggctgatcggtctgccggcacccgtgattgtcgaagtacaggctgtaaccccgccggatgatatcgccgcacagcttccgcttgcaaaacaggctttggcgcaacagcagtctgccaatactttcgacttgttgatacgttatttcaacggcaaaatcaaacagaccaaaggagcgcaatcggtcgacaacggcgacggtcagtaa

SEQ ID NO: 39518 - DNA, 1149 bp, Neisseria meningitidis
atgcccctccccctcccctctcccgaagcacggcaattctcgctcaaactgcaaaccctcattgccgaaaaaatcggcaaacacggcaactggattccattttcacgttttatggaattggttttatacgctccgcaatacggctactacaccggcggcagccataaaatcggcaataccggggattttattaccgcaccgaccctcacctctctgtttgcacagacactggcacgccaacttcaagaacttctatcccaaacggcgggcaatatctatgaattcggcgcgggaaccggacagcttgccgccgatttgttgggcagcatttcggacggcatcagccgttactatattattgaaatatcgccggagctggcagcacgtcagaaaaacctgattcaagcacgcgcaccggaagcatctcaaaaagttgtccacttgaccgcacttcccgaagcgtttgacggcatcatcatcggcaacgaagtactcgatgccatgcctgtcgaaatcgtccgtaaaaatgaaggcggctcattcgagcatgtcggcgtttgcctagataatgaccgttttacctattcggcacgaccgctgcacgacttacagctatctgccttggcttccctctattttcctcaaacagattatccctacaccagcgaactacatccgcaacaatatgcctttatccgcacccttgcctcaaggcttgaacgcgggggtatgatattcatcgactacggttttgatgcagcgcagtattaccaccctcaacgcaatcaaggtactctgatcggacactaccgacatcacgttatccacaatccttttgacttcatcgggttggccgacctgaccgcgcatgtcaactttaccgacattgcccaagccggtacggatgcaggactggatttgacaggctatctgccccagtcccattttctgctgaatctgggcataaccgaactgttggcacaagtgggaaaaacagactcgcccgcctacatccgtgaagctgctgccgttcagaaactgattgaccagcatgaaatgggagaattgtttaaagtcatcgcattcggtaaaaatatcggcgtcgactgggcaggattccgcttcggcgacatctgccacaaactctaa

SEQ ID NO: 39519 - DNA, 1296 bp, Neisseria meningitidis
atgagcgtcatccaagacctgcaatcgcgcggcctaatcgcgcaaaccaccgacatcgaagccttagacgctttgttgaacgaacaaaaaatttccctttattgcggcttcgacccgaccgccgacagcctgcacatcggacacctgctgcccgtattggcattgcgccgcttccaacaggcggggcatacgccgattgcactggtgggcggtgcgaccggtatgatcggcgaccccagcttcaaagccgccgaacgcagcttgaattccgccgaaaccgttgccggctgggtggaaagcatccgcagccaattaacccctttcttgagctttgaaggcggaaacgccgccattatggcgaacaacgccgactggttcggcaaaatgaactgcctcgacttcctgcgcgacatcggcaagcatttctccgtcaacgccatgctgaacaaagaatccgtcaaacagcgcatcgaccgcgacggcgcaggcatttccttcaccgagttcgcctattccctgctgcaaggttacgacttcgccgagttgaacaaacgccacggcgcggttttggaaatcggcggctccgaccaatggggtaacatcactgccggtatcgacctgacccgccgcctgtaccaaaaacaagtgttcggactgaccctgcctttggttaccaaatcagacggcaccaaattcggcaaaaccgaaggcggcgcagtatggctgaacgcgaaaaaaacctcgccctatcagttctaccaattctggctgaaagtcgccgatgccgatgtgtataaattcctgaaatactttaccttcctgtccatcgaagaaatcgatgccgtcgaagccaaagaccaggcaagcggcagcaagcccgaagcgcaacgcatcctcgccgaagaaatgacccgcctgattcacggcgaagaagcccttgccgccgcgcagcgcatttccggaagcctgtttgccgaagaccaaagcagcctgaccgaaagcgacttcgagcagctggcactcgacggcctgcccgcatttgaagtttcagacggcatcaatgtcgtcgaagccttggtcaaaaccggtttggcatcctccaataaagaagcgcgcggctttgtgaacagcaaagcggttttgctcaacggcaaacctgccgaagccaacaaccccaaccacgccgccgaacgccccgacgatgcctgcctgctgaccgacgaacacaaacgtttcggcaaatacaccatccttcggcgcggcaaacgcaaccacgcgcttttggtttggaaataa

SEQ ID NO: 39520 - DNA, 555 bp, Neisseria meningitidis
atgaaaaaaatcatcgcctccgcgcttatcgcaacattcgcactcgccgcctgccaagacgacacgcaggcgcggctcgaacagcagcagaaacagattgaagccctgcaacagcagctcgcacagcaggcagacgatacggtttaccaactgactcccgaagcagtcaaagacaccattcctgccgaagcacaggcaaacggcaacaacgggcaacccgttaccggtaaagacgggcagcagtatatttacgaccaatcgacaggaagctggctgctgcaaagcctggtcggcgcggcggcaggcgcgtttatcggcaacgcgctggcaaacaaattcacacgggcaggcaaccaagacagtcccgtcgcccggcgcgcgcgtgcagcctaccatcagtccgcacgccccaatgcgcgcaccagcagggatttgaacacgcgcagcctccgtgcaaaacaacaggcggcgcaggcgcagcgttaccgcccgacaacgcgcccgcccgccaattaccgccgccccgctatgcgcggtttcggcaggaggcggtaa

SEQ ID NO: 39521 - DNA, 981 bp, Neisseria meningitidis
  misc_feature 966, 967, 968, 969, 970: 'n' is a, c, g or t
atggacacactgacccgattcctccccgaacacctgcaacaaaaccagctgcccgaagcactcggcggcgttttactgtccgttgtttccgcctgcaccgaaatcaacgccaaagtccgcctcggcgcactggccggcgtattgggtatggcgggcacgggcaatattcagggcgaagaccaaaaaaaactggatgttatcgccaacaacatcatgattgacacactcaaagccaaccctgccgttgccggtttggcaagcgaggaagaagactctttcgtaagtgccggtgaaaacggacgctatctcgtcctattcgaccctttagacggatcgtccaatattgatgtcaacatttccgtcggtacaattttctccatccttgaaaaacccgaaggcgcattggcaaccgaatcattccttcaaacgggcagacagcagcttgccgctggttacgttctttacgggcctcaaacccagctcgtattcacattcggacacggcgtatatatgttcacgctcaatgccgaaaacgaatttgtgctgacaaaagaaaaaccgaaagtacccgaaagtaccaaagaatttgccatcaatatgtccaaccgccgccactggctgccccccgtccaacaatacatcgacgagctcttggcgggcgaaaccggcacgcgcggcaaaaactacaatatgcgctgggtagccagcatggttgccgaaatccaccgcatactgatgcgcgggggcgtgttcatgtatccgcaagacaaacgcgacccgtccaaacccggcaaactgcgcctgatgtatgaagccaatcctatggccctgatactcgaacaagccggcgcatcggcaagcaacgcccgtcacgacatactcggcatccgtcccgaaagcctgcaccagcgcgtcgccgtcattatgggcagcagcgaagaagtggattacctcaaccgcctgcannnnncacacacttaa

SEQ ID NO: 39522 - DNA, 2028 bp, Neisseria meningitidis
atggaagtcatccgataccccgattcccctttcaaactccaccaacccttcccgcccgcaggcgaccagcctaccgctattgccggcttgctcgaagggctttcagacggccttgcctaccaaaccctgctcggcgtaaccggttcgggcaaaacctacaccatggcgaacgtcatcgcccaaagcggccgacccgccatcatcatggcgcacaacaaaacccttgccgcccagctttatgccgaaatgcgcgagtttttccctgaaaacgcggtggaatatttcgtctcctactacgactattaccaacccgaagcctatgtgcccagccgcgacctgttcattgaaaaagacagcgcgatcaacgaacatatcgagcagatgcgcctttccgccaccaagaacctgatgacgcgcgacgacgtgattatcgtcgccaccgtgtccgccatctacggtatcggcgacccgaccgagtatcagcaaatggtgttgtccgttaaagaaggcgacaccattgagcagcgcgacatcatcgccacgctcgtttccatgcagtacgagcgcggcgatttggactttaaacgcggcagcttccgcgtgcgtggcgacgtgattgacgtgtaccccgccgaaagctccgaaaacgccttgcgcatcagcctgtttgacgacgaaatcgaccgcctcgatatgttcgacccgctttcaggcagccttatccagcgcgtcggccgctacaccgtcttcccgtccagccattacgttaccccgcgcgataccgtcttgcgcgcctgcgagtccatcaaagaagaattacgtgaacgcattgatttctttaccaaagaaaaccgtcccgtcgaacaacaacgcatcgaacagcgcacccgctttgacctcgaaatgctctacgaaatgggcttctgcaaaggcatcgaaaattactcccggcacttctccggcaaaaaagaaggcgaaccgccgcccacgctgatggactacctgcctgacaacgccatcatgttcatcgacgaaagccacgttaccgtcacccaaatcggcggcatgtacaaaggcgacgcatcgcgcaagcaaaacctcgtcgactacggcttccgcctgccttccgcccgcgacaaccgcccgctcaaattccatgaatttgaaaaagtcatgccgcaaactgtcttcgtttccgccactccagccaaatacgaagaagaacacgccggacaagtggtcgaacaagtcgtccgccccacagggctggtcgacccccaaatcatcatccgccccgtcgccacccaagtcgacgacttaatgagcgaaatcaacgaccgcatccaaaaaggcgaacgcgttctcgttaccaccctcaccaaacgcatggcggagcaactcaccgactattacagcgaactcggcatcaaagtgcgctacctgcacagcgacattgataccgtagagcgcgttgaaatcattagagatttacggctcggcctgtttgacgtactcgtcggcatcaacctcttgcgcgaaggcctcgatatccccgaagtctccctcgtcgccatcctcgacgccgacaaagaaggcttcctgcgctcacaccgcagcctgattcaaaccataggccgcgccgcgcgcaacgtgaacggcgtcgcgattctgtacgccgacaaaatcaccgactctatgaaagccgccatcgacgaaaccgaacgccgccgtgaaaaacaaattaaattcaacgaagaacacggcatcgtgccgcaacagattaaaaaacaggtcaaagacatcattgacggcgtgtaccacgaagaagacggtggtaaaggccgtagacaaggcaaaaacaaggttaaagtcagcgaaattcacaacgaagaagacgcggttaaagaaatcgccaaactggaaaaagccatgcagcaggcagctagggatttgcagtttgaagaggcggctgtactgagggataggatacgggggattaaggaagggttgttgtttgggagtgagtaa

SEQ ID NO: 39523 - DNA, 816 bp, Neisseria meningitidis
atgactactctcaaacccgccctgcccgcttatctggacaacatccgcatcatcctcacgcgcaccagccatcccgccaacatcggctctgccgcgcgcgcgatgaaaacaatgggtctgcacaaactgaccatcgtcgccccaaatctgatggcaacgccgatgacggaaaacccgcccgtgtttgacccggagcatcctcaatcgtttaaattaccggaagaaagcttcatcctcgcttccggcgcggcagacgttttggaaaatgccaccattgccgcttctttggacgaagcccttgccgacaccaccatcgcctgcgccctgaccagccgccgccgcgaaattactgcgccgctgcaaaccccgcgcgacttggtatccgaattactgcagaccgcaaaccgaggcgagaaagtggcactggttttcggcaacgagactttcggcttgagcatcgaagaagtccaagcctgcaaccgactgatgaccatcaacggcaatcccgactatttctcgctcaacctcgcccaagccgtgcaggtcgtgtgctacgaaatcttcagccaaaccggttcgcccatgacccatcttcaacaagaagaccacgctgcgacccacgagcaaatcaaaggcatggtcgcccacatggaaagcgtgatgaacgacatcggctttttcaaccgccgcaacggcgagcgtctgatgcgccgtatgcagagcctgttcggacgcgccaacacgcaaaccgaagacatcgatatcctgcgcggttttttcaataccgtcagccatcgtatccataaaaaagactga

SEQ ID NO: 39524 - DNA, 789 bp, Neisseria meningitidis
atgaatcctaaaatcgtgtttttcgacattgacgatacgctgtaccgaaaatatacggatactttgcgcccttccgtgaaaacggcggtggcggctttgcgcggcaaaggtatattgacggcgttggcaacggggcggtctttggcgacgattcccgaaaaggtcagggatatgatggcggaagcgggaatggatgccgtggtaacgataaacggacagtttgcgctgctgcacggaaaaaccgtgcgcgaagtaccgatggatgccggtttgatgggcagggtttgcgcgcatttggatggcttgggcatggattatgcgtttgtcggcggagaggggatcgctgtgtccgcgctgtcggaatgcgtgtgccgcgccttgaagcatatcgccagcgatttttttgccgataaggattatttttcaagcaaaccggtgtatcagatgctggtgtttgcggaggaaaacgaaatgccgctttggtcggatattgtggaacgggaaggcttgaaaacggtgcgctggcacgaggaagcggtcgatctgctgcctgcgggtgcgtcgaaaacggacggcatcagaagcgtggttgaagcattgggatgggaaatggcagacgtgatggcgttcggcgacggtttgaacgatgtggaaatgctgtcagaagtcgggttcggcgtggcaatgggcaacggggaacaggcggcgaaagaagcggcgaaatatgtttgccccggcgttgatgaagacggcgtgttgaggggcttgcaagatttgggcgtgatttga

SEQ ID NO: 39525 - DNA, 1236 bp, Neisseria meningitidis
atgactatttcgacaatggcacagacacacgatactcgattacaaaaaactttgctctttcccagtcaacaaggttggaaatctaaaacttttcttaaacctgattcacatattagattagcaaccgtattcagcgggattggtgcggttgaacaggcattccaccgattaaatttaaaccataccattgtttttgcaggagatattgatccatacgttaaaaaaagttatcttggaaactataaattaaatgaagatttttggcataacgacattactcaatttgatgcgagaaagtttagaaatcaagttgatattttagttggaggcagtccttgccaagcattttccatggttggcaaacgtgcaggattagaagatacacgaggaacattattctatgaattttctcgcgttgtggatgaagtccaaccaaagatatttatttatgaaaatgtaaagggcttgctcaatcatgataatggaaaaacttggaaagttgtaaaaagtgttttttattcacttggttatgacttatatttccaaataatgaatagtaaggattatgggattcctcaacatcgtgagcgtatttttgttgttggctttcatacccctcctataaatggttttcagtttcctgaaaagattgaattagaacatactatgcaagattttttggaggactatactgatagcaaatattttttacgtgaaaagggtgtgaaatttgttaccagttctaaaaatagacaaaaacgttatacacagattaatggagaaattgccttatgccaaaaagcaaatcaacaatttaattggcatggtgattttatttttcaggcagcccgcgaatctgaatttgatgactttatttttgatgtaaataacgttgaggaaaaatattatctttctgaaaaaatcaaaaattatgttttggcaggaggaacaaaaaattttaaaaccagtacggaaactgatttgcctgtagctcgcccattattgcaaactatgcataaaatgcatcgtgccggggttgataattatgttactcataatcgtggacgtattcgtaaattaacacctagggaatgtttgcggctaatgggttttagagatgattttaaaattttagttagtgatactcaaatgtatcgccaagcgggaaacagtattgttgttgatgtattaatcgctatattaaaacaaatggatattacgctttatggagagtaa

SEQ ID NO: 39526 - DNA, 588 bp, Neisseria meningitidis
atgccgctacccgacctgaccgatgccgaattaatagagtcgcgtaaactgcttctgcattttgcgcggcttcagttgcccgaccaccctgatttggctgaagatttagtgcaggaaacattgctgtccgcatacagcgcaggcgacagttttcaaggcagggcacttgtcaacagctggctttttgccatattgaaaaacaaaattattgacgcattacgtcaaatcggaaggcagaggaaagtctttaccacactggatgacgagctactggatgaagcatttgaaagccatttttcccaaaacgggcattggacgccggaagggcagccgcaacattggaacactccggaaaaatcattaaacaacaacgaattccaaaaaattctgcaaagctgcctatacaacctgcctgaaaacaccgcacgggtatttaccctgaaggaaatactcggtttttcatccgacgaaatacaacaaatgtgcggtatcagcacgtccaactaccacaccattatgcaccgcgcccgagaatcattgcgccaatgcctgcaaatcaaatggttcaaccaagaaaacccgaagtaa

SEQ ID NO: 39527 - DNA, 462 bp, Neisseria meningitidis
  misc_feature 439, 440, 441, 442, 443: 'n' is a, c, g or t
atggctaagaaaatcagtattttggtgggcagcctgcgccgtgcttcttttgcgcacaaagtggcattgaatgcggcggagatgttccccgaaggctggcaggcggaaatcgttgaaatcggacatctgccgctttacaatttcgattatgacgaccctgcggtggaagatgtgccgctacccgaaagctacacggctttccgcgaaacgattaaggcttcggacggcattttgttcgttacgtccgaaaataaccgcaccattcccgcctgtttgaaaaatgcggtggacatcggctcgaaaccgaatgccgacgtggcgtggaaaaacaaaccggcaggcatcatcagccattccgtcggcaagatgggcggttacagttcccaaaaaaacctgcgccttgcgctgtcttatttcgatatgcccgtaaccggacagnnnnncacacacttaattaattaa

SEQ ID NO: 39528 - DNA, 534 bp, Neisseria meningitidis
atggcagagttcgcaacgattgccagaccttatgcaaaggcattgtttggtctggctcaggaaaaaaaccaaattgagtcttggttgggcggactggaaaaacttgcggcggttgttcaggaagggaaggtggcttcattgattgaccgtcctgaaacgaatgcttcagaaaaagcagatatcctcatcgatttggtcggtttgaaagacaaggagttgaaaaactttgttatcgtcttggccgggcagaaacgtttgtcgatattgccggaagtatatgctcaatatcaagacttgaccttatcattcaaccatatcaaatctgccgtcatttacagtgcctatccgttgaccgacaaacaggtcggcgagttggcgcaaatgctgaataagcgtttcgacagcgagctgaaaatctctgtcgaaatcgaaccggagctgattggcggcataaaagttgaagtgggtgatcaggttttggatttgtctgtacaaggcaaattgagtgccttgtacacgactatgacgaattag

SEQ ID NO: 39529 - DNA, 1596 bp, Neisseria meningitidis
atgtcccaagaaatcctcgaccaagtgcgccgccgccgcacgtttgccatcatctcccaccctgacgcaggtaaaaccacgttgactgaaaaactcttgctgttttcaggtgcgattcaaagcgcgggtacggtaaaaggcaaaaaaaccggcaaattcgccacttccgactggatggaaatcgagaagcagcgcggcatttccgtggcatcaagcgtgatgcagttcgactacaaagaccacaccgtcaacctcttggacacgccgggacaccaagacttctccgaagacacctaccgcgttttaaccgccgtggacagcgcattaatggtcatcgacgcggcaaaaggcgtggaagcgcaaaccatcaagctcttaaacgtctgccgcctgcgcgatacgccgattgttacgtttatgaacaaatacgaccgcgaagtgcgcgattcgctggaactcttggacgaagtggaaaacatcctgcaaatccgctgcgcgcccgttacctggccgatcggtatgggcaaaaacttcaaaggcgtataccacatcctgaacgacgaaatctatctctttgaagcgggcggcgaacgcctgccgcacgagttcgacatcatcaaaggcatagaaaatcccgaattggaacaacgctttccattggaaatccaacagttgcgcgacgaaatcgaattggtgcaggcggcttccaacgagttcaatctcgacgaattcctcgccggcgaactcacgcccgtattcttcggctctgcgattaacaacttcggtattcaggaaatcctcaattcattgattgaatgggcgcccgcgccgaaaccacgcgatgcgaccgtgcgtatggtcgagccggacgagccgaagttttccggatttatcttcaaaatccaagccaatatggacccgaaacaccgcgaccgtattgccttcttgcgcgtctgctccggcaaattcgagcgcggcatgaaaatgaaacacctgcgtatcaaccgcgaaatcgccgcctccagcgtggtaaccttcatgtcccacgaccgcgagctggttgaagaagcctacgccggcgacattatcggtatcccaaaccacggcaacatccaaatcggcgacagcttctccgaaggcgaacaactgacgtttaccggcatcccattcttcgcgcccgaactgttccgcagcgttcgcatcaaaaacccgctgaaaatcaagcaactgcaaaaaggtttgcaacagcttggcgaagaaggtgcggtgcaggtgttcaaaccgatgagcggcgcggatttgattttgggcgcggtcggcgtgttgcaatttgaagtcgttacctcgcggctggccaacgaatacggcgtagaagccgtgttcgacagcgcatccatctggtcggcgcgctgggtatcgtgcgacgacaagaaaaaactggcggaatttgaaaaagccaatgcaggcaacctcgccatcgacgcgggcggcaacctcgcctacctcgcccctaaccgcgtgaatctgggactcacgcaagaacgctggccggacatcgtgttccacgaaacgcgcgagcattcggtcaaactttaa

SEQ ID NO: 39530 - DNA, 576 bp, Neisseria meningitidis
atgcgtattccgctgcttgcccctgacaattatgcctttcccgatcctgcctatgctttggcacggtgcgacgggctggtcggcgtgagcagggatttggacgcggggcggctgctcgaggcgtatcggaacggcgtgtttccttggtttttgcgagacggttggtttttttggtatgcggtcgggccgcgtgcggtgattgttcccgaacgtctgcacgttccgcgctcgctggagaaaacgctacgcaactgcagctatcgggttacggtcaacggctgttttgcggaagtggtcgcgcattgtgcggcagcggtgcgcccgaatcaggacggaacttggattgcgcccgagtttcagacggcatatttgaagctgcacgaaatgggatacgcgcattcgtttgagtgccattatcccgatgaaaacggtaaaacgaggttggcgggcgggttttacgcgttcagatcggcagggtgttttacggcgaatcgatgttcgcattacaaccggatgcgtcgaaaatcgcgtttgcctgcgccgtgccgtttctcgcgtctttgggtgtggaactga

SEQ ID NO: 39531 - DNA, 2115 bp, Neisseria meningitidis
atggatttattatcggttttccacaaataccgtctgaaatatgcggtggccgtgctgacgatactgcttttggcggcagtcgggctgcacgcttccgtatatcgcaccttcacgcctgaaaacatccgcagccgcctccaacaaagcattgcacacacacaccggaaaatctcgtttgatgcggacattcagcgcaggctcctgccccggccgaccgtcatcctgaaaaacctgaccattaccgaacccggcggcgaccggactgccgtttccgtccaagaaaccaaaatcggattgagctggaaaaacctgtggtcggatcagatacagattgaaaaatgggtggtttcgagtgcggaacttgccctgacgcgcgacgggaaaggtgtttggaacattcaagacctgatcgacagccaaaaacgccaagcctcagtcaaccgcattatcgtcgaaaacagcaccgtccgcctcaatttcctgcaggaacagcttatcctgaaggaaatcaacctcaacctgcaatcccccgattcgtcggggcagccgtttgaaagttcgggcatactggtttggggaaagctgtccgtcccgtggaaaagcagggggctgttcctttcagacggcatcggcacgcccaaaatctcaccgttccattttgaagcttccacttcgctggacggacacggcattaccatttccaccaccggcagcccttctgtccgcttcaacgccggcggagcggatgccgccggcctcggcctgcgtgcagacacttccttccgcaacctccacctgaccgcccaaatccctacgctggcactcagaaataacagcattaaaattgaaaccgtcaacggcgcatttaccgccggcggcgaatatgcccaatgggacggttcgttcaaactcgacaaagccaaccttcactccggcatcgccaacatcggcaacgccgaaatctccggcagcttcaaaacaccgcgccaccagaccaacttctccttcaattcgccgctcgtatggacggaaaacaaagggctggacgcgccgcgcctgtatgtatcgacccttcaggataccgtcaaccgcctgccgcaaccccgtttcatcagccggctcgacggttcgctgtccgtaccgaatctgcaaaattggaatgccgaattaaacggcacattcgaccgccaaaccgttgccgcgaaattcagatacacacatgaagacgcaccgcatctggaagccgccgtcgcactgcaaaaattgaacctgaccccctatcttgacgacgtgcggcaacaaaacggcaaaatatttcccgacaccctcgccaagctgtccggcgacatcgaggcgcacctgaaaatcggaaaagtccaacttcccggcctgcaactggacgatatggaaacctacctccacgccgacaaaggccatatcgcgctcagccgtttcaagtcagggctttacggcggccataccgaaggcggcatcagcatcgccaacacccgtcccgccacttaccgcctgcaacagaatgcaagcaacatccaaatccaaccgctgctgcaagacctgttcggcttccacagcttcagcggcaacggcgatgcggtcatcgacctgaccgcgggcggcgaaacccgaaaagagcttatccgctcgcttcaaggcagcctgtcgctgaacatttccaacggttcgtggcacggtatcgacatggacaatatcctgaaaaacggcatttcgggcaaaactgccgacaatgccgcacccagcacacccttccaccgattcacgctcaacagcgaaatttcagacggcatcagccgccacatcgataccgaactcttctccgacagcctctatgttaccagcaacggctataccaatctggatacgcaggaattgtctgaagatgtccttatccgcaacgccgtccatccgaaaaacaaaccgattcccctgaaaatcaccggtacggtggacaaaccgtccattaccgtcgattacggcaggctgatcggcggcatcaattcgcgcaaagagaaacagaaaatcctcgaagacaccctgctggaacaatggcagtggctcaaacctaaagaaccgtaa

SEQ ID NO: 39532 - DNA, 255 bp, Neisseria meningitidis; identical to SEQ ID NO: 39093
  misc_feature 236, 237, 238, 239, 240: 'n' is a, c, g or t

SEQ ID NO: 39533 - DNA, 1296 bp, Neisseria meningitidis
ttggcaggagtcggcaaacttgcccgcttaggcgcgaaattcagcacaagggcggttccctatgtcggaacagcccttttagcccacgacgtatacgaaactttcaaagaagacatacaggcacaaggctaccaatacgaccccgaaaccgacaaatttgtaaaaggctacgaatatagtaattgcctttggtacgaagacgaaagacgtattaatagaacctatggctgctacggcgttgacagttcgattatgcgccttatgtccgattacagcagattccccgaagtcaaagaattgatggaaagccaaatgtataggctggcacgtccgttttggaattggcataaagaagaactgaataaattaagttctttggattggaataattttgttttaaatcgttgcacatttgattggaacggcggagattgtgtggtcaataaaggtgatgattacagaaatggggctaatttttcccttagccgcaatccgaaatacaaagaagaaatggatgccaaaaagctggaagagattttatcgttgaaagtcgatgccaatcccgacaaatacataaaggcaaccggatatcccggttattccgaaaaagtagaagtagcacccggaacaaaagtgaatatggggcctgttacggacaggaacgggaatcccgttcaggttgtcgcaacattcggcagggattcgcaaggcaacaccacagtggatgttcaagtaatcccgcgtcccgacctcacacccggaagcgcggaagcaccgaacgcacagccgctgcccgaagtatcgcccgccgaaaaccccgcaaacaacccgaaccccaatgagaaccccggcacgagccccaatcccgaacccgaccccgatttgaatcccgatgcaaatcccgatacggacggacagcccggcacaagacccgattcccccgcagttccgggccgcacaaacggcagggacggcgaagacggcggccttttgtgcaaattcttccccgacattctcgcttgcgacaggctgcccgagcccaatccggcagaagatttaaatctgccgtctgaaaccgtcaatgtagagtttcagaaatcaggaatctttcaaaattccgcacagtgtcccgcacctgtcactttcacagtgactgtgcttgattccagcaggcagttcgcgttcagctttgagaacgcatgtaccatagccgaacggctaaggtacatgcttctcgcccttgcttgggcggttgccgcatttttctgtatccgcacagtatcccgtgaagtctag

SEQ ID NO: 39534 - DNA, 4170 bp, Neisseria meningitidis
atgaccgataccgcaccgacagataccgatccgaccgaaaacggcacgcgcaaaatgccgtctgaacaccgccctgccccgccggcaaaaaaacgccgcccgctgctgaagctgtcggcggtactgctgtctgtcctgattttggcagtatgtttcctcggctggctcgccggcacggaagcgggtttacgcttcgggctgtaccaaatcccgtcttggttcggcgtaaacatttcctcccaaaacctcaaaggcacgctgctcgacggcttcgacggcgacaactggtcgatagaaaccgagggtgcagaccttaaaatcagccgcttccgcttcgcgtggaaaccgtccgaactgatgcaccgcagcctgcacattaccgaaatttccgccggcgacatcgccatcgttaccaaaccgactccgcctaaagaagaacgcccgccgctcagccttcccgacagcatagacctgcctgccgccgtctatctcgaccgcttcgagacgggcaaaatcagcatgggcaaagcctttgacaaacaaaccgtctatctcgaacggctggatgcttcataccgttacgaccgcaaaggacaccgccttgacctgaaggccgccgacacgccgtggagcagttcgtcgggggcggcctcggtcggcttgaaaaaaccgtttgccctcgataccgccatttacaccaaaggcggactcgaaggcaaaaccatacacagtacggctcggctgagcggcagcctgaaggatgtgcgcgccgaactggcgatcgacggcggcaatatccgcctctcgggaaaatccgtcatccacccgtttgccgaatcattggataaaacattggaagaagtactggtcaaagggttcaacatcaatccggccgccttcgtaccttccctgcccgatgccgggctgaatttcgacctgaccgccatcccgtcgttttcagacggcatcgcgctggaaggctcgctcgatttggaaaacaccaaagccggttttgccgaccgcaacggcatccccgtccgtcaggttttaggcagctttgtcatccggcaggacggcacggtgcatatcggcaatacgtccgccgccctgctcggacggggcggcatcaggctgtcgggcaaaatcgacaccggaaaagacatcctcgatttaaatataggcatcaactccgtcggcgcggaagacgtactgcaaaccgcgttcaaaggcaggttggacggcagcatcggcatcggtggcacgaccgcctcgcccaaaatctcttggcaactcggcatcggcacggcgcgcacggacggcagcctcgccattgcaagcgaccccgcaaacggacagcggaaactggtgctcgacaccgtcaacatcgccgccgggcaaggcagcctgaccgcgcaaggctatctcgagctgtttaaagaccgcctgctcaagctggacatccgttcccgcgcattcgacccttcgcgcatcgatccgcaacttccggcaggcaatatcaacggctcaataaaccttgccggcgaactggcaaaagagaaattcacaggcaaaatgcggtttttacccggcacgttcaacggcgtaccgattgccggcagtgccgacattgtttacgagtcccgccaccttccgcgtgccgccgtcgatttgcggctggggcggaacatcatcaaaacagacggcggcttcggcaaaaaaggcgaccggcttaacctcaatatcaccgcacccgatttatcccgtttcggtttcggactcgcggggtctttaaatgtacgcggacacctttccggcgatttggacggcggcatccgaacctttgaaaccgacctttccggcgcggcgcgcaacctgcacatcggcaaggcggcagacatccgttcgctcgatttcacgctcaaaggttcgcccgacacaagccgcccgatacgcgccgacatcaaaggcagccgcctttcgctgtcgggcggagcggcggttgtcgataccgccgacctgatgctggacggcacgggcgtgcagcaccgcatccgcacacacgccgccatgacgctggatggcaaaccgttcaaattcgatttggacgcttcaggcggcatcaacagggaacttacccgatggaaaggcagcatcggcatcctcgacatcggcggcgcattcaacctcaagctgcaaaaccgtatgacgctcgaagccggtgcggaacgcgtggcggcaagtgcggcaaattggcaggcaatgggcggcagcctcaacctgcaacacttttcttgggataaaaaaaccggcatatcggcaaaaggcggcgcacacggtctgcatatcgccgagttgcacaatttcttcaaaccgcccttcgaacacaatctggttttaaacggcgactgggatgtcgcctatgggcgcaacgcgcgcggctacctcaatatcagccggcaaagcggcgatgccgtattgcccggcgggcaggctttgggtttgaacgcattttccctgaaaacgcgctttcaaaacgaccgtatcggaatcctgcttgacggcggcgcgcgtttcgggcggattaacgccgatttggacatcggcaacgccttcggcggcaatatggcaaatgcaccgctcggcggcaggattaccgcctcccttcccgacttgggcacattgaagccctttctgcccgccgccgcgcaaaacattaccggcagcctgaatgccgccgcgcaaatcggcggacgggtcggctctccgtccgtcaatgccgccgtcaacggcagcagcaactacgggaaaatcaacggcaacatcaccgtcgggcaaagccgctctttcgataccgcgcctttgggcggcaggctcaacctgaccgttgccgatgccgaagtattccgcaacttcctgcccgtcggacaaaccgtcaaaggcagcctgaatgccgccgtaaccctcggcggcagcatcgccgacccgcacttgggcggcagcatcaacggcgacaagctctattaccgcaaccaaacccaaggcatcatcttggacaacggctcgctgcgttcgcatatcgcgggcagaaaatgggtaatcgacagcctgaaattccggcacgaaggaacggcggaactctccggcacggtcggtatggaaaacagcggacccgatgtcgatatcggcgcggtgttcgacaaataccgcatcctgtcccgccctaaccgccgcctgacggtttccggcaacacccgcctgcgctattcgccgcaaaaaggcatatccgttaccgggatgattaaaacggatcaggggctgttcggttcgcaaaaatcctcgatgccgtccgtcggcgacgatgtcgtcgtattaggcgaagttaaaaaagaggcggcggcaccgctccccgtcaatatgaacctgactttagacctcaatgacggcatccgcttcgccggctacggcgcggacgttaccataggcggcaaactgaccctgaccgcccaatcgggcggaagcgtgcggggcgtgggcacggtccgcgtcatcaaagggcgttataaggcatacgggcaggatttggacattaccaaaggcacggtctcctttgtcggcccgctcaacgaccccaacctcaacatccgcgccgaacgccgcctttcccccgtcggtgcgggcgtggaaatattgggcagcctcaacagtccgcgcattacgctgacggcaaacgaaccgatgagtgaaaaagacaagctctcctggctcatcctcaaccgcgccggcagtggcagcagcggcgacaatgccgccctgtccgcagccgcaggcgcgctgcttgccgggcaaatcaacgaccgcatcgggctggtggatgatttgggctttaccagcaagcgcagccgcaacgcgcaaaccggcgaactcaaccccgccgaacaggtgctgaccgtcggcaaacaactgaccggcaaactctacatcggctacgaatacagcatctccagcgcggaacagtccgtcaaactgatttaccggctgacacgcgccatacaggcggttgcccgtatcggtagccgttcgtcgggcggcgagctgacatacaccatacgtttcgaccgcttctccggttcggacaaaaaagactccgccggaaacggcaaaggaaaataa

SEQ ID NO: 39535 - DNA, 1152 bp, Neisseria meningitidis
atgagtaatagagaccaactttttaaagccccgccgtttgaaaaccacagcccgctgacctggtatcaggctgcctcacaactgcccaacttcatccgcgacgacgcgcaggcagccgccatcgaacacctcgatcggctttggaccgaattgatgatgttcaaacgcaaaagaaaccgttttttaggcaggagtttgcgttccccgcaagtccccaaagggctttatttctatggcggggtcggacgcggcaaaagctttctgatggacgcttttttcggctgcctcccttaccgccgcaaacgccgcgtccactttcatgcctttatggcagaaatccaccagaggctgaaaaccctgaaaagcgaaagcaacccgttgaaatccgttgccgccgagattgccaaagaaacccgcgtattatgttttgacgaatttcatgtcagcgatattgcggatgcaatgattttaggccgtctgctggaaaacctgcttaacgagggcgttgttttggtggcgacttcaaactacgcgccttccgaactctacccgcaaggtcaaaaccggagcagttttcttcccacaatcgcgctcatcgagtccagcctgaccgtcttaaacgttgacggcggtgaagactaccgactgcgtaccctccgccccgccgagattttctttacgcctgccaatgaagaaaatgaggcaaaactggcaaaactgttcaaagaaatgacaggcattaccgatttgaaccccggcatcagcaccatccatggtcgggagattccccacaaagccgagtccggccgtgccatatggtttgatttccgcgcactgtgcttcggcccccgctcacagtccgactatctgtatttggccgaacattatgaaatggtttttatttcaggtttggaacaactctcaccgcaagaaaaggcggaggcgcggcggctgacttggctgattgacgtactctacgatttccgggtcaaactgtgtgccaccggcgcggtagatgtcaaccatatctatacggaaggcgattttgccgaagaatttacccgcaccgccagccggatggtcgaaatgcagtccgaagtttatttggaacagccgcacctgaccctatctcccaaggcttcaggcggataa

SEQ ID NO: 39536 - DNA, 1377 bp, Neisseria meningitidis
atgaaacacatccacattatcggtatcggcggcacgtttatgggtgggattgccgccattgccaaagaagcagggtttgaagtcagcggttgcgatgcgaagatgtatccgccgatgagcacccagctcgaagccttgggcataggcgtacacgaaggcttcgacgcggcgcagttggaggaatttaaagccgacgtttacgtcatcggcaatgtcgccaagcgcgggatggatgtggttgaggcgattttgaaccgcgggctgccttatatttccggtccgcaatggctggctgaaaacgtgctgcaccatcattgggtactcggcgtggcggggacgcacggcaaaacgaccaccgcgtctatgctcgcgtgggttttggaatatgccggactcgcaccgggcttccttattggcggcgtaccggaaaatttcggcgtttccgcccgcctgccgcaaacgccgcgccaagacccgaacagccaatcgccgtttttcgttatcgaagccgacgaatacgacaccgcgtttttcgacaaacgctccaaattcgtgcattaccgtccgcgtaccgccgtgttgaacaatctggaattcgaccacgccgacatctttgccgacttgggcgcgatacagacccagttccactacctcgtgcgtaccgtgccgtctgaaggcttaatcgtctgcaacggacggcagcaaagcctgcaagatactttggacaaaggctgctggacgccggtggaaaaattcggcacggaacacggctggcaggccggcgaagccaatgccgacggctcgttcgacgtgttgctcgacggcaaaacggccggacgcgtcaaatgggatttgatgggcaggcacaaccgcatgaacgcgctcgccgtcatcgccgccgcgcgtcatgccggtgtcggcattcagaccgcctgcgaagccttgggcgcgtttaaaaacgtcaaacgccgcatggaaatcaaaggcacggcaaacggcatcaccgtttacgacgacttcgcccaccacccgaccgccatcgaaaccacgattcaaggtttgcgccaacgtatcggcggcgcgcgtatcctcgccgtcctcgagccgcgctccaacaccatgaaactcggcacgatgaagtccgccctgcctgtaagcctcaaagaagccgaccaagtgttctgctacgccggcggcgtggactggaacgtcgccgaagccctcgcgcctttgggcggcaggctgcacgtcggcaaagacttcgatgccttcgttgccgaaatcgtgaaaaacgccgaagcaggcgaccatattttggtgatgagcaacggcggtttcggcggaatacacggaaagctgctggacgctttgagatag

SEQ ID NO: 39537 - DNA, 1458 bp, Neisseria meningitidis
atgaaaccaaccatcgcgcttgtcggccgccccaacgtcggcaaatctactttattcaaccgtttgacgcgcaccaaagacgcgctcgtacacgacctgcccggtctgacgcgcgaccgccattacggacacggcaaagtcggcagcaaaccttatttggtcatcgataccggaggtttcgagccggttgtggacagcggcattttgcacgaaatggcaaaacaaaccttgcaggctgtcgatgaagctgatgcggttgtgtttttggtggacggccgtaccggcctgaccccgcaagacaaaatcattgccgaccgcctgcgccaaagcccgcgccctgtttatctggcggtaaacaaaggcgaaggcggcaacagggccgtgcttgccgccgagttctacgaacttgctttgggcgacccttatgttatttcaggtgcgcacggcgatggcgtgtattatctgattgaagatattttggaaaccttcccagagccggaagccgaagaagccgatgcaaaacatcccgtctttgccgtcatcggccgtccgaacgtcggcaaatccacactggttaacgccatcctcggcgaagagcgcgtgattgctttcgatatggcaggcacgacacgcgacagcatccacatcgatttcgaacgcgaaggcaaaccgtttaccatcatcgataccgcaggcgtgcgccgtcgcggcaaagtggatgaagcagtagaaaaattctccgttatcaaagcgatgcaggcggttgaagcggcaaacgtcgctgttttggtattggacgcgcagcaggacatcgccgaccaagatgcgacgattgccggttttgctttggaagcaggccgcgccttggtggttgccgtcaacaaatgggacggcatcagcgaagagcgtcgcgagcaagtgaaacgcgatatcaaccgcaaactgtatttcctcgattttgccaagttccactttatttccgcattgaaagagcgcggtatagacggtttgtttgacagcattcaggctgcctacaacgcggcgatgattaagatgccgacgccgaaaatcacgcgcgtattacaaagcgcgatcgagcgtcagcaaccgccgcgtgccggcttggtgcgtccgaaaatgcgttatgcccaccaaggcggcatgaaccctcccgtaattgtggtacacggcaattcgctgcacgcgatttccgacagctatacgcgctatctgacccaaacgttccgcaaagccttcaacctgcaaggcacgccgttgcggattcaatacaatgtttcggaaaacccgtatgaaaatgcggaagacaaaccgaagaaaaaaccgctgcgccgcgtcagcctgagcaaccgtattgagaaacgcgaaggccgcaaagaagagaaaaaccgcttcaagaagaaaaccaaagtcagtgtgaaaaaacaattcagcaaataa

SEQ ID NO: 39538 - DNA, 2307 bp, Neisseria meningitidis
atggcgaaaaacctattaatcgtcgaatccccgtccaaagccaaaaccctgaaaaaatatttgggcggcgattttgaaatccttgcatcctacggacacgtccgcgaccttgtccccaaaagcggcgcggtcgatcccgacaacggctttgcgatgaaataccaattgattagccgcaacagcaaacacgtcgatgccatcgttgccggtgccaaagaagctgaaaacatctacctcgccaccgacccggatagggaaggcgaagccatttcctggcatcttttggaaatcctcaaatccaaacgcggcttgaaaaacatcaagccgcagcgtgtcgtgttccacgaaatcaccaaaaacgccgtgctcgatgccgtcgccaatccgcgcgaaatcgaaatggacttggtcgatgcgcaacaagcccgtcgcgctttggactatttggtcggctttaacctttcgccattgttatggaaaaaaatccgccgcggtttgagcgcgggtcgtgtgcaaagtcccgctttgcgcctgatttgcgaacgcgaaaacgaaatccgcgcgtttgaagcgcaggaatattggacggtgcatctcgacagccacaaaggccgcagcaagttcaccgccaaactcgcccaatacaacggcgcgaaactcgaacaattcgacctgccgaacgaagccgcgcaagccgacgtgttgaaagaactcgaaggcaaagaggccgtcgttaccgccattgaaaagaaaaagcgcagccgcaatcccgccgcgccgttcaccacttctaccatgcagcaggatgctgtgcgcaaactcggcttcaccaccgaccgcaccatgcgtaccgcccaacagctttatgaaggtatagacgtagggcagggcgcgatcggtctgattacctatatgcgtaccgacagcgtgaatttggcggatgaagcgttaaccgaaatccgccattacatcgaaaacaaaatcggcaaagaatatctgccgagtgccgccaaacaatacaaaaccaaatccaaaaacgcccaagaagcgcacgaagcgatccgcccgacttccgtgtaccgcacgcccgaaagcgtcaaacccttcctgagcgcagaccagttcaaactctatcaaatgatttggcagcgcaccgtcgcctgtcagatgacgcctgccaaattcgaccaaaccaccgtcgatattaccgtcggcaaaggcgtattccgcgtaaccggacaagtgcaaaccttcgcaggcttccttagcgtttacgaagaaagcaacgacgacgaagagagtgaagacagcaaaaaactacccgaaatgagcgaaggcgacaaattgcccgtggataaactttacggcgaacaacactttaccactccgccgccgcgctacaacgaagcgacgctggttaaagcccttgaagaatacggcatcggccgcccttcgacctacgccagcatcatctccacgctcaaagaccgcgaatacgttacccttgagcaaaaacgcttcatgcccaccgacacaggcgacatcgtcaacaaattcctgaccgaacacttcgcccaatacgtcgattaccacttcaccgccaaactcgaagaccagcttgacgaaattgccgacggcaaacgccaatggattcccttgatggacaaattctggaaaccgttcatcaaacaagtggaagaaaaagaaggcatcgaacgcgccaaatttaccacgcaggaacttgatgaaacctgcccgaaatgcggcgaacacaaactgcaaatcaaattcggcaaaatgggtcgttttgttgcgtgtgccggttatcccgagtgcagctacacgcgcaatgtcaacgaaaccgccgaagaagctgccgaacgcatcgccaaagccgaagccgaacaggccgaactcgacggacgcgagtgcccgaaatgtggcggtcgcctagtgtacaaatacagccgcaccggcagcaaattcatcggctgcgccaactatccgaaatgcaaacacgtcgagccgctggaaaaaccgaaagataccggcgtccagtgtccgcaatgcaaaaaaggcaacctcgtcgagcgcaaatcccgctacggcaaactgttttacagttgcagcacctatcccgactgcaactacgccacttggaacccgcccgttgccgaagaatgcccgaactgccattggccggtcttgaccatcaaaaccactaaacgctggggtgtggaaaaagtctgcccgcaaaaagaatgcggctggaaagaacagatcgaaccgcctgcaccgaaagagtga

SEQ ID NO: 39539 - DNA, 1083 bp, Neisseria meningitidis; identical to SEQ ID NO: 38655

SEQ ID NO: 39540 - DNA, 237 bp, Neisseria meningitidis
atgggtttgattgctatcgcatgtggtttgatcgttgcattgggtgcattgggtgcctctatcggtatcgcaatggtcggttctaaatatttggagtcttctgcccgtcagcccgaactgatcggtccgctgcaaaccaaactgttcctgattgccggtttgattgatgccgcattcttgattggtgtcgccattgcactgctgttcgccttcgttaacccgtttgcaggtgcataa

SEQ ID NO: 39541 - DNA, 1176 bp, Neisseria meningitidis; identical to SEQ ID NO: 38454

SEQ ID NO: 39542 - DNA, 228 bp, Neisseria meningitidis
atgaaagtgtatgtttttaaaattagtaatgaaaacggtaagttaaagatagaactccccgaaatcccaatgggtaagcaaattgacgaagttgatttgattgctgggctaaccacggaatttattgcaagtatgttacgtgatgcccaaaaagatcgtcgcaaattcgtaatcgacgcatcaaatcaattggctgcaatccagacatatcaaaaaatcttcaattaa

SEQ ID NO: 39543 - DNA, 201 bp, Neisseria meningitidis
atgtccgttcaaaccgttacatataataagttttttatgaacacaaaccaacctgccgtttacgacccgttgacacgcgcgctgcactggctgaccgttgccggtttcatcggcattctgaccaccattgtcctgtggacgatttatagtggattaacaaaaatcaggacaaggcgacgaagccgcagacagtacaaatag

SEQ ID NO: 39544 - DNA, 360 bp, Neisseria meningitidis
atgccacgcgtaaaacgcggtgttaccgcccgtgcccgtcaccaaaaaatcttcgcgttagccaaaggctatcgcggtcgtcgtaaaaacgtttaccgagttgccaagcaggcggtaatgaaagccggtcaatacgcataccgtgaccgccgccaacgcaaacgccaattccgtcaattgtggattgtccgtatcaatgcaggtacgcgtgaaaacgggttgtcttacagcaaatttatgaacggtctgaaacgcgcctctattgaaatcgaccgcaaagtattggctgatttggccgtgttcgataaagccgcttttgcacaattggttgaaaaagccaaagctgctttggctgcttaa

SEQ ID NO: 39545 - DNA, 1095 bp, Neisseria meningitidis
ttgattttttcttttttctctggtgcgggctttttggatttgggcttcgagttgtcaggatttgatattgccttcgttaatgaagtccatcccccatttttggaagcatataaatactctcgaagcagaatggatatcccgaagcctaaatacggatattttaagggtagtattgacgaatgtctttatgctgagaaagcaaaagatttggctggctgggttaaaaaggaaaaacaaaatggcattattgtcggatttattggaggtcccccatgtccggatttttctattgcagggaaaaataaaggtaaggatggggagaatggtaagttatcacaaagttatgtggatttaatttgtaaaaaccagcctgatttttttgtatttgagaatgtgaaaggactatataggactgccaagcatagggagtttttcaatgcgttgaaacggcaactttctgattttggatatgtatgcactgaaaaactcatcaatgccatcgaatacggcgtaccgcaagacagggaaaggattatcctagtgggttttttgagtcagcatgttgatgctttgcagaagtttgattgggatgctcatatttcattccctgatgccttggaaaaagattggcctacgacagaagaagtaggaagagtggtcagtcagcctgcaaacatataccctgagttgaccgttcagtattggttcaatcgcaatggggtggatacacacccgaatgcgagcaaacacttccaaccaagagcgggtttagaaaaatttcaaaccataagcgaaggggatgataaaaagaagtcctataaacgcctacaccgctggcgttattctccgactgctgcatacggaaacaacgaagtccacattcatccctatctgccaagaaggatttccgctgcggaggcattggcaatacagtctttgccgaaggagtttgagctgcctgataacatgacattgagcaatatgttcaaaactataggcaacggtgtaccgtttttggcagcaaaagggatagcgatgacattaaaatcttatttggagaatcactatgagcggacaaaaactgacggctgctaa

SEQ ID NO: 39546 - DNA, 1305 bp, Neisseria meningitidis
atgaaaaaacacatatgggcggcatctttgctgccggcatccctatcggcagaacctttaaactggtggaagccttattccgccgtcaattcgggcgataccgcctgggtgatgactgcggctgccttggtactgttgatgacgcttcccgggctggctttattctacggcggtatggtgcggaaaaaaaacctgctctcgacgatgatgcacagcttttccatcgcgacattggtgggcatcctttgggtcgccgtcggctattctttagcgttcacgccgggaaatgcctttatcggcggtttggggcgtgtatttttaagcgggatgcagatagacgctaccgcacagatgctgaccgtgtcgcccaatgcgccgactgttcccgaaccggtatttatgttttttcagatgacgtttgccattatttcgaccgccattattaccggcgcgtttgccgaacggatgaaatattcggcaatgatgctgttttcgggcatatggtttttattggtttatgtgccgggcgcgcattgggtgtggggcggcggctttatgagcaagggcggcgtattggattatgccggcggtacggtggtgcacatcaatgccggtatcgcgggactcgtcgccgccttggttttgggcaggcgcataggctacgggcgcgaggcgatgcctccgcacaatatggcgatgacactgatcggcgcggcaatgttgtggttcggctggttcggctttaacgccggatcggcgcttgcggcagacgcggcggcgggtatggcgatggcggtaacgcaggtgtcggccgtattcggcgcggcaggctggcttgcctgcgaaaaaatagcgggacacaaaccttccgctttggggctggcttccggcgcggtttccggtctggtcggcatcacccctgccgccggctttaccggcccgtcgggcgcggccgccatcggtatattgactgccgccgcgtgctttgtgtccgtcaccgtcgtcaaacacaaattgcgttacgatgattctttggacgctttcggcatacacggattcggcgggctggtgggcggaatattgaccggcatctttttcgacaaccgcattttcggcggggatgcggcagtttggcagcagttgtggatacaggtaaaagacgggttcgttatggcggcatacagcgggctgatgagttgggcgattttgaaggtcgtggggaaaatctgcggcggcctgcgcgtcggcaaggatgtcgaacgcgaaggtttggatctgaatatccacggcgaacgcgtggaataa

SEQ ID NO: 39547 - DNA, 729 bp, Neisseria meningitidis
atgcttttaggtgtcaacatcgaccacatcgccaccgtccgcaacgcgcgcggcacgacttatcccagccccgtggaggcggcactggttgccgaaacgcacggtgcggacctgattaccatgcaccttcgcgaagaccgccgccacatcaaagacgcggacgtgtttgctgtcaaaaacgccatccgcacgcgcctgaaccttgaaatggcgttgacggaagaaatgctcgaaaacgcgcttaaagtgatgccggaagacgtgtgcatcgtgccggaaaaacggcaggaaatcacgaccgaaggcggtttggacgtattggcgcaacaggaaaaaatcgccgaattcaccaaaatcctgaccgacgcgggcatacgcgtgtctttgtttatcgatgccgacgacaggcaaatccaagccgcccgtgatgtcggcgcgcccgttgtcgagctgcacacaggcgcgtatgccgacgcgcgcagccacgccgaacaaatcaggcagttcgagcgcatccaaaacggcgcgcatttcgccggagatttgggcttggtcgtcaacgccggacacggactgaccatacacaacgttacccccatcgcccaaatcctcgccatccgcgaactgaacatcgggcattcgctgattgcccaagccctcttcctcggactgcccgaagccgtgcgccaaatgaaggaggcgatgttcagggcaaggctgctgccgtaa

SEQ ID NO: 39548 - DNA, 1263 bp, Neisseria meningitidis
atgtcaaacacacaaaaacagcttgcccttgccaaagcggcaaaaaaatccgtcaacacggcggatacggaagaaaaaaaccgcgcgctgcttgctatggcggacagtctggaagcggcgacggcagatattttggcggcaaaccgtcaagacttagaagcggcagcaggcaaaattcccgaaagcatggccgaccgccttttgttggacgaaaaacgcattggcgcgatggcggacggcatcagggcggttgccgcgctgcccgaccccgtgggcgaaatactggaaacctcgactttgcccaacggcttggaaatcgtcaaaaagcgcgtggcgatgggcgttatcggcattatttacgaaagccgcccgaacgttacttccgatgcggcggctttggcactgaaaagcggcagcgcggtcgtactccgcagcggcaaagatgcattccaatccgcacgcgccatcgttgccgccctgaaaacggggttggcacaaacccgcatcgaccccgacgcgctccagttgattgaagacaccgggcgcgaaagcagttacgaaatgatgagggcgaaagattatctagatctgctgattccgcgcggcggggcggggctgatacgggcggtggttgagaatgccgtcgtgccggtcattgaaacgggaacgggcattgtccacatttatatcgacaaggacgctgattgggataaggcactccgtatcgtgtacaacgccaaaaccagccgtccgtccgtgtgcaactcgatggaagtgctgctggtgcatgaagacattgctgccgacttcctgcccaagctcgaacgactgttggttcgcgaccgcatagaagccggactgccgcccgtccgcttccgtttggatccgcaggcggcgcggcatatcggcggcgaagcggcgggtgcagacgatttcgataccgagtttttagactacatcctcgctgtgaaaaccgtcgcttcggtcgaagaggcggtctggcacatcgaaacccacagcacacaccattcagacggcatcgttaccgaaaaccgccacgctgcggactatttcacgactcatatcgattctgccgccgtgtatgtcaacgcgtccacgcgctttaccgacggcggcgaattcggcttgggttgcgaaatgggcatctccacgcaaaaactccacgcccggggcccgatgggtttgaaagagctgacgagttacaaatacatcgtacaaggcacgggacaggtcagggaataa

SEQ ID NO: 39549 - DNA, 381 bp, Neisseria meningitidis
atgcctttaaaattccaaccaagggaacgttcggttatcatgtgcgactttcgcggttatgaagaaccggaaatggtcaagaaacgccctgtcgtcgtcatagcgcgaaacaggcacaacggcaaactggtaacggtcgtacccttaagcagcacagaacctgtccctttggcggactaccaccacaaaatgagtggaaaccccttaccggacaagccgcacatccaatgttgggcaaaatgcgacatgacggcaacagtcggattggcacgattagaccgatacaaacccaaagggcgcgaccgctgcattccaataatcagtgaagaggattttcaggcgattaaaacagccgttgccaaggcattcaaactgtactag

SEQ ID NO: 39550 - DNA, 231 bp, Neisseria meningitidis
atggaagaagttaaggcaaacccacagggcaaaactcctgcgagaatacctcctatgtccgatactaaaaatggttggttagcaaaagacggttgggttaagcgtgttcaaaacgtaaacaaaattgaaatacattacattgaaaacacaagaaccggtgaaaaaacagattttaagtttattgaaaacacaagaaccggtgaaaaaacagattttaagtttaaggattag

SEQ ID NO: 39551 - DNA, 762 bp, Neisseria meningitidis
atgactgaattcgtcgtattgattccggcgcggctggattcatcgcgcctgcccggaaaagccttggcggatatccacggtaaaccgatggtcgtgcgcgttgccgaacaggcggcaaaaagtaaagccgtgcgcgtcgtcgttgccaccgaccatcccgatattcagacggcctgtcaggcgcacggcgtcgaagtcgtcatgacttcaaaccggcacgaaagcggcacgacgcgccttgccgaagcctctgccgcgctgaagctgccgccgcatctggtggttgtcaacgtacagggcgacgagccgctgattgcccccgaactcatcgaccgcactgccgaagtcttggtggaaaacaacgtacagatggcaactgcggcacacgaattgcacgatttcgacgaattgatgaatcccaatgccgtcaaagtcgtcctcgacaaaaaccgcaacgccatctacttcagccgcgccccgattccctatccgcgcgatgcgatgcgtgcaggaaaacgcgaaatgccgtttgaaaccgccgtcctgcgccatatcggcatctacgcctaccgcgtcggcttcctgcaacgctacaccgaaatgagcgtttcgtcgctggaaaccattgaatcgctggagcaactgcgcgtcctgtggcacggctactcgattgccgtcgaaaccgccaaagaagcccccgccgccggtgtggatacgcaggaagatttggacagggtccgcgccgtatttcagaccgtataa

SEQ ID NO: 39552 - DNA, 780 bp, Neisseria meningitidis
atgagcgcaaccattcccccaaaaatcatccgatacgacagcaatccgaccgatgtctattttttcggcacttgcgtccttgatctttttatgcccgaagcaggcatggatgccattaccctaatcgagcaacagggcatacgcgtccatttcccgatggcgcaaagctgctgcggccagcccgcctattcatccggccatccgaccgaagccttcgatgtcgccagagcgcaactcgaccttttccccgaggagtggccgattgtcgtaccgtccggttcgtgcggcggtatgatgaagcaccattggccgacgctgtttaaaggcagcgagtacgaggaaagggctgtggattgcgccggccgcatcatcgagtttacccatttcctgcttgccatcggtttcaaacccgaagacaagggcgaaccgctcaaagtcgccgttcacacttcctgcgccgcccgccgcgaaatgaatgtccatctttcaggctggcaactgattgacggtatggaaaacgtcgaacgcatcgtccacgaccacgaaagcgaatgttgcggcttcggcggcacattctccgtcaaacaagccgatatttccggcgcaatggtaacagacaaagtcgccgcgctgaaagaaaccggcgcaaccgaaatcatcagcgcggactgcggctgtatgatgaacatcggcggcaaaatcgccaaggacgagccggatatgccgcgtccgaaacatatcgcatccttcttgttggaacgcaccggaggcaaagcatga

SEQ ID NO: 39553 - DNA, 216 bp, Neisseria meningitidis
gtgtttaagcttggcgtttatgcctgtctcggactgtttgccggctgggtgctgctgctgattgtgcaactttggttttcttttctcgaagcggaattgttcttcaaaatcacactgactatggcggggctgtttgtcatcatcctcgccgccttgctggtattcggccagtatttttccgaaaagaaaatgaaagacgacgggtttatcaactga

SEQ ID NO: 39554 - DNA, 387 bp, Neisseria meningitidis
gtggttgtcttcggcattctgaaacgcaacggacgggtctataccgttgtcgtaaacaatgccaagtctgaaacgttactccctgtcatcaaaaagaaaatcatgccggacagtattgtttataccgatagtctgagcagctgcgacaagttggacgtgagcggttttatccattaccgcatcaaccattccaaggagtgtgcagaccgtcagaaccacattaacggcattgagaacttttggaatcaggcaaaacgcgtcttgcgaaaatacaatggaatcgatcgcaaatctttcccgctgttcttgaaagaatgcgaatttcgatttaacttcggcacaccgtctcaacagcttaaaatcctgcgggattggtgtgggatttag

SEQ ID NO: 39555 - DNA, 1134 bp, Neisseria meningitidis; identical to SEQ ID NO: 39136

SEQ ID NO: 39556 - DNA, 270 bp, Neisseria meningitidis
atgctcaaacaatccatcgaaatcatcaacaaactcggacttcacgcccgtgcctccagcaaattcacccaaaccgcgtctcagtttcaaagcgaagtctgggtaacgaaaaacggcagccgcgtcaacggcaaaagcatcatggggctgatgatgctcgccgccgccaagggtacggtcatcgagctggagacggacggcgcggacgaggcggaagcgatgcgcgccctgtccgacttaatcaacggctacttcggcgagggcgaataa

SEQ ID NO: 39557 - DNA, 1398 bp, Neisseria meningitidis
atgagccaaggcaaaatcgtacaaattatcggtgcggttgttgacgtggaatttccacgcgacatgattccgcgcgtttacgacgctttgaaattagacgaaaacggtctgactttggaagtccaacagcttttgggcgacggcgtagtccgtaccattgcgatgggcagctcggacggtttgaaacgcggcatgactgtgagcaataccggtgcgcccattactgtgccggtaggtaaaggtacgttgggacgcattgtcgatgtattgggaacgcctgttgacgaggcaggtccaatcgataccgacaagagccgtgccatccaccaagccgctcctaagtttgacgaactgtcttccacaaccgaattgctcgaaacgggcattaaagtgattgacttgctgtgtccgtttgccaaaggcggtaaagtaggtctgttcggcggtgccggtgtgggtaaaaccgtgaacatgatggaattgatcaacaacatcgccaaagcgcacagcggcttgtccgtgttcgcaggcgtgggtgagcgtacccgcgaaggtaacgacttctaccacgagatgaaagattccaacgtattggataaagtggcaatggtttacggtcagatgaacgaacctccgggcaaccgtttgcgcgtcgcattgaccggtttgaccatggcggaatacttccgtgacgaaaaagacgaaaacggcaaaggccgcgacgtattgttcttcgtggacaacatctaccgttacactctagctggtaccgaagtatccgcattgttgggccgtatgccgtctgcagtgggctaccaaccgacattggcagaagaaatgggtcgtttgcaggagcgtattacctctacccaaaccggttctattacttctatccaagccgtatatgtacctgcggacgacttgaccgacccgtctccggcaacaacgttcgcccacttggacgcaaccgtcgtattgagccgcgatattgcctctttgggtatttacccggcagtcgatccgcttgattccacttcgcgccaactggatccgatggtcttgggtcaagagcactacgacgtggcgcgcggcgtacagtccaccctgcaaaaatacaaagaattgcgcgacatcatcgccatcttgggtatggacgaattgtctgacgaagacaaactgaccgtaatgcgtgcgcgtaaaatccaacgcttcctgtcccaaccgttccacgttgccgaagtgtttacaggttctccgggcaaatatgtcgccctgcgcgataccattgccggcttcaaagccatcttgaacggcgaatacgatcatctgcccgagcaggcattctatatggtcggcagcattgaagaagcggttgagaaagcgaaaaccttaaactga

SEQ ID NO: 39558 - DNA, 972 bp, Neisseria meningitidis
atgtccgccaagttccaacaagaaaccctcaaatcccgtttcgcgcaagccaaagtcctggttgtcggcgacgtgatgctcgaccgctattggttcggcgatgtgtcccgtatttcgcccgaagcccccgtgccggtggcgaaaatcggacgaatcgaccaacgcgcgggcggagcggcaaatgtcgcgcgcaacatcgcttcgttgggcggcagggcagggctgttgtccgtaaccggcaacgacgaagccgccgacgcgctcgatgcgctgatggtgcaggacggcgtcgcctcctatctgatgcgcgacaaacaaatcgccaccaccgtcaaactgcgcgtcgtcgcccgcaaccagcagcttatccgtcttgattttgaagaacatcccaactgcgaagtgttggaacaaatcaagcagaaataccgcgaaatcttgcccgaatacgacgcaatcattttttcagactacggcaaaggcggcctgtcgcatatctccgatatgatcgattgggcgaaacacgccggcaaaaccgtcttaatcgaccccaaaggcgacgattacgaaaaatatgtcggtgcaactctgattacgcctaaccgcgccgaattgaaagaagtggtcggcagttggaaaaacgaaagcgagctgaccgaaaaagcgcaaaacctgcgccgccacctcgacctgaccgccgttttactgacccgaagcgaagaaggcatgaccttgttcagcgaaggcgaaccgatttaccagcccacccgcgcccaagaagtttacgacgtatccggtgcgggcgacaccgtcattgccggaatgggcttgggtttggcggcaggctgcaccatgcccgaagccatgtaccttgccaatactgcggccggggttgtcgtggcgaaactcggtacggcggtttgctcgtttgccgaattgatcaaggcattgtcagggcaatcaacaatgtag

SEQ ID NO: 39559 - DNA, 2847 bp, Neisseria meningitidis
atgtgcaagcatcatccccaacattcgcacgacaacgacaccatccgcatccgcggcgcgcgcacgcataatttgaaaaacgtcgatttggacattccgcgccacaagctcgtggtggtaacaggattgtcgggcagcggcaaatcgtcgctagcgtttgatactttatatgccgaaggccaacgccgttatgtcgagagcctgtccgcctatgcgcggcagtttttgcagatgatggacaaacccgatgtcgatttgatcgaaggcctgtcgcccgcgatttccatcgagcagaaatccaccagccacaatccgcgttccaccgtcggcacggttacggaaattcacgactatctgcgccttttgtacgcacgcgtcggcacaccctactgccccgaacacaagctgccgctatccagccaaaccgtatctcaaatggttgatgccgtcttaaaactgccggaagacacgcgcgtgatgattctggcgccggcggtacgagagcgtaagggcgagtttgtcgatttctttgccgacttgcaggcgcagggttttgcgcgcgtgcgcgtggacggcgaagtctatcagttggacgaagtgccgaagctggaaaaaaacatcaagcacaatatcgacgtggtcatcgaccgtgtaaaagtgaaggcggacatcaagcagcggctggcggaaagttttgaaaccgcgttacgccacggcaacgagcgcgcgctggcgatggagatggacagcggcgaagaacattggttttccgcgcgtttcgcctgccccgtatgttcgtacagcctgccagaattagagccgcgcctgttttccttcaacaacccgatgggttcctgcccgacttgcgacggcttgggcaacaccaatttcttcgaccccgaaaaagtggtcgcccaccccgaattgtcgctggcttcgggcgcgattgacggctgggacaaacgcaaccagttctatttccaaatgattcagtcgctggcacggcattacggttttgatgtgcaggctgcttgggaaaccctacctgcaaaaatcaaaaaagtcgtgttgcacggttcgggcaaggaagtcattgatttcacctacctatccgaacgcggcaccaccttcaaccgcagccacgccttcgaaggcatcattcccaatctcgaacgccgctaccgcgaaaccgacagcgaaaccgtgcgcgaaaaattgcgcgaataccaaaaccaccgcgcctgcccgagctgcggcggtgcacgtttgcgcaaagaagcgcgctacgtttacgtcagcggcgaaccgttgcacgaagtctccgcctggccgctgaccaaaacccaccgattctttgaaacgctggatttggacggcaacaaaaaacaaatcgccgaaaaaatcctcaaagaaatcaccgagcggctcggctttttgattaacgtcgggctggattacctaaatttaagccgctccgccgaaaccctttccggcggcgaagcccagcgcatccgcctcgccagccaaatcggcagcggtctgaccggcgtgatgtacgttttggacgaaccctccatcggcctgcaccagcgcgacaacgaccgcctgcttgccaccctcaaacgcctgcgcgatttgggcaacagcgtgattgtggtcgaacacgacgaagacgccatccgcgaagccgatttcgtcgtcgatatgggccccggcgcaggcgaacacggcggcaacgtactgattgccgacacgcccgaaaacgtcgccaaatgcgaaaactccgttaccggacaatacctcagcggcaaaaaatccattgccgtgccgtctgaacgcacgcccgtcaatcccggccgaatgctcgtcctcaaaggcgcgcgcggcaacaacctcaaaaacgttaccctcgaactgccgctcggtttgattacctgcatcaccggcgtatccggcagcggcaaatccaccctgattaacgacaccctcgccaaaatcaccgcccgcgaactcaaccgagcccaagaagaacccgccccatacgacgacatccgcggcctcgaacacctcgacaaagtcatcaacgtcgaccaatcccccatcggccgcaccccacgctccaatcccgccacctacaccggcctgttcacccccatccgcgaactcttcgccagcgtacccctctcgcgtgaacgaggctacaacgtcggcagattctccttcaacgtcaaaggcggccgctgcgaagcctgccaaggcgacggcgtgattaaagtcgaaatgcacttcctgcccgacgtgtacgtcccctgcgaagtctgccacggcaaacgctacaaccgcgaaaccctcgaaatccaatacaaaggcaaaaacatcagccaagtcctcgacatgaccgtcgaagaagcctgcgaatttttcgacgccgtccccaccgtatcgcgcaaactgcaaaccctgatggacgtaggtctcggctacatccgcctcggccaatccgccaccaccctctccggcggcgaagcccagcgcgtcaaactcgccttggaactctccaaacgcgacaccggcagaacgctctacatcctcgacgaacccaccaccggcctgcacttcgccgacatcgccctgctgctggaagtgataggccgtctgaaaggcaaaggcaactcgattgtgattattgagcataatctggatgtgattaaaactgcagattggattgtggatttagggcccgaggggggcgatggcggagggaggattattgcttcaggtagcccggaggaagtggcgaaggttaaggggagttatactgggaagtatttgaagaatatactttaa

SEQ ID NO: 39560 - DNA, 2559 bp, Neisseria meningitidis
atgcctgcaaacctgtcttcagcactggaaaccttcaaacagcagcgcgatgccgccgaagcgcattatttgaaagccaaccgcgtgtcggtatttttcagggaatatacggcggcactcgaaaccttactggcggcattgtgggcagagtattttcaaaacagcgcgttatgcctgatggcggtaggcggcttcggacgcggcgaactgtatccctgttcggatgtggatttggcggttgtctcccctgccccgctttcagacggcattcaggaacagattgcccggtttgtccaaaccctgtgggactgcaaactgatgccgtctgtaaaaagcggcagcgttgatgaactatgtgaaagcgtgcgcaatgatattacgggggacacagcgtttttagaggctaggtttttgtttggcaaccgccaaacggcggataaactagcggaaaaaatgaacgcgcagcgcaatgtggcggcgtttgtcgaggcaaaactggtggagatggaacaccgccacgccaaatcgcaaggttcgggggcagtattggagccgaatatcaaaagctgtccgggcggtctgcgcgatatccacaccctgctttggatagcgaaggcgcaaggcttggcgaccgacctgcccgacctgctcaaacagcggattttgacgcgtgccgaagccggtatgctttcgcacggctaccgccgcctcgcccacatccgcatccatctgcatttaaacgccaatcgcgccgaagaccgcctgctgttcgatttgcagccgcaagtcgccgaaagcatgggttatgaaggcttgaacctccgccgccaaagcgaagaactgatgcgcgtgttttaccgcgcgattaaaaccgtcaaacaactgggcggcatcctcacgcctatgctgcaaagccgcgtttcctccaccccgttgcgcgttaccctgcggattgacgacgactacatccaagtcaacaaccaaatcgccgcgcggcacaccgatatttttttcagacggcccgaacacattttcaaaatcgtcgaaatcatgcagcagcgcaacgatattaccgcgctcgaaccgcaaaccctgcgcgcatggtggggcgcgacgcgcaaaatcaaccgcagcttctaccaaaattctgaaaaccgccaccgcttcgccggctttttccgcaacggcaacggactgacccaaaccctgcgcttcctcaacctctacggcgtattgggacgctacctgcccgcgtgggaaaaaatcgtcggcctgctccagcacgacctgttccacatttatcccgtggacgaccacatcctcgccgtcgtccgcaacgtccgccgccttgccttggatatgcacagccacgagctgccctatgcctccgcgctgatgcagtcctttgaaaaacaagacatcctctatctcgccgccttcttccacgacatcgccaaaggacgcggcggcgaccacgccatacaaggcatcgcagacgcgcgccaatttgccgctgaccacttcctgaccggagaagaaagcgacctgctcgcctggctggtcgaaaaccacctgctgatgtctgccgtcgcccaaaaagaagacatccaagaccccgacgtactcgatgctttctgcaaacgcgtccaaacccacgaacgcctcagcgcgctctaccttctgaccatttccgacatacgcggcaccaatcccaagctgtggaacgcatggcgcgccagcctgctggaaagcctcttccatgccgccggacgctaccttacaggcaacggcggcaacccgcacaccctcttcggccgccgccggcaggaagccgccgacttactcacccgcgccgccgtccccgaaaaacagcagaaaaaactatggaacgcgctcggttccgcctacttcgcccgccaccagtcccgcgaaatcctgtggcacgccgccaacctagtccacgactttgaaacccccatcgtccgcagccgcatcctgcccaaaagcgacagctttcaagtcatggttttcatgcccaacggcccgcgcctgttcgcccgcctctgccgcatcttcagccgccacggcttcgatatcctcgccgcccgcgcctttattaccgaacacgactacatcctcgacaccttcatcgtgcaaatcccctcgcagcacgctcccgaagactaccccgacatccaaagcgcgctcgaagccgaactcaacagctttatccacggacacaccgttgccgaaatctccagccatagccgccgcatcagccgccgcagccgctacatgccgatcgcgccaagcatcaccatcacccccgaagaagactatccggactggtactccgtcgaaattaccgccgtcaaccgccccttcctgctcgccgatatggcggaagtctttttcgcccacaacgtcagcctgcgctatgccaaaatctccacactggatgaacgcgccgaagacagttttaccgtttttagccccgacctgaaaaacccaaaaatccagtcctcattgaagcaggctttgctggaacagttgacataa

SEQ ID NO: 39561 - DNA, 1287 bp, Neisseria meningitidis
atgacggcacaacaccagaccccgctccgcttcattaccgccggcagcgtcgatgacggcaaaagcaccttaatcggacgactgctctacgacagcaaagccctgctgtccgaccaaatcaaaaccttggaatccggcaaaagcaaaggtttgaaagaagccatagacttctccatcctgaccgacggactggaagccgaacgcgaacagggcattacgatcgatgtggcataccgctatttttccacggcgaaacggaaattcatcatcgccgacacgccggggcacgaacaatacacgcgcaatatggttacgggcgcaagcaccgcttcggcggcagtcgtgctggttgacgcatcccaactggatttcggcgcgcagcccttgcagcttctgccgcagaccaaacgccattccgccatcctccgccaactcaactgcccgcatattgtggtggcggtcaacaaaatggacctgctggattacagcgaagacaaattcaacgccattgtggaggcataccgccgacttgccgaacagctcggtttgaaagacgcgcatttcgtaccggtgtccgcactcttgggcgacaacctcgtttaccccggaggcaatatgccgtggtatcggggcgaaccgctgctggccatcttggaaaacctgccgggggcggacgaaaccggtcgttccgctgccgatttttatttccccgtccaactggtcgtccgccaagatgccgacaaggccgatgatttccgaggctatcaggggcgcatcgaacgcggttcggtcgccgtcgggcaaaccgtccgcatcgaaccgaacgggctgaccgccaaagtgtctgaaatcatcacacccaaaggcgaagtggcgcaggcttttgccggcgaggcggcaaccctccggctggaccgcgacatcgatgtttcgcgcggcgacctttttgtcgataaaaattccccgctcgccccgcaaaaacatctggaagccacgctttgctggtttgacgaacgtccgctcaataccgcgcgcagatacctgctcaagcacggcacgcaaaccctgccggcaaaagtcggggaaattgaaagcgttttggatgtccgcacgctggaacaagaggccggcgcggaatccttgaagatgaacgacatcgccaaagtccgcatcaaccttcaaaaacccgttacggcaacgccttatgcggaaaataccgccgccggttcgtttatcctgatagacgaagcgacatacggcactgttgcggcaggtatgattttatga

SEQ ID NO: 39562 - DNA, 519 bp, Neisseria meningitidis
atgcgcctcttcccgattgccgccgccctgacgcttgccgcctgcggtactgtgcaaagcacacaatatttcgtgttgcccgacagccgctacatccgtcctgcaacacaaggcggcgaaaccgccgtcgaagtccgtcttgccgaaccgctcaaacgcggcggactggtctatcaaaccgacccctaccgcctcaacaccgcacaaaaccacgtttgggcagacaccttggacgatatgctcgaagcggcgttgagcaatgcattcaaccgtttggacaacacacgcatctttgttcctgcctcacgcagcggcagtaccgaaaaatggacggtctatatcgacgcattccaaggcagctacacgggcaaaaccctcatcagcggctacgccgtcctacccgacggtacgaacagacccttccatatcgaaaccgaacagcagggtgacggctacgccgcgatgaccgccgcactcgaacagggactgaaacaggcggcgcaacagatggtcgagtaa

SEQ ID NO: 39563 - DNA, 291 bp, Neisseria meningitidis
  misc_feature 276, 277, 278, 279, 280: 'n' is a, c, g or t
atgaacctgcatgcaaaggacaaaacccagcatcccgaaaacgtcgagctgctcagtgcgcagaagccgattaccgactttaagggcctgctgaccaccattatttccgccgtcgtctgtttcggcatttaccacatcctgccttacagccccgatgccaataaaggtatcgcgctgctgattttcgttgccgcactttggtttaccgaggccgtccacattaccgtaaccgcactgatggtgccgattctcgccgtcgtactcggtttccccgannnnncacacacttaa

SEQ ID NO: 39564 - DNA, 354 bp, Neisseria meningitidis
gtgtattccgggcgtggtttcgcgcctgcgcaatcgcagttgccgtgtgttgtggtgtacgttgaccgtcgccgaacagaacaggaaacgtttgattttccgcctacctaccggcatacggtgcggctggttacgttggtttgcgtgcaggctgcttccggtgcggacgaactggcggaagagatgctgtctttgattgggcagttgtttgccgaacattccgatttgggtgttggtgatttggaaaatctggtgcctgatttgctgaatatcgattccgacgaaagcggcgaggccgttaccgtctattatcagcaaggatggcaggcaatttattttgatacggcagtctga

SEQ ID NO: 39565 - DNA, 849 bp, Neisseria meningitidis
atgttaagcaaaatcagcgaatcactggcaaacctttccggtgcggaacgcaaagtcgccgaatgtgcattggcggaacccaaatggttcgtccatgccgccgttgccgaaattgccgaacgtgcgtccgtcagccagccgaccgtcatccgattctgccgcagcttgggttataaagggctgcccgagttcaagctcgccttgtccgccagcatcggtcatgagggtatgccctatgtccacgaagaactcaacgccgacgacgatatggcaagcgtggtcgagaaagtgttgggcaatgccgccgcctcgctgttgggcgaacgccgcttcctgaaagagtcggagctggaaaacgccattgccacgctgatgcacgcccgtcgcgtcgagttttacggtgtcggcaattccggcattgtggcacaggacgcgcaacacaagtttttccgtttcggaatgtccacggtcgcctatgtcgatacgcacacgcagctgatggcagcatccgttttgagcgatcaggatgttttggttgccatttccaacacgggttcgtctatcgaacttttggatgcggtcagcatcgccaaagaaaacggcgcgtccgtcatcgcactgacccgcaacgattcgcctctggcgcaacttgccgactgcgtgttgagcgttgccacacaggaaaatgccgaactctacacgcccatggtttcccgcctcttgcagcttgccgtcatcgacattctcgccatcggacttgccctgcgcttgggcgatgctgccagcctgcaattgcagaaaagcaaaaaaagcatacacaacaagcacatcgattacgacaaagattga

SEQ ID NO: 39566 - DNA, 456 bp, Neisseria meningitidis
atgttcggcggcgcacacgaattaagcatcgacagtaaggggcggttggctgttcctgccaaattccgtgacattctgtcgcgcctctatacgcctgccgtagtggtaacgctcgagtcgaaacacaagctgttgatgtaccctgttgcggagtgggaaaaggttgcggcgcaacttttaaacttaaaagtggcggataaccctgttttgcggcggtttcaaaatcttttgctgcataacgcggaaattttggaatgggacagcgccggccgggtgctgcttcctgccggactgaggaagagggtggatttcgaccgtgaagtcgttttggtcggtcgtgccaaccgtttggagctttggggtcgcgagcagtgggaggctgagatggttcaggctttggatgacgatcctgacgaacttgccttccagttgggtcagacggatttgcaattgtga

SEQ ID NO: 39567 - DNA, 693 bp, Neisseria meningitidis
atgggacaaaagattaaccctacaggctttcgcctggcggtaactaaagactgggcttcaaaatggtttgctaaaagcaccgacttttctactgttttgaagcaggatatcgatgttcgcaattatttgcgtcaaaaattggccaatgcttcggttggtcgagtggttattgaacgccctgcaaaatctgcacgcattaccattcactccgctcgtccgggtgtggttatcggtaaaaaaggtgaggatatcgaggttttgaaacgtgacttgcaagtcttgatgggtgtacctgttcatgtaaatattgaagagatccgccgtcctgagttggatgctcaaattattgctgacggtattgcccagcagttggaaaagcgcgttcaattccgtcgtgctatgaaacgagcaatgcaaaatgcaatgcgttctggtgctaaaggcattaagattatgacttcaggccgtctgaatggtgcggatattgcccgtagcgaatggtatcgtgaaggtcgcgtgccattgcatactttacgtgcaaatgtagattatgcaaccagcgaagcgcacaccacatatggtgtattgggtctgaaagtttgggtttatacggaaggcaatattaaatcttccaaacctgaacatgagagtaaacaaagaaaggcaggtagacgtaatgctgcagccaactag

SEQ ID NO: 39568 - DNA, 792 bp, Neisseria meningitidis
atgaatgtttattttctcggcggcggcaatatggcggctgccgttgcgggcggattggtcaaacaaggcggttaccgcatccatattgccaaccggggtgcggaaaagcgcgaacgtttgcaaaaagagttgggggtcgaaacttctgaaaccttgccggagcttcattccgacgatgttttaatccttgccgtcaagccgcaggatatggaagccgcgtgcaaaaatatccgcaccaacggcgcattggtgctttctgtcgcagccggattgccggtcgatacgctcagccgttacctcgggggaacacgccgcattgtccgggttatgccgaatacacccggaaaaatcgggctgggcgtatccggtatgtatgccgaagcggaagtatcggaaacagaccgcaggattgccgatcgaatcatgaaatcagtcggtttgactgtttggttggaagatgaagcgcaaatgcacagcattaccggtatcagcggcagcgggccggcatatgtgttttatctgctggacgcattgcaaaatgccgccatccgacaagggtttgatatggcagaagcacgcgcgctcagtctggcaacgtttaaaggagcggttgcccttgccgagcagacgggtgaagatttcgagaagcttcaaaaaaatgtaacgtcaaaaggcgggacaacccacgaagccgtggaagccttcaggcggcatcgtgtcgccgaagccataagtgagggcgtttgtgcctgtgtgcgccgttcgcaggaaatggaacggcaatatcaataa

SEQ ID NO: 39569 - DNA, 396 bp, Neisseria meningitidis
atggataaaaacctgcttgaagccgtcaaatttgacgaaaaaggtttggtttgcgccatcgcccaagatgccgaaaccaaacgtgttttaatggtggcgtggatgaacgccgaagccctgcaaaaaaccgtcgaaaccggctttgcccactattacagccgttcgcgccaaaaacaatggatgaagggcgaagagtcgggacacacgcaaaaagtccgcgaactgcgcctcgactgcgacggcgacgccattgtgatgctcatcgcccaaaacggcggcatcgcctgccacaccgggcgagaaagctgcttttacaaagtctggcgtggcagcgcgtgggaaaccgccgatgccgtcctgaaagacgaaaaagagatttacggcagcacgcactga

SEQ ID NO: 39570 - DNA, 480 bp, Neisseria meningitidis
atgaacaaactgtttcttactgccgcagtgctgatgctgggcgcgtgcggtttccacctgaaaggtgcagacggcatttctccgccgctgacctaccggagctggcacatcgaaggcggacaggcattgcagtttcctttggaaaccgcgctgtatcaggcttcgggcagggtggacgatgctgccggcgcgcagatgaccctgcgtatagacagcgtttcccaaaacaaggaaacctacaccgttacccgtgcggcagtcatcaacgaatatcttttgatattgacggttgaagcgcaggtattgaaacgcggcgagccggtcggcaaaccgatgaccgtgtccgtccgccgcgtccttgcttatgccgacaacgagatcttgggcaaacaggaagaggaagcggcattgtgggcggaaatgcggcaggatgccgccgaacagattgtccgccgcctgacctttctgaaggcggaatga

SEQ ID NO: 39571 - DNA, 774 bp, Neisseria meningitidis
atgaacactattgcagacgtgcaatccagccgcgatttacgcaacctgccgattaatcaggtcggcatcaaagacctgcgctttccaatctcccttaaaagcaaagaaggcgaacaatccaccgtcgcccacctgaccatgacggtttacctgcctgctgagcagaaggggacgcatatgtcgcgttttgtcgcattgatggagcaacatgccgaagccttggattttgcacaattgcgcaagctgactaccgaaatggtcgcgcttttagattcccgcgccggcaaaatcagcgtttcttttccgtttttccgcaagaaaaccgcgccggtttccggtattcggtccttactggattatgatgtctgtctcacgggcgaaatcaaagacggggcatacggccacagtatgaaggtcatgattcccgtaacctcgctttgcccgtgttccaaagaaatttcccaatatggcgcgcacaaccagcgttcgcatgttaccgtcagcctgactgccgatgccgaagtcggtattgaggaagtcatcgattatgtggaggcacaggcaagctgccaactctacggcctgctcaaacgccccgatgaaaaatacgttaccgaaaaagcctacgaaaacccgaaattcgtggaagatatggtgcgcgatgtcgctacttcgctgattgccgacaaacgcatcaagagtttcgtcgtcgagagtgagaatttcgaatctatccacaaccattcggcttatgcctatatcgcctacccgtag

SEQ ID NO: 39572 - DNA, 309 bp, Neisseria meningitidis
atgaccctgaaaaccgatttattgcctaaaatcaacaacgaagattatcaacgcctcatcctcaaacacagtgcggaatttagcggtggcgaaatccgcctgttgaacgaaatcctcgaaaaattcaatttcgacgttgttcaggcgcaggcattggcgcaagccgtcatgcagcaaatccgcttcgaccccaacgcctaccacatcgacagcgacgacgaagacaccaccggcatctgcccccactgcatcaacccgcctatgccgcccctgcgcgactatctcgtttggcgcgaaacccgcggataa

SEQ ID NO: 39573 - DNA, 378 bp, Neisseria meningitidis; identical to SEQ ID NO: 38676

SEQ ID NO: 39574 - DNA, 1104 bp, Neisseria meningitidis
atgaatacgacagcaaacccttccaatatcatcgtcgggctctccggcggtgtcgattcttccgtaaccgccgccctgctcaagcagcagggttatcaagtgcgcggtgtgttcatgcagaactgggaagacgacgacaacgacgaatattgcagcatcaaacaggattcgtttgatgccatcgccgttgccgatattgtcggcatcgacatcgacatcgttaatttcgccgcgcaatataaagacaaagtctttgcttattttcttcaggaatacagtgcggggcgcacgccgaatcccgatgtgttgtgcaacgccgaaatcaaattcaaatgctttttggattacgccgtagggcagggcgcggataccatcgccaccggacactatgcgcgcaaagaagtccgcaacggcgtgcattacctgctcaaaggtttggatcgaaacaaagaccaaagctatttcctctaccgcctcaagcctttccaactcgagcgcgcgatttttccgttgggcggtttggaaaaacccgaagtccgccgccttgccgccgagttcaaactgccgactgccgccaaaaaagacagcacgggcatctgcttcatcggcgaacgcccgtttcgcgagtttctgcaaaaatacctgccgaccgacaacggtaaaatggttacgcccgaagggaaaaccgtcggcgaacacgtcgggctgatgttctacacgctcggacagcgcaaaggtttgggcattggcggcgcgggcgaaccgtggtttgttgcggctaaagatttgacgaaaaacgaactgattgtcgtgcaaggacacgaccatccgctgctctatacccgcagccttgtgatgaacgatttgagtttcacgcttcccgaacgcccgaaggcaggacgctatacctgcaaaacgcgttaccgtatggcggacgcgccttgtgagttgcgctatttggatgaagaaaccgccgagctggtgtttgacgaaccgcaatgggcggttacgccgggccagtctgccgtgctgtatgagggcgatgtctgcttgggcggcggcattatccaatcaaccgacaaacccgtcatcatcacgcgataa

SEQ ID NO: 39575 - DNA, 1116 bp, Neisseria meningitidis
atgcgcttgtttaaaagcttgaaaaaccctaaaaaaacagatgccaagctccctaaaaaatcttcgggactcaataaccgcgcggcaatcggcatcgatatcgaccagcattccatcaaaatggtccaattgtcaggacgtagtttaaaccaaattcaattggaaaaatacgtcattgccaaattaccaaagaatatcattcaaggcaataaagtccaaaattacgatcaacttgttacatatttgcaacaagcctatgccaaactgggtacgtcgtgcaaaaacatcatcgcgtccgtcccgcaaaatctggcaaccatcgaacaattgacctacacagacaaagatgcagaattagacctgcaggggttcgtggagtcctccatctccgaagtcagctcgatatcgctcgaagaagccaattacgactatcaggtcttgtcccaatcggccgccggcgaagctgtgttggccgtcgcatcgagaaaggatgaaatcgaacccctgattgacgcattcaacgccgccggtatgaaattatccgcgcttgatgtggacattttcggacaatacaacgcctacgcgctatggataaaccatttcgcccccgagcttgcagccgaaaaagtcgccattttcggcgtatatgccgcacagacctacgccttggtcatccaagacggaaaaatcctatacaaacaggaaacctccgtcagcgaagaacagctcaaccaactcatccagcgcacctatcaggtaacagaagaaaaagcggaagaaatcatcaactccccgcaaaaaccttccgattaccaagaaagcgtggcaaactatttcaaccagcagattacccaagaaatacaaagggtcttgcagttttattacaccacgcagaccgcagacgatatgaccgacatcaagcatatcctgctgaccggggaagcggcgcgccaggaaggcatcgcccaaaccgtcgcctcacaaaccaatgcagatgtacaatgcgtccatcccgcgcgttattttgcggacaacctcaaaacagacaaacaacaattcgaacttgatgcgccgacactgaccagggcgttcggtttggcggtacggggattataa

SEQ ID NO: 39576 - DNA, 1701 bp, Neisseria meningitidis
atgtccgtcaaaatccaaacccgatccgtcaataccgacgttttcaatcatttgctcaccgccggcgccgatcctttaatcgcccggctttgtgcctcgcgcggtgtgcaaagtcctgccgaattggacgacaaactcgcttccctcctgccttatcaaacgctgacgaattgcgaagccgccgcccgccgtttggcggatgcggttgagcgtcaggaaaaaatcttgattgtcgccgactacgatgccgacggcgcgaccgcgtgtgccgtcggtttggacggtttggcggcgatgggggcaaaagtagatttcctcgtgcccaaccgctttgaacacggctacggtttaacgcccgagctggccgaaatcgccgccgcgcaaggcgtggatttgctgattacggttgataacggcattgccagcatcgcaggcgtggcgcgtgcgcaggaattgggtttggatgtgattgtaaccgaccaccatctgcctgccgagaccgtgccagactgcatcatcgtcaatccgaaccaaaaaggctgcggtttccaaagcaaaagcttggcgggcgtgggcgtgattttttatgtactgatggctttgcgtgccgaactgcgccgccgcaattatttttcagacggcctaaaagagccgaatctgggcgaccttttggatttggtcgcactcggtaccgttgccgacgtcgtctccctcgatcacaacaaccgcatcctcgtgtcgcaaggtttgaaacggatgcgctccggcaaaatgcgccccggtatccgcgccttgtttgaagtggcgcggcgcgattggcgcaaggcgcagccgtttgatatgggttttgcgttgggcccgcgcatcaacgccgccggacggctggacgatatgtcggtcggtattgcctgcctgttggcgcgagatgataccgaggcgcaggaactggcggcgcagttaaacaacctcaatatcgaacgtcgcgaaatcgagcagtctatgctgcaagacgcgctgaatgcttttcctgaaaccctgccttcaggtcagatgactttggtggcgtatcgcgacgacttccatcaaggcgtggtcggcatcgttgccagccgcctcaaagaccgtttttatcgtccgaccatcgtgtttgcgcctgccgacaacggtgaagtgcgcggttcggggcgttccattcccaatcttcacttgcgcgatgctttggacttggtgtccaaacgccatcccgatttgattttgaaattcggcggacacgcgatggcggcgggcttgagcatactcgaacacaacattcccgcgtttcagacggcctttgaagaagccgtgcgcgaaatggtgtgcgaagacgatttgtcgcaaaccttcatcaccgacggcagcctgcctgcacgcgacattacgctggaacaggcgcaaaaccttgctaaacacgtttgggggcagggcttcgcgccgccgagttttaccgacgagttccacgtcgtccgccagcaacctttgggcgcggagggcaaacacaaaaaagtctggctgcaaaaagacggctgcgaatttgaagcgatgttttggcgttgcagcgaagacatccccgaatacatccgcacggtgtaccgccccgttgccaacgaatggcgcaacaacctcgaattgcagctttatatcgactactgggaagcggcgtag

SEQ ID NO: 39577 - DNA, 756 bp, Neisseria meningitidis
atgaagtttgcccggttactctttctctgtgcggcactcgccggcactcaagcggcagctgccgaaatggttcaaatcgaaggcggcagctaccgcccgctttatctgaaaaaagataccggtctgattaaagtcaaaccgttcaaactggataaatatcccgttaccaatgccgagtttgccgaatttgtcaacagccacccccaatggcaaaaaggcaggatcggttccaaacaggcagaacccgcttacctgaagcattggatgaaaaacggcagccgcagctatgcgccgaaggcgggcgaattaaaacaaccggtaaccaatgtttcctggtttgccgccaacgcctattgcgctgcacaaggcaaacgcctgccgaccattgacgaatgggaatttgccggacttgcttccgccacgcagaaaaacggctcaaacgaacccggctacaaccgcactattctcgattggtatgccgacggcggacggaaaggcctgcacgatgtcggcaaaggccgcccgaactactggggcgtttatgatatgcacgggctgatttgggaatggacggaagatttcaacagcagcctgctttcttccggcaatgccaacgcgcaaatgttttgcagcggcgcgtctatcgggtcgagcgactcgtccaactatgccgccttcctccgctacggcatccgcaccagcctgcaatccaaatatgtcttgcacaacttgggcttccgttgcacaagccgataa

SEQ ID NO: 39578 - DNA, 1677 bp, Neisseria meningitidis
atgagcgtaggtttgctgaggattctggttcaaaaccaggtggttactgttgagcaggccgagcattactacaatgagtcgcaggcgggtaaggaagtgttgccgatgctgttttcagacggcgtcatttcgcccaagtcgcttgcggcattgattgcaagggtgttcagttattcgattcttgatttgcgtcattatccgcgccacagggtgctgatgggggtgttgacggaggagcagatggtggagttccactgtgtgccggttttccgtcggggcgacaaagtattttttgcggtttccgatccgacacagatgccgcaaattcagaaaaccgtttctgccgcagggattgaggttgagttggtcattgtcgaggatgaccagttggcgggtttgctcgattgggtgggttcgcgttcgacatcgctgcttcaggagcttggggaggggcaggaggaagaggaaagccacaccctgtatatcgacaacgaggaggcagaagacggccctgttccgaggtttatccataagactttgtcggatgccttgcgcagcggggcatcggacatccatttcgagttttacgaacacaatgcccgtatccgtttccgtgtggacgggcagctccgcgaggtggttcagccgcccattgcggtaagggggcagcttgcttcccggattaaggtaatgtcgcgtttggacatttccgaaaaacggataccgcaggacggcaggatgcagctgacctttcaaaagggcggcaagcctgtcgatttccgtgtcagcacattgccgacgctgtttggcgaaaaggttgtgatgcggattttgaattccgatgccgcgtctttgaacatcgaccagctcggttttgagccgtttcagaaaaaattgttgttggaggcgattcaccgtccttacgggatggtgctggtaaccggcccgacgggttcgggtaagacggtgtcgctctatacctgtttgaatattttgaatacggagtcggtaaatattgcaacggcggaagaccctgccgagattaacctgccgggcatcaatcaggttaacgtcaatgataagcagggcctgacttttgccgctgctttgaagtctttcctgcgtcaggacccggacatcattatggtcggtgagattcgtgatttggaaactgccgatattgcgattaaggcggcacaaacagggcatatggtgttttccaccctgcacaccaataatgcgccggcgacgttgtcgcgtatgctgaatatgggtgtcgcgccgtttaatattgccagttcggtcagcctgattatggcgcagcgtcttttacgcaggctgtgttcgagctgcaaacaggaagtggaacgcccgtctgcctctgctttgaaggaagtcggcttcaccgatgaggaccttgcaaaagattggaaactttaccgcgccgtcggttgcgaccgttgccgggggcagggttataaagggcgtgcgggcgtgtatgaggttatgcccatcagcgaagaaatgcagcgcgtgattatgaacaacggtacggaagtggatattttggacgttgcctataaggagggtatggtggatttgcgccgggccggtattttgaaagttatgcagggcattacctcgttggaagaggtaacggcaaataccaacgattag

SEQ ID NO: 39579 - DNA, 1215 bp, Neisseria meningitidis
  misc_feature 1200, 1201, 1202, 1203, 1204: 'n' is a, c, g or t
atggaacgtgctaccgaattggtgttgcagatttgcggcggtgcggcaggcgagatggttgaagcacaaggtaaattgcccgaagccaagcaggttggattgcgtttggaccgtctgaaaaccgtgttgggcgtggacattcctgccgaacaggtggaaaccattttgcaacacttgggtctgcagcccgagaaaacggcggaaggcttccgcgttaccgcgccgagcttccgttttgacatcgaaattgaggctgatttgattgaagaaatcggacgcgtttacggctatgaaaacatccccgacgattacacgtcaggccgtctgaaaatgctggaactgcccgaaacacgtcgctcgcgttttgccgtttacaacgaaatggcggcgcgtggctaccgcgaagtggtcagctatgccttcgttgacgagcagtgggaacaagattttgccgccaacgccgaccccatccgcctgcaaaacccgctggcggcgcaatatgccgtgatgcgttccacactcatcggcggcttggtggaaattttgcaaaacaacctgaaccgcaaacaaaaccgcgtgcgcgtgtttgaaatcgcccgcgtgttcggcaaaggttcagacggccggtttgtccaaaacgaacgcatcggcggcttgtggtacggcgcggcaatgcccgaacaatggggcgggaaaacgcgcaatgcggatttttacgacatcaaggcagatgtggaaaatctgttgaaaaacaaagcggtcgagttcgttaaaaccggatatcccgccctgcatcccggacgcgccgccaatatcgtttcagacggcaaagtcatcggctttgtcggcgaactgcatccgaaatggctgcaaaaatacgacctgccgcaagcgccgctggtatttgaaatcgatatggcggccgtgttggaatgcgggaaaacgcgctatcgggccgtatcgaaattccagccggtgcgccgcgatttggcgtttgtgatgccggaagctatgagccatgatgatttgctgcttgtcttgaaaggcgcggcaaacaagttggtacaggaaatcagcgtgtttgacgtgtatcgcggcatgggactgcccgaagggatgaagagcgtggcggtcaaagtgattttgcaggatatggaaaacacgctgacggatgaggcggtcgagccgcttatcggaaannnnncacacacttaa

SEQ ID NO: 39580 - DNA, 1272 bp, Neisseria meningitidis
atgaaactgctggttatcggtaatggcggtcgcgaacacgcgctggcttggaaattggcgcagtcgcctaaagtggaaacagtatttgttgcgcctggtaatgccggtacagcgattgaacccaagttgcaaaacatcgacttgactgcgcatcaggatttgattgaattctgtcgtaaagaaaatattgtttttaccgtcgtcggccctgaagcgcctttggcggcaggtattgtggatgatttccgtgctgcaggactaaaaatattcggtccgacacaatatgcggcgcagttggaaagttccaaagatttcgccaaagcatttatggcgaaatacaacattccgaccgcgcaatatcaaacctttgaaaacgccgatgccgcacatgattacgtcaatcagaaaggtgcgcctatcgttatcaaagccgatggtttggcggcaggtaaaggcgtgattgtggcgatgactttggatgaagcgcatgctgcgattgatgatatgctgctggacaacaaaatgggcaatgccggcgcgcgtgttgtaattgaagatttcctgcaaggcgaagaagcgagttttatcgtcatggttgatggcaataatgtactgcctatggcaaccagccaagaccacaagcgtcttttagacggcgacaaaggtctgaatacgggcggtatgggtgcgtacagccctgcgcctgtggtaacgcctgttgtgtacgaacgcgcgatgaatgaaattattttgccgaccgtagcagggatgaaagcggaggggcatgagttcaccggtttcctgtacgcaggtttgatgattgatcaaagcggtgcaccctatacgattgagtttaactgccgtttcggcgatcctgaaacccagccgattatgagccgactgaacagcgacttatcggatttggttgaagcggcaatagacggcaaactcgatagcgtaaccgcggaatggagcccgcaaactgccgtgggcgtggtactggcggcgcaaaattaccccgaaacgcccaaaaaaggcgatattatttccggtctggatgctgccaaccaaatcggcaaagttttccatgcaggtacaacggcaaaagagaaaggtgacgtattgaccaacggcggacgcgtattgtgtgttgtgggattgggcgacaatgtggcgcaagcgaaagctaaggcatatggcgcgttggaaaaaatcagtttcgacgggatgcaataccgtaaagacattgccgataaagcgattaaccgttaa

SEQ ID NO: 39581 - DNA, 1134 bp, Neisseria meningitidis
  misc_feature 1115, 1116, 1117, 1118, 1119: 'n' is a, c, g or t
atgtaccgacacatcgaatactatcccggcgacccgattttgagtttggtcgaaaccttcaaaaacgacccgcgccccgaaaaagtcaatttgagcataggcatttatttcgacgacgaaggcaaaatgcccgtgttggaatccgtgagccgcgccgaaactgcccgtgccgccactcctgtgccgtcgccctacctgccgatggaaggcttagacacttaccgcagcgcggtgcagcatttgttgttcggcaaagacaaccccgcgctcgcgcaaggacgtattgttaccgtacaaaccttgggcggctcaggcgcgctcaaagtcggggcggactttctgcaccgctggtttcccgaagcgcgcgcctacgtcagcgacccgacttgggacaaccatcgcggcatttttgaaagcgcaggtttcgaggtcggcacttacccatattacgaccctgctgccgtcggcgtgaaattcgacgaaatgaccgcgtttttcaacaccctgcccgaaaacagcgtcctgatcctccatccctgctgccacaacccgaccggcgtggatatgtcggaacaacaatgggacgaagtgttgcacatcatcaaaacgcgcaaactgattccgtttatggacatcgcctaccaaggcttcggcggcgatttggacagcgatgcctacgccgtccgcaaagcggtggaaatggaattgcccttgttcgtcagcaattccttctcaaaaaacctgtcgctctacggcgagcgcgtcggcggcctgagcgtggtttgcccgaataaggaagaagcggatttggtgttcggacagctcaaattcaccgtccgccgcatctactccagcccgcccgcgcacggcgcgtatatcgccgccgacgtgatgaacagccccgaactttacgccttgtggcaaaacgaggtttatatgatgcgcgaccgcatccgtgcgatgcggcagaaactttatgatgtcttaactgcgcaaatccccgatcgcgatttcacttatttcatcaaacagcgcggcatgttcggctacacaggattgagcgtggaacaagtccgcaggctgcgcgacgaatttgccgtttacctgctggattnnnnncacacacttaattaa

SEQ ID NO: 39582 - DNA, 240 bp, Neisseria meningitidis
atgaatgtttgggatatatggggcaggatggtggaaatctatcataagtataagaagccgtgcctggttttggcggtggattttgtgatgggtatggtattcatagagccgaatgaggagccgtgcatcggcagatgctatgcgcctatgtcggagtcccctgattttgccaacgctgttgcgatggctgttgctatgatctgtatcgtatggattgccgttttgtctatgactgattga

SEQ ID NO: 39583 - DNA, 1128 bp, Neisseria meningitidis
atgaacacctcgcaacgcaaccgcctcgtcagccgctggctcaactcctacgaacgctaccgctaccgccgcctcatccacgccgtccggctcggcggggccgttctgttcgccaccgcctccgcccggctgctccacctccaacacggcgagtggatagggatgaccgtcttcgtcgtcctcggcatgctccagtttcaaggcgcgatttactccaaggcggtggaacgtatgctcggcacggtcatcgggctgggcgcgggtttgggcgttttatggctgaaccagcattatttccacggcaacctcctcttctacctcaccgtcggcacggcaagcgcactggccggctgggcggcggtcggcaaaaacggctacgtccctatgctggcggggctgacgatgtgcatgctcatcggcgacaacggcagcgaatggttcgacagcggcctgatgcgcgcgatgaacgtcctcatcggcgcggccatcgccatcgccgccgccaaactgctgccgctgaaatccacactgatgtggcgtttcatgcttgccgacaacctgaccgactgcagcaaaatgattgccgaaatcagcaacggcaggcgtatgacgcgcgaacgtttggagcagaatatggttaaaatgcgccaaatcaacgcacgcatggtcaaaagccgcagccacctcgccgccacatcgggcgaaagccgcatcagccccgccatgatggaagccatgcagcacgcccaccgtaaaattgtcaacaccaccgagctgctcctgaccactgccgccaagctgcaatctcccaaactcaacggcagcgaaatccggctgcttgaccgccacttcacactgctccaaaccgacctgcaacaaaccgtcgcccttatcaacggcagacacgcccgccgcatccgcatcgacaccgccatcaaccccgaactggaagccctcgccgaacacctccactaccaatggcagggcttcctctggctcagcaccaatatgcgtcaggaaatttccgccctcgtcatcctgctgcaacgcacccgccgcaaatggctggatgcccacgaacgccaacacctgcgccaaagcctgcttgaaacacgggaacacggctga

SEQ ID NO: 39584 - DNA, 300 bp, Neisseria meningitidis
atgaccgcatccatgtacatccttttgctgcttgccttgatttttgccaacgcccccttcctcacgaccaggctgttcggcatcgtaccgctcaagcgcaaacatttcgggcaccacttgatcgagctggcggcaggtttcgcgctgaccgccgttcttgcctacatcctcgaatcccgtgcgggagcggtacacgatcagggttgggagttttacgccaccgtcgtctgcctgtacctgatttttgcgtttccctgtttcgtgtggcggtatttttggcacacgcgcaacagggaatag

SEQ ID NO: 39585 - DNA, 279 bp, Neisseria meningitidis
atgtcggccgtcgatttgatccgcgaacgcctgcagacgctcgatccgctggtgttggaaatcggcgatgagagccatctgcacaaaggacacgcgggcaataccggcggcggacattatgccgttttggtcgtcagcggccgttttgaaggcgtaagccgcctgaaccgccagaaaacggtcaaatcgctgctcaaagatttgttttcaggcggcatgattcacgcgctcggcatccgggcggctacccctgacgagtatttccatacggcggactga

SEQ ID NO: 39586 - DNA, 1875 bp, Neisseria meningitidis
atgagccaagccttaccctaccgcccggacatcgacacattgcgcgccgccgccgtcttgtccgtcatcgtgttccatatcgaaaaaaattggctgccgggcgggtttctcggtgtcgatatattcttcgtgatttcaggctttttgatgacgatgattcttcaccgcgaaatgtcgggggggaggttttccctgaaggcattttatatccgccgcatcaagcggatcttgcccgcatttttcaccgtattggcggcaacgctgataggcggcttctttttattcaccaaagatgatttctttcttttatggaaatccgcgctgaccgccttgggtttcgcctccaacctgtattttgcaaggggcaaggactatttcgatcccgcgcaggaagaaaagcccttgctgcacatttggtctttgtcggtcgaagaacaattttactttgtctttccgatattgctgctgcttgtcgcccgcaaaagcccgcgcgtacagttcggcttcctcgccgcactgtgcgccttaagccttgccgcttcctttatgccttccgcgttcgataaatattacctgccccacctgcgcgcctgcgaaatgctggtcggatcgctgaccgccgtgtggatgcggtaccggcaacagcggaatctcgccgtcggcagatgctgtgccgccgccggcgcattgttttcctcgtgcatactgtccgcctgcctgtttgcctattcggaacaaaccgcctatttcccggggcccgccgctttgattccctgtctggctgttgccgcgctgatttatttcaaccattacgaacacccacttaaaaaatttttccaatggaaaatcaccgttgccgccggtttgatttcctattcgctttatctgtggcattggccgatattggcctttatgcgctatatcggtccggataacctgccgccttattcgccggcggcggcggtcgtcctgatattgctgctttccctgttttcttaccactgcatcgaaaaaccgtttaaaaaatggcaaggttcgttcgcacaatccgttttatggatttatgccttgcctatgctcattttgggggcgggctcgtttttcgcgatgaggctgccgtttatggcgcaatacgaccgcttggggctgacgcgttccaacacctcctgccacaacaataccgtcagacaatgcctatggggggatacggaaaaacagccggaactgctggttttgggcgattcccacgccgaccattacaaaacattcttcgatgccgtgggcaaaaaagaaaaatggtccgccacaatggtttccgccgacgcttgcgcctatgtggaaggctacgcgtcccgcgtattccaaaactgggccgcctgccgcgccgtttaccgctatgccgaagaacacctgccccggtattcaaaagtggttttggcgatgcgctggggcagccaaatgcccgaaaacagccgctcccttgcctatgatgccggttttttccaaaaattcgaccgtatgctgcacaaactctcatccgaaaaacaagccgtttacctgatggcggacaaccttgcctcgtcttacaacgtacaacgcgcctatatcttgtcttcacgcataccgggttaccgccaaaccctgcgcccggacgacgaaagcactctgaaagccaatgcacgcatcagggaattggcagccaaataccccaacgtctatattattgatgccgccgcctatatccccgcaaatttccaaatcggcggattgccggtttactcggacaaagaccacatcaacccttacgacggcacggaattggcgaagcgtttttccgaaaaacaacggtttctcgatacgcgccataaccattga

SEQ ID NO: 39587 - DNA, 231 bp, Neisseria meningitidis; identical to SEQ ID NO: 39259

SEQ ID NO: 39588 - DNA, 1638 bp, Neisseria meningitidis
atggattttaaaagactcacggcgtttttcgccatcgcactggtgattatgatcggatgggaaaagatgttccccactccgaagcccgtccccgcgccccaacaggcagcacaacaacaggccgtaaccgcttccgccgaagccgcgctcgcgcccgcaacgccgattaccgtaacgaccgacacggttcaagccgtcattgatgaaaaaagcggcgacctgcgccggctgaccctgctcaaatacaaagcaaccggcgacgaaaataaaccgttcatcctgtttggcgacggcaaagaatacacctacgtcgcccaatccgaacttttggacgcgcagggcaacaacattctaaaaggcatcggctttagcgcaccgaaaaaacagtacagcttggaaggcgacaaagttgaagtccgcctgagcgcgcctgaaacacgcggtctgaaaatcgacaaagtttatactttcaccaaaggcagctatctggtcaacgtccgcttcgacatcgccaacggcagcggtcaaaccgccaacctgagcgcggactaccgcatcgtccgcgaccacagcgaacccgagggtcaaggttactttacccactcttacgtcggccctgttgtttatacccctgaaggcaacttccaaaaagtcagcttttccgacttggacgacgatgccaaatccggcaaatccgaggccgaatacatccgcaaaaccccgaccggctggctcggcatgattgaacaccacttcatgtccacctggattctccaacctaaaggcagacaaagcgtttgcgccgcaggcgagtgcaacatcgacatcaaacgccgcaacgacaagctgtacagcaccagcgtcagcgtgcctttagccgccatccaaaacggcgcgaaagccgaagcctccatcaacctctacgccggcccgcagaccacatccgtcatcgcaaacatcgccgacaacctgcaactggccaaagactacggcaaagtacactggttcgcctccccgctcttctggctcctgaaccaactgcacaacatcatcggcaactggggctgggcgattatcgttttaaccatcatcgtcaaagccgtactgtatccattgaccaacgcctcttaccgctctatggcgaaaatgcgtgccgccgcacccaaactgcaagccatcaaagagaaatacggcgacgaccgtatggcgcaacaacaggcgatgatgcagctttacacagacgagaaaatcaacccgctgggcggctgcctgcctatgctgttgcaaatccccgtcttcatcggattgtattgggcattgttcgcctccgtagaattgcgccaggcaccttggctgggttggattaccgacctcagccgcgccgacccctactacatcctgcccatcattatggcggcaacgatgttcgcccaaacttatctgaacccgccgccgaccgacccgatgcaggcgaaaatgatgaaaatcatgccgttggttttctccgtcatgttcttcttcttccctgccggtctggtattgtactgggtagtcaacaacctcctgaccatcgcccagcaatggcacatcaaccgcagcatcgaaaaacaacgcgcccaaggcgaagtcgtttcctaa

SEQ ID NO: 39589 - DNA, 831 bp, Neisseria meningitidis
atggcacattacgcaatcggcgacatacaaggctgtttcgacgaactgaccgcgctgctcggcaaaatcggtttcaaccacggcacggacaccctctggctgacgggcgacatcgtcaaccgcggcccgaaatccctcgaaacgctgcaattctgcatccggcacgaaaacagcgtgcaaatcgtcctcggcaaccacgacctgcacctgctcgctgtcggctgcggcgaaggtgcgcccaaacgcagcgacacaatcgaacccatactcaaacaccccgacggaaaaaaaatgctcgactggctgcgtgcgcaaccgctgttgatacgcgagggcagccgcgtgatggtacacgccggcatcctgccgcaatggcgcataaccaaagccgaatcgctcgctagagaagccgaagccgaactgcgcggcaaaaaatacgtcaaattcttctccaaaatgtacggcaacaaaccggccgcgtgggacgaaggtttgaaaggctatgcccgcctgcgcttcatcgtcaacgccttcacgcggatgcgcgccctgacctttaaaaacgaactggatttcgactacaaatccacagtgaaaaaaatgccgccttacctgcgcccgtggttcaaagcccccgaccggcaaaacctcgaccgcaccatcatcttcggacactggtcctcgctgggctacacgaatgccgacaacgtcatctcgctggacaccggcgcgctgtggggcggacagctgaccgccgtcaacctcgaaacggaagaaattacccaagtccaagccgccggcggcatagactggaaaagcttcgcaaaataa

SEQ ID NO: 39590 - DNA, 387 bp, Neisseria meningitidis
atgaacgaacaagaactgcaagacctgcaaaaaatggtcggggtcgccgtcaacgccctcgaagacatcaaagccaaagacatttccgttctcgaaacgcaagacaaaacttcgctgtttgccagaatgattatcgccagcggcgacagtacgcgccaagtcaaagcactggccaacaacgttgccgtcgatttgaaagaagccggttttgaaatcctcagcaccgaaggcgacagcggcgaatggacgctcgttgatgcaggagacctcgtcgtccacgttatgctccccgccgtgcgcgacttctatgatatcgacaccctctggggcggcgagaaaccgagtttccacgccggaatgcagaagccgtggcacgcggcagactga

SEQ ID NO: 39591 - DNA, 195 bp, Neisseria meningitidis; identical to SEQ ID NO: 38181

SEQ ID NO: 39592 - DNA, 930 bp, Neisseria meningitidis
atgattcacgtttcggcagtgcaggcaccggcgcatattcaggataccggacgctacggacaccggcgttacggcatcggtcatgccggtgcgatggacacggttgctttggcggcgggcaatattttattgggcaacgacgaaggcacggccgcaatcgaaatcgctttgggcgggataatgctggtgtttgaacgggatacgccgttttgtctcaccggtgccgtgtatcaggcggaattggacggcgaaccggtctattcgtattggcgttataccgcccgcaaagggcagaccttgaaactggtgcgtgccgtgcagggcatgtacggctatgtgtgcgtggcgggcggatttgatgtgccggaagtgatgggttcgagaagtaccgacctgaaagccggtttcggcggccatcagggcagaatgctgcaaaaaggcgattatctccccatcggcaaaggtgcgcaggaattgtccaaagtcggcattgccccgataccgtttaccgataccgtccaccttgttccttcgtcggaatatgccgctttcagtgaaaaagggcgtctgaatctggaacgggaaacgtggacgctgcaaagcgatagcaaccgcatgggctaccgcttcgacggacagccgctgaccctgtcgcaacctttggaaatgctgtcccacgctgttcaggcaggaaccgtgcaggtgccgcccggcggcaaaccgattatcctgctggccgatgcgcaaaccaccggcggttatccgaaaatcgctaccgttgccgccgccgatttgggcaagctggcacaggtgcgcttcggcagcaaagtcaaattcaaaataatcggcttgaaaaaagccaccgccctgcggcgcaaaaaccaagcctatctgaaccaaatacggagaatcacccatgaagcaggttga

SEQ ID NO: 39593 - DNA, 1311 bp, Neisseria meningitidis
atgtacgctaaaaaaggcggtttgggactggttaaaagccgccgtttcgcacctcttttcgctacgcagtttctcggcgcgttcaacgacaatgtgttcaaaaccgcgctgtttgtgatgattgggttttacggtttggggcaaaacggcttcctgcctgccggacagatgttgaacttgggcgcgttgttgtttattttgccgtatttcctgttttcctcgctgtcggggcagttgggtaacaaattcgacaaggccgttttggcgcgttgggtcaaggtgctggaaatgatcattatggcggtggcggcatacgggttttatatccggtctgccccgctgcttttggcgtgtctgttttgcatgggcgcgcaatcgacgctgttcgggccgctgaaatacgccatcctgcccgattatctcgacgacaaagagttgatgatgggcaacagcctgattgaatcgggtacgtttgtcgccatcctgttcggtcagattttgggaacggcggtggcaggtgtaccgccttatattgtcgggatactggttttgctggtcgccgtcggaggcacggtcggcagcctgtttatgccgtctgtacccgccaaggctgccgatacacaaattgagtggaatattgtccgtggcacaaaatccctgctgagtgaaatggtgcggcacaagcccgtttttaccgccattatcggtatttcgtggttttggtttgtcggcgcggtttataccacgcaactgccgacctttacccaaatccatctgggcggcaacgacaatgttttcaacctgatgcttgccctgttttccatcggtattgccgccggttcggtactgtgtgccaagttcagcagggaacggctgaggttggcttgggtaacggttggtgcgttgggtttgacggtttgcggcttggttttggtgtggctgacgcacggacaccgttttgaagggctgaacggcattttttggtttttatcgcaaggatgggcatatcccgtgatggcggtgatgacgctgatcggctttttcggcggatttttctccgttccgctctatacctggctgcaaaccgccagtagcgagactttccgcgcccgcgccgttgccgccaacaatatcgttaacggtatttttatggtttccgctgccgttttgagcgcggtgttgctgtttttgtttgacagcatttccttgttgtatctgattgtcgctttgggcaatattccgttgtcggtatttttgattaagcgcgaaaggcggtttttaggcgcggcggcaatcaggaaaaaaccttga

SEQ ID NO: 39594 - DNA, 657 bp, Neisseria meningitidis
atgactattaaaattattctgatagacgaccataccctcttccgcagcggcattaaagcccttttgtcgcgccaacacggttttgaagtcatcggcgaagccgcagacggcctctcgggcatcaaaatgattagtcggctgcaacccgatgtcgtcctgctcgatttggatatgcccggcatgaacggacgcgaagcactctcccaaatcatcagcatcaatccgcagcaggcagtgattatgctgaccgtttccgaagacagcgacgacttgaccgaatgtatgcgcatcggcgcgcgcggttacctgctgaaaaacatcaacgctgactttctgctcgaaagcatacgcaaagccgccgaaggcgataatgtattctcgcccgagatgaccgccaaactcgtcaaaagcctgatttccccccaacctgcccaagggacgcaggcactctcctcacttacccctcgcgaactggaaatcttgggctatctcgccgcaggacacagcaacaaaatcatcgcccgccacctcgatcttgccgaatccaccgtcaaagtccacgttcaaaacctgctccgcaaactcaacctcagcagccgggtgcaggccgctgtttacgccatccggcacaacgtcccccaacccgtgctggaataa

SEQ ID NO: 39595 - DNA, 798 bp, Neisseria meningitidis
atggataccgcacaaaaacaacgctgggcaataaccctatcctatgacggcagccgcttttacggctggcagaaacaggctgacggcgtaccgaccgttcaggcggcattggaaaccgcgctcgcccaaatagcaggggaagcggtttccaccattgttgccggcaggaccgacaccggcgttcatgcgactgcccaagtcgttcattttgatactgccgccgcccgtccccaacaggcatgggtgcgcggcgtaaatgcccacctgcccgaaggcattgccgttttgcacgcccgacaggtcgcccccgaatttcacgcccgcttcgacgcatacggacggcattaccgctacctgctcgaatccgtccccgtccgttcccccctgctcaaaaacagggcaggctggacacacctcaaactcgacatcgggccgatgcgccgggctgccgccttattgatcggcgaacaagacttctccagcttccgcgccgccgaatgccaggcaaaatcccccgtcaaaaccatctaccgcgccgaccttacccaaagctcaggactcgtccgcctcgatttgcacggcaacgcctttttgcaccatatggtacgcaacatcatgggcgcgctcgtctatgtcggcagcggcagactcagcgtcgaaggcttcgccgcactgattcaagaacgcagccgcctcaaagccccgccgaccttcatgcccgacggactttacctgaccggcgtcgactatcccgaggcatacggcatcatccgcccccaaatccccgaatggctttaa

SEQ ID NO: 39596 - DNA, 576 bp, Neisseria meningitidis; identical to SEQ ID NO: 38182

SEQ ID NO: 39597 - DNA, 333 bp, Neisseria meningitidis
atgaatatcaaacacctgattaccgccgcactcattgcctcagccgcctttgccgcgcaggcagccccgcaaaaacccgtatccgccgcccaaaccgcgcaacatccggccgtttggatcgatgtccgttccgaacaggaatttagcgaagggcatttgcacaacgcggtcaacatccccgtcgaccaaatcgtccgccgcatacacgaagccgcgcccgacaaagacacgccggtcaacctctactgccgcagcggacaggcgtgccgaagccgcccttcaagagctgaaaaaagcaggttatacaaatgttgccaatcacggcggttatga

SEQ ID NO: 39598 - DNA, 735 bp, Neisseria meningitidis
atgagcgcaaacgtcagccgccttgttgttcaaaacctgcaaaaaagtttcaaaaaacgccaagtcgttaaaagcttctccctcgaaatcgaaagcggggaagtcgtcggcctgctcgggcccaacggtgcgggtaaaaccaccagcttctacatgattgtcggactcatcgccgccgacgcaggcagcgtaaccctagacggacaagaattgcgccacctgcccatacacgaacgcgcccgcctcggtgtcggctacctgccgcaggaagcctcgatattccgcaaaatgaccgtcgaacaaaacatccgcgccatcttggaaatcagaaccaaagataaaaatcaaatcgacagggaaatcgaaaaactgctcgccgaccttaatatcggacacttgcgccgcagccccgcgccgtcgctgtccggcggcgaacggcggcgcgtcgaaatcgcccgcgtactcgccatgaaaccgcattttattttgctggatgagccttttgccggcgtcgatcccatcgccgtcatcgacatccaaaaaatcatcggatttctcaagtcgcgcggtatcggcgtattaattaccgaccacaacgtacgcgaaaccctcagcatctgcgatcgggcctacattatttcagacggcacggtgttggcatcgggaaaacctgatgatttggtcggaaacgaacaggttcgttctgtttatctgggtaagaacttcaaatattga

SEQ ID NO: 39599 - DNA, 378 bp, Neisseria meningitidis; identical to SEQ ID NO: 36713

SEQ ID NO: 39600 - DNA, 843 bp, Neisseria meningitidis
atgattcaacacgcaggcttgggctaccgccgcgacttggcggaagactttctctcgctttccgaaaacagcccgatatgctttatcgaagccgcaccggaaaactggctgaaaatgggcggctgggcgcgcaaacagtttgaccgtgtggcggaacggctgccgctggcgttgcacggattgtctatgtcgctgggcgggcaagcaccgctggatactgatttgatagacggcatcaaagaaatgatgcgccgttacgattgcacgtttttctccgaccatttgagctactgccacgacggcggtcatctttacgatttgttgccgctgccctttaccgaggaaatggtgcatcatacggcgcggcgtatccgcgaagtgcaagaccgtttgggctgccgcatcgccgtggaaaacacgtcctactatctgcattccccgcttgccgagatgaacgaggtcgagttcctcaacgccgtcgcacgtgaggccgattgcggcattcatctggatgtgaacaatatctacgtcaacgccgtcaatcacggcctgttgtcgccggaggcttttttgaaaaacgttgacgcagatcgcgtgtgctatatccatattgccggacatgacgtggaaacgccggaattgttgattgatacacatggcgcggcagttttgccaactgtttgggacttgctcgaacttgcctatgccaagctgccgacgattccgcccaccctgttggaacgcgattttaatttcccgccttttgccgaactcgaagccgaagtcgccaaaatcgccgattatcaaacgcgtgccggaaaggaataccgccgtgcagcctga

SEQ ID NO: 39601 - DNA, 1512 bp, Neisseria meningitidis
atgagcgaacaaaaccatccgcaaaccgagccgcagttggacgaaaaccaaatcatcgccctgcgccgcgaaaaactgcacaacatccgccaacagcgcaacgcctatcccaacgacttcaaacgcgacagcttcgccgccgatttgcacgcccaatacggcgaaatcggcaaagaagaactcgatccgcaaggcattcccgtcaaagtggccggccgcatgatgctgaagcgtcaaatgggcaaggcgagctttgccactattcaagacgtgtccggacaaatccagctttatctgaacaacaaaggcgtgagccaagaagttttggacgacttcaaccattgggatttgggcgacatcgtcggcgcggaaggcactttgttcaaaaccaaccacggcgaactgaccgtacgcgtgtccggcatccgcctgctgtccaaatccctgcgtccgctgcccgacaaacacaaaggtttgagcgatcaggaaaccaaataccgccaacgctatgtcgatttgattgccaacgaagaatcgcgcaatacctttatcaaacgcagccaaatcatccaatccgtgcgtaattttatggtgggcgagcattatctcgaagtcgaaaccccgatgatgcacccgattcccggcggcgcgacggcaaaacccttcgttactcatcacaatgccttagatattccgctttacctgcgtatcgcgcctgagctgtatttgaaacgcctggttgtcggcggcttggaacgcgtgtttgaaatcaaccgcagcttccgcaacgaaggcatgtccgtgcgccacaaccccgaatttacgatgattgaattttacgaagccttctccgactacgaacgtatgatgcagatggcggaagacatcatccgcaacgcatcgcgcacagtaaacggtacggcaaacatcacttacaatggcaaagaagtcgatttggaaagcccgttcgagcgtctgaccatcctcgaagccatcaaaaaatacaatccgcactacaccgacgagcagttgaacgatgcggaatggctgaaaaaagaaatcgtcaaacacggtgaaagcctgccgccgtccccgggcatcggcagcctgcaactcgcgctgtttgaaggttgcgccgagggcaagctgtggaacccgactttcatcatcgattacccggtcgaagtttccccgttggcgcgcgcttcggataccaaacaaggtctgaccgaacgtttcgaattgttcgttgtcggccgcgaactggcaaacggctattcagaattgaatgaccctgaagaccaagccgaacgcttcaaatcgcaagtcgcacaaaaagacgcgggcgacgacgaagccatgcattacgatgccgactacatccgcgcgatggaatttggtttgccgccgaccggcggttgcggcatcggtatcgaccgcttggtgatgttgctgaccgattcgcaaaccatccgcgatgtgattctgtttccgcagatgcgccccgagtag

SEQ ID NO: 39602 - DNA, 480 bp, Neisseria meningitidis
  misc_feature 465, 466, 467, 468, 469: 'n' is a, c, g or t
atgaagataacacactgcaaattaaagaaaaaagtacagaaagaactgatccgtttttttgtactcgaagttaccgcccgttctgccgccgatattttgggtatccatcccaattcggcagcactgttctaccgtaaaatccgcacggttatcaaccatcatttggccttggctgccgatgaggtttttgagggctctgtcgagccggacaaaagcgatttcggcggacggcgtaaaggcagacgtggtcgcggtgcggcaggaaaagtggttgtcttcggcattctgaaacacaacggacgggtctataccgttgtggtggataatgccaagtctgaaacgttactccctgtcatcaagaagaaaatcatgccggacagcattgtttataccgatagtctgagcagctgcgacaagttggacgtgagcggttttatccattaccgcatcaaccattccaaggannnnncacacacttaa

SEQ ID NO: 39603 - DNA, 963 bp, Neisseria meningitidis
atgcagtatgccaaaatttccggcacgggcagctatcttcccgccaaccgcgtcagcaatgacgaccttgcccaaaaagtggatacctcggacgagtggattaccgcgcgtacgggcatcaagttccgccatattgcagccgaaaatgagaaaaccagcgatcttgccgccgaagcagcccgccgcgcactggatgcagccggattagacagcggcgaaatcgatttgattatcgtggcgacggcaacgccggatatgcagtttccttctaccgccaccatcgtgcagcaaaaattgggcatcaccaacggctgtcccgcgtttgacgtacaggcagtgtgcgcaggctttatgtacgcgctgaccactgcaaacgcctacatcaaaagcggcatggcaaaaaacgcgctggtcatcggcgcggaaaccttcagtcgcattgtagactggaacgaccgcacaacctgcgtattgttcggcgacggcgcgggcgcggtggttttgagcgcggcggacaaaccgggcatcatccacagcaaactcaaagccgacggcaattatctgaaactcttaaacgtccccgggcaaatcgcctgcggcaaagtttccggttcgccgtacatttcgatggacggtcccggcgtgttcaagtttgccgtcaaaatgctgtccaaaatcgccgatgacgttatcgaagaagccggttacaccgccgctcaaatcgactggatcgtgccgcatcaggcaaaccgccgcattatcgaatcgaccgcgaaacatttggggctgagtatggacaaagtcgtcctgaccgtccaagaccacggcaacacgtccgccgcctcgattccgctggctttggatacaggcatccgcagcggacaaatcaaacgcggtcaaaacctgctgctcgaaggcatcggcggtggtttcgcgtggggcgcggtgctgttgcaatattga

SEQ ID NO: 39604 - DNA, 717 bp, Neisseria meningitidis
atgaagaccaaattaccgctttttatcatttggctgtccgtatccgccgcctgttcttcccctgtttcccgcaatattcaggatatgcggctcgaaccgcaggcagaggcaggtagttcggacgctattccctatcccgttccgaccttgcaagaccgtttggactatctggaaggcagaatcgtccggctgtcgaacgaagtggaaaccttaaacggcaaagtcaaagcactggagcatgcgaaaacacacccttccagcagggcatacgtccaaaaactcgacgaccgcaagttgaaagagcattacctcaataccgaaggcggcagcgcatccgcacataccgtcgaaaccgcacaaaacctctacaatcaggcactcaaacactataaaagcggcaggttttctgccgctgcctccctgttgaaaggcgcggacggaggcgacggcggcagcatcgcgcaacgcagtatgtacctgttgctgcaaagcagggcgcgtatggggaactgcgaatccgtcatcgaaatcggagggcgttacgccaaccgtttcaaagacagcccaaccgcgcctgaagccatgttcaaaatcggcgaatgccaatacaggttgcagcagaaagacattgcaagggcgacttggcgcagcctgatacaggcttacccgagcagcccggcggcaaaacgcgccgccgcagccgtacgcaaacgatag

SEQ ID NO: 39605 - DNA, 1428 bp, Neisseria meningitidis
atgatacacaccgaaccgagcgcgcagccgtcaactatggacacggctgcttttttaaagcacatcgaatccgcattccgccgcattttttcagacggtatcgacctgatgcgatacctgcccgaagacaaatggcttgccttgaagcaggcgggtttgctgttgcccttcctcgacaaaagacacggcggccgcaagggcagccagtttgaaattcaggaagtattgcggattgcggggcattacggcgtacccgttacgctgcgtaccggcatcgaaggcgcgctggtgttgcagccactgcaagagttcggcgatgaagcgcaaatcgcacagggtttggacatggttttcaaaggcgagggcggcggtttgggcgttaccgaacccgaaacctccggcgcggcgattgcccgagaaatgcagtcttactacgaatataccgacggacaaaccatttacgtcaacgccgcaaaatactggcagggcaactcgcaaagcgacttcctccttgttgccgccaaagaacgcaaaaacggcaaactcgccaaagtcatcgacctgctgctcgtccccaaaacatacatccgctgcgaaaccctcgcatccgaaggcttgcgcgccgtccgttacgccgtcaaccgcatcgatgccgaaatgcctgcaaccgccgtgatgaaactctcccagagcgacgccgcaggtttgcgcgcgttccaaaacatctttatccgcagccgcctgcaactgatcggcatgacgcacggcattatggaatacatccttgaaaacctggaacgatacgtccgcaacgacatcagattcgtcgattacgaacgccgcgaaatccggcgccgccatcaggtttccgagattctttaccgctacgtctgccattccgtttcgcccgttgcacccgtcgcccatcagctgatggaggcgaacatcgtcaaaaccctcgccacggaatacacttacgccgccgcgcaaatgttgcaaaaacttttgggcgcgaagggttttgaacgcggacacaccgccggcaatatcgctatcgacatccgtcccttcacgatttttgaaggcccgaacgatatgctttatgccgaaatttacgaccagttcgtccgcgccaccgccgaagaaaaagaagcaggcatgaagttggacaaaaaccaaaccctgctcgaccgcctgcaaaccgatgcccgctttgccgccgtcgcccgcgactacactttgcccgaagacatccgcagcttcctgcaggaacacaccctgaccgacgcctgcgccctgcaaaaagtcttcatcggcaaaatcatcgcccgactctttgtcttcgtacaggcggaacacgaagacaccgcagccttcctgctgaacgacatccgcaaagatatattggactgccgatattgcggatag

SEQ ID NO: 39606 - DNA, 228 bp, Neisseria meningitidis; identical to SEQ ID NO: 38242
  misc_feature 205, 206, 207, 208, 209: 'n' is a, c, g or t

SEQ ID NO: 39607 - DNA, 1446 bp, Neisseria meningitidis; identical to SEQ ID NO: 38178

SEQ ID NO: 39608 - DNA, 345 bp, Neisseria meningitidis
atgaaaaaattattgattgccgcaatgatggcggctgccttggcagcttgttcgcaagaagccaaacaggaggttaaggaagcggttcaagccgttgagtccgatgttaaagacactgcggcttctgccgccgagtctgccgcttctgccgtcgaagaagcgaaagaccaagtcaaagatgctgcggctgatgcaaaggcaagtgccgaggaagctgtaactgaagccaaagaagctgtaactgaagccaaagaagctgtaactgaagcagctaaagatactttgaacaaagctgccgacgcgactcaggaagcggcagacaaaatgaaagatgccgccaaataa

SEQ ID NO: 39609 - DNA, 651 bp, Neisseria meningitidis
atgatccgtttcgaacaagtttccaaaacctatcccggcggttttgaagccctgaaaaacgtcagcttccaaatcaacaaaggcgaaatgatatttatcgcgggacactccggttcgggcaaatccaccgtcctcaagctgatttcgggcattaccaaaccaagcaggggcaaaatcctgtttaacgggcaggacctcggcacattgtccgacaaccaaatcggctttatgcgccaacacatcggcatcgtgttccaagaccacaaaatcctctacgaccgcaacgtcctgcaaaacgtcatcctgccgcttcggattatcggctatccgccgcgcaaagccgaagagcgtgcccgcatcgccatcgaaaaagtcggcctgaaaggacgagaattggacgatcccgtaaccctctccggcggtgaacaacaacgcctgtgcatcgcccgcgccgtcgttcaccagcccggcctgctgattgccgacgaaccctccgccaacctcgaccgcgcctacgcgctcgatattatggaattgttcaaaaccttccacgaagcgggaacaaccgtcatcgttgccgcacatgacgaaaccctgatggcggactacggccaccgcatcctgcgcctctcgaaaggacgactcgcatga

SEQ ID NO: 39610 - DNA, 417 bp, Neisseria meningitidis
atgcgcttactccatactatgctccgcgtgggcaatctcgaaaaatccctcgatttctaccaaaacgttttgggtatgaaactgctccgccgaaaagattatcccgaaggcagatttacccttgccttcgtcggttacggcgatgaaaccgacagcacggttttggaactgacgcacaactgggatacggaacgatacgacttgggcaacgcctacggacacatcgcggttgaagtggacgatgcctacgaagcctgcgaacgtgtgaagcggcagggcggaaacgtcgtccgcgaagccggcccgatgaaacacggcacaaccgtgatagccttcgtcgaagaccccgacggatacaaaatcgagttcattcaaaagaaaagcggcgacgattcggttgcctatcaaactgcctga

SEQ ID NO: 39611 - DNA, 483 bp, Neisseria meningitidis
atgacgaacatccgtatcggacagggctacgatgtccaccaactgaccgaaggcagaaagctgatacttggcggagttgaaatcccatttgaaaaagggctgctcggacactccgatgccgatgcgctgctgcacgccgttaccgacgcgctgctcggtgcggcaggtttgggcgatatcggcagccatttccccgacaccgccgcagagttcaaagatgcggacagccgcgtccttttgcgtgcggcgtatcaaagcgttcaggcgcagggttggcaggcggtcaatgtcgatacgaccgtgattgcacagaaacccaaactcgcgccgcatattccgcaaatgcgtgccaacatcgccgccgatttgggcatagacatttcgtgcgtcaacatcaaaggcaaaaccaacgaaaaactcggttatctcgggcgcatggaaggcatagaggcgcaggcggcggtattgctggtacggatttga

SEQ ID NO: 39612 - DNA, 867 bp, Neisseria meningitidis
  misc_feature 8, 9, 10, 11, 12: 'n' is a, c, g or t
gtgtgtgnnnnnggcgtaccacaggatttgttgcccgtcgtcagcggtcgcgcatcggaaatcggccgtgaatttgccacgaacccgattatccgcaaaatcagcttcaccggctctaccgaagtcggtgcgaaaatttttgccgacagcgcggcggacattaaaaaactcagtttggaactgggcggcaacgcgccgtttatcgtgtttgacgatgccgatttggacaaagccgtcgaaggtgcgctcgccagcaagttccgcaacagcggtcagacctgcgtctgcaccaaccgcgtttacgcccaatcgggcatttacgacgcattttgccgcaaattgagtgaaaaagcagccgcgctcaaattgggcaacggcttggaggatggcgtcaaccaagggccgctgattgaggaaaaagcggtagaaaaagtcgagcagcacatcgccgacgcgctctcaaaaggcgcggtctgtctgaccggcggcaaacgcagcgcattgggcggaacgttttttgagccgaccgtcttaagcggcgtaacggcgcaaatggcggtggctcgcgaagaaaccttcgggcctttgtgtccggtattccgttttgaaaccgaagtcgaggtcatcgaggctgcgaacaatacggaatacggtttggcagcctaccttttcaccgccgacaccgcccgccaatggcgcgtcggcgaagccttggaatacggtatggtcggcatcaatacgggcttaatcagcaatgaagcggcaccgttcggcggcgtgaaacgcagcggtttgggacgtgaaggcagcaaatacggtgcggacgaatatctggaattgaaatatctgtgtatggatgtcgggtga

SEQ ID NO: 39613 - DNA, 1209 bp, Neisseria meningitidis; identical to SEQ ID NO: 36314

SEQ ID NO: 39614 - DNA, 633 bp, Neisseria meningitidis
atgaccctacgttacgaaatcttccccgttacccccttccgccaaaactgcaccctgatttgggacgacgaaagcggcgaagccgtcctgaccgatgtcggcggcgacgtgccgttcctgctgcaagcgttggcaaaccgcaaacttacgctcacggcaatctggctgacgcacggccatctcgatcacgcgggcggcgtggtcgaaatgttgaaaacgcataaagtccctgtcctcgggccgcatccggacgatgaattcctgctccaatcgctgccgcaaaccaccgcgcaatacggatttcccgtctcgcccgcctttgcgccgaaccgttggctcgaagaaggcgaaacgctcacggtcggacgctatgcctttcaagtgctgcatattccgggccatacgccgggacatatcgtcttttattgtgccgaggcggaattgctgattgcgggcgacgtgctgttttacgaaaccataggcagaaccgattttccgcgcggcaaccacgccgacttaatcaataatatccgcaacaaattattcacccttcccgaaaccgtgcaagttgtcgccggacacgggcgtatgacttccatcggacacgaaaagcggcacaatccgtttttctaa

SEQ ID NO: 39615 - DNA, 1545 bp, Neisseria meningitidis
atgtgcggcgtattaggtttggtcagtcatgaacccgtgaaccagcttctgtacgacggtttgcagatgttgcagcacaggggacaggatgcggcgggcattgtaacggccgaaggcggtaccttccatatgcacaaaggcaaagggatggtgcgcgaagtgttccgcacgcgcaatatgcgtgatttgaccggcaacgccggcatcgcccacgtccgttatcccacggcgggcaacgccggcagcagcgcggaggcgcagcctttctacgtcagctcgccgttcggcatcgttttggcgcacaacggcaacctcaccaacactgccgaactttatgaaaacgtgtgcaacaaacacctacgccacgtcaacaccagctccgattccgaagtcttgctcaacgtattcgcgcacgaattgcgccgcgaagtctctaaaaacgccgacccgcaccggctcaatgccgacaatattttcaacgccgttgccgaagtccaccgcctggtgcgcggcgcatacggcgtggttgccatgattgcgggctacggtatgcttgccttccgcgacccttacggcatccgcccgctggtattgggttcgcaaaccgacagcgaaggcagaaaatcctatgccgtcgcctccgaatccgtcgccttcaacgcgcttacctacgatttggaacgcgacatccggccgggcgaagcggtatttgtcggctttgacggcacaatgattgcccgccaatgcagcgaccgtgccaaactcagcccctgcctttttgaatatgtttattttgcccgccccgactctgtgattgacggcgtatccgtttaccaatcgcgcttggatatgggcgtgtcgctggcggaaaaaatcaaacgcgagctgcccgtggacggcatcgacgttgtgatgcccatccccgacaccagccgccccagcgcgatggagcttgccgtccatctcgacaaaccctaccgcgagggtttgattaaaaaccgctatatcggccgcacctttattatgcccggacaggcgacgcgcaaaaaatccgtgcgccaaaaactcagcccgatggaaaccgaatttgcaggcaaaagcgtgttgctggtggacgactccatcgtgcgcgggacgaccagccgcgaaatcgtcgaaatggtacgcgcggcgggcgcgcgcaaagtctatatcgcctccgccgcgcccgaagtgcgctatcccaatgtgtacggcattgatatgcccacgcgcgaagagttgattgccaacgagcgcagcgcggcggaaatcgccgccgaaatcggcgcagacggcatcgtgttccaaaatttgagcgatttggaagccgtcgtcaaagcactcaatccgaaaatcgaatccttcgattcgtcctgtttcaacggcatttatcagaccggcgacatcgatgatgcctacctcgaccgcctgtctgccgagaaatccggctgcggcggtctgaaaatccacccgagcaggatggaacacagcatcagcatcagcgatgcgggcgacgaagaataa

SEQ ID NO: 39616 - DNA, 354 bp, Neisseria meningitidis
atgtttaccacaaacgatttacgccatttcctagaaggtttggccatcctattctcaatcggctattggggcaccatgctgctgttgctttggtttctcgtccgctttgcctataaaaagcccaaacggaaccccggcaaaatcctttcaggcagcctgaccgccgccgctatcctgatgctgtttgtttggattattcccaaacaattcggcccgatcaaagaagaaatacaggcacaagaagagtgggacagaaaatacaaagaagccgaagccgtgtttaacgaacaatgcaaaacggcgggggaaagatttaccagacggcggacaatgtggaagggattatgctgttga

SEQ ID NO: 39617 - DNA, 2112 bp, Neisseria meningitidis
atgaaaatatcatttcatttagctttattacccacgctgattattgcttccttccctgttgctgccgccgatacgcaggacaatggtgaacattacaccgccactctgcccaccgtttccgtggtcggacagtccgacaccagcgtactcaaaggctacatcaactacgacgaagccgccgttacccgcaacggacagctcatcaaagaaacgccgcaaaccatcgatacgctcaatatccagaaaaacaaaaattacggtacgaacgatttgagttccatcctcgaaggcaatgccggcatcgacgctgcctacgatatgcgcggcgaaagcattttcctgcgcggttttcaagccgacgcatccgatatttaccgcgacggcgtgcgcgaaagcggacaagtgcgccgcagtactgccaacatcgagcgcgtggaaatcctgaaaggcccgtcttccgtgctttacggccgcaccaacggcggcggcgtcatcaacatggtcagcaaatacgccaacttcaaacaaagccgcaacatcggtgcggtttacggttcgtgggcaaaccgcagcctgaatatggacattaacgaagtgttgaacaaaaacgtcgccatccgtctcaccggcgaagtcgggcgcgccaattcgttccgcagcggcatagacagcaaaaatgtcatggtttcgcccagcattaccgtcaaactcgacaacggcttgaagtggacggggcaatacacctacgacaatgtggagcgcacgcccgaccgcagtccgaccaagtccgtgtacgaccgcttcggactgccttaccgcatgggttttgcccacccgaacgattttgtgcaagacaagctgcaagtttggcgttccgaccttgaatacgccttcaacgacaaatggcgtgcccaatggcagctcgcccaccgcacggcggcgcaggattttgatcatttctatgcaggcagcgaaaatggcaacttaatcaaacgtaactacgcctggcagcagaccgacaacaaaaccctgtcgtccaacttcacgctcaacggcgactacaccatcggccgttttgaaaaccacctgaccgtaggcatggattacagccgcgaacaccgcaacccgacattgggtttcagcagcgccttttccgcctccatcaacccctacgaccgcgcaagctggccggcttcgggcagattgcagcctattctgacccaaaaccgccacaaagccgactcctacggcatctttgtgcaaaacatcttctccgccacgcccgatttgaaattcgtcctcggcggccgttacgacaaatacacctttaattccgaaaacaaactcaccggcagcagccgccaatacagcggacactcgttcagccccaacatcggcgcagtgtggaacatcaacccagtccacacactttacgcctcgtataacaaaggcttcgcgccttatggcggacgcggcggctatttgagcatcgatacgtcgtcttccgccgtgttcaacgccgaccccgagtacacccgccaatacgaaaccggtgtgaaaagcagttggctggacgaccgcctcagcactacgttgtctgcctaccaaatcgaacgcttcaatatccgctaccgccccgatccaaaaaacaacccttatatttatgcggttagcggcaaacaccgttcgcgtggcgtggaattgtccgccatcgggcaaatcatccccaaaaaactctatctgcgcggttcgttgggcgtgatgcaggcgaaagtcgttgaagacaaagaaaatcccgaccgagtgggcatccatttgaataataccagcaacgttaccggcaacctgtttttccgttataccccgaccgaaaacctctacggcgaaatcggcgtaaccggtacaggcaaacgctacggttacaactcaagaaataaagaagtgactacgcttccaggctttgcccgagttgatgccatgcttggctggaaccataaaaatgttaacattacctttgccgcagccaatctgctcaatcaaaaatattggcgttcggatgccatgcccggcgcgccgcgcacttatacggcgcgggttaattacagtttctaa

SEQ ID NO: 39618 - DNA, 462 bp, Neisseria meningitidis
atgaccgaagtcatcgcctacctcatcgaacatttccaagatttcgatacctgtccgccgcccgaagacttgggtatgctgcttgaagaagcgggtttcgatacgatggaaatcggcaacaccctgatgatgatggaagtattgctcaacagctccgaattttccgccgaacctgccgacagcggcgcattgcgcgtgtacagcaaagaagaaaccgacaacctgccgcaggaagtgatggggctgatgcagtatctgattgaagaaaaagccgtcagctgcgaacagcgggaaatcatcatccacgcgctcatgcacattccgggcgacgaaattaccgtagataccgccaaagtgctgaccctgctgcttttatgggcaaacaagagcgagctgcccgtgttggtcggcgacgagctgatgagcgcgcttttactcgacaacaaacccacgatgaactga

SEQ ID NO: 39619 - DNA, 207 bp, Neisseria meningitidis
ttgtcagcatcaacggttgcttcttatttaagtttacttagcaataaattgagagagaacaatccggatattgttcaatttaatattgaattcaaagcagtaggcaattgcgacaagttgtcattgatacaacaacatggggtaaaaagtattcttttagatgcttcggcatatcaattatccagaaacaggcggattcgcatttga

SEQ ID NO: 39620 - DNA, 2274 bp, Neisseria meningitidis; identical to SEQ ID NO: 38845

SEQ ID NO: 39621 - DNA, 624 bp, Neisseria meningitidis
  misc_feature 4, 5, 6, 7, 8: 'n' is a, c, g or t
gtgnnnnnaagcacagtaagcgattatttcagaaacatccgtgcgcattccatccacccccgggtgtcggtcggctacgatttcggcggctggaggatagcggcagattatgccagttacagaaaatggaacaacaataaatattccgtcaacacaaaagaggtgctaagaaacaataatggcaacaggaaagaactgaagacggaaaatcaggaaaacggtacattccacgcagtctcatcgctcggcttatccgccatttacgatttcaaactcaacgataaattcgataaattcaaaccctatatcggtgcgcgcgtcgcctacggacacgttaaacatcaggttcattcagtgaaaaaagaaaccacgactgttttcactgcaccaacgcaaggtgctcaaaagggaggcgttatcccagaagctacgattagcaaacctgcctatcacgaaagccacagcatcagcagcttgggtcttggtgtcatcgccggtgtcggtttcgacatcacgcccaagctgaccctggacaccggataccgttaccacaactggggacgcttggaaaacacccgcttcaaaacccacgaagtctcattgggcatgcgctaccgcttctga

SEQ ID NO: 39622 - DNA, 753 bp, Neisseria meningitidis
atgaccgacatccttattgacaacaccgccaccgaagccgtccgcgccctgatacaggcattctcccttgtgcccgtttcccaaccgcccgaacaaggcagttacctccttgccgaacacgataccgtcagcctcaggcttgtcggggaaaaaagcagcgtcatcgtcgattttgcctccggcgcggcacaataccggcgcacaaaaggcgggggcgaactcatcgccaaagccgtcaaccacaccgcgcaccccaccgtttgggacgcaaccgcaggattggggcgcgacagcttcgtcctcgcctcgctcgggctggccgttaccgccttcgagcaacatcccgccgtcgcctgcctgctttcagacggcatccgccgcgccctcctcaatcccgaaacgcaagacaccgccgcgcgcatcaccctgcatttcggcaacgccgcagtacaaatgcccgcacttgttcaaacacaaggcaaacccgacatcgtctatctcgaccccatgtatcccgaacgccgcaaaagtgccgccgttaaaaaagaaatgacctacttccaccggctcgtcggcgaagcgcaagatgaagcggcactcctgcataccgcacgccaaacagcaaaaaaacgcgtcgtcgtcaaacgcccccgcctcggcgaacaccttgccggacaagcccctgcctaccaatacaccggcaaaagcacccgcttcgacgtttacctgccctacgggacggacaagggataa

SEQ ID NO: 39623 - DNA, 2403 bp, Neisseria meningitidis
atgcaactgctggcagccgaaggcattcaccaacaccaattgaatgttcagaaaagtacccgtttcatcggcatcaaagtgggtaaaagcaattacagcaaaaacgagctgaacgaaaccaaactgcccgtacgcgttatcgcccaaacagccaaaacccgttccggctgggataccgtactcgaaggcaccgaattcaaaaccaccctttccggagccgacatacaggcaggggtgggtgaaaaagcccgagccgatgcgaaaattatcctaaaaggcattgtgaaccgtatccagtcggaagaaaaattagaaaccaactcaaccgtatggcagaaacaggccggacgcggcagcaacatcgaaaccctgcaactgccaagtttcaccggccccgttgcgcccgtactctctgctcccggcggctacatcgtcgacattccgaaaggcaatctgaaaaccgaaatcgaaaaactcgccaagcagcccgagtatgcctatctgaaacagctccaagtagcgaaaaacatcaactggaatcaggtgcagcttgcttacgacagatgggactacaaacaggagggcttaaccgaagcaggtgcggcgattatcgcactggccgttaccgtggtcacctcaggcgcaggaaccggagccgtattgggattaaacggtgcggccgccgccgcaaccgatgcagcattcgcctctttggccagccaggcttccgtatcgttcatcaacaacaaaggcgatgtcggcaaaaccctgaaagagctgggcagaagcagcacggtgaaaaatctggtggttgccgccgctaccgcaggcgtagccgacaaaatcggcgcttcggcactgaacaatgtcagcgataagcagtggatcaacaacctgaccgtcaacctagccaatgcgggcagtgccgcactgattaataccgccatcaacggcggcagcctcaaagacaacttgggcgatgccgcactgggtgcgatagtcagtaccgtacacggagaagtagcgagcaaaatcaaatttaatctcagcgaagactacattacccacaagattgcccatgccatagcgggctgtgcggcagcggcggcgaataagggtaagtgtcaggatggtgcgatcggtgcggctgtgggcgagatagtcggggaggctttgacaaacggcaaaaatcctgccactttgacagctaaagaacgcgaacagattttggcatacagcaaactggttgccggtacggtaagcggtgtggtcggcggcgatgtgaatacagcggcgaatgcggctaaagtcgcgattgaaaataacctattatctcaagaagagtatgctcttagagaaaaattgatcaaaaaagccaaagggaaaggcctattatctttagattggggcagcctgaccgaacaagaggcaaggcagtttatctatttgattgagaaagatcgatattctaatcaattgcttgaccgatatcaaaaaaatccaagtagtttaaataatcaagaaaaaaatattcttgcatattttattaaccaaacctctggaggtaacacagcttgggcagcttcgatactgaaaacgccccagtcaatgggtaatctcactattccttccaaagatattaataacaccttatcgaaagcctatcaaacattgagtcgttatgattcttttgattacaaatcagctgttgccgcacaacctgcactttacttattaaacggaccgcttggcttcagtgtcaaagcagctactgtggcagcaggaggatataacattggacagggagcgaaagcaatctctgcgaaagcaatctctaatggagaatatctgcatggtacagttcaggttgttaatggcacattgatggttgcaggatctgtatctgcacaggctgcaatatcggccaagcctgcacctgttacccgttatctgagcaatgacagtgctcctgctttaagacaagctttaactgctgaaagccagagaatccgcatgaaactgccggaagagtatcgacaaatagggaatcttgcgatagcaaaaattgatgttaaaggattaccgcaaaggatggaagcatttagttctttccaaaaaggggaacatggatttatttcgttacctgaaacaaaaatttttaaacctatatctgttgataaatatcataatattgcctctcctcctagaggaacattaagaaatatagatggagaatataaattacttgaaactatagcacagcaactcggaaataatcgtaatgtatcaggtagaattgatctatttacagaattaaaggcctgtcaatcttgcagcaatgttattttagagtttagaaatcgctatccaaatattcaattaaatatttttacaggaaaatag

SEQ ID NO: 39624 - DNA, 207 bp, Neisseria meningitidis
atgaaagcagtcagggatatagccttatggctggcagtaacggtttggatcaactttttccccgacaattaccgctatgataccgttccacagggacggtacggatactggcatgcagaccatccgtggtatccctatgtgcgctttctgctgcctttatttttagcctgtatccttttctaccgtcattttcggaaacggaaatag

SEQ ID NO: 39625 - DNA, 387 bp, Neisseria meningitidis; identical to SEQ ID NO: 37252

SEQ ID NO: 39626 - DNA, 639 bp, Neisseria meningitidis
atgaaaaaaatcaatgttgcccccgaaaatccccaataccgcatcgtcgaaatctttgaaagcctgcaaggcgaaggctggaacacgggcatacccgccgttttcgtccgcttgggcaaatgcaacctcgcctgcggctggtgtgataccgattatttgacattcggcatgatgagcctgtccgacatcttaggctgtctgaaaacctatgccgcccgcaacatcatcatcaccggcggcgaaccgaccatccagccgcatctcgatatgctgctggacatgctcaaggcggaaggttatttcctctgtatcgaaaccaacggactcaatcccgcgccgccgcaaatcgactatgtcgccaccagccccaaagcctgctatgccgccaaatacgaaaaaagctgtatcgaaacagccgacgaagtgcggattgttgccgacggcgatgtccttgcgttctgtgaaaatatggaacgcaaaatccgcgcgcatcattactacctttcgccctgtgagcaagacggtgcgatgaacatctacgacaccatccgccaaatcggtattttaaacagtcgccccgacgcatccgtgcattggcagttgagcgtgcagacgcacaaatgggcgggaatagagtag

SEQ ID NO: 39627 - DNA, 1335 bp, Neisseria meningitidis
atggcaaaaaaatatttcggcacggacggcgtgcgcggcgaagtggggcaatttccgattacgcccgatttcgtattgaaactcggctatgcggcggggcaggttttggtgcagcacgacaccgaccaaaaaccgaccgtcctcatcggcaaagacacgcgcatttccggctatatgctggaagccgctttggtggccggttttacggcggcgggtgtgaatgtggtacagaccggaccgctgcccacgcccggcgtggcttatctgacccgcgcattgcgcctgtccgccggcgtgatgatttccgcgtcgcacaacgcctattccgacaacggcatcaaattcttcgccgaaggcggcgtgaagctttccgatgaaatcgagttggaaatcgaagccaaaatcgacggcgaaatgaaaacccaaccgtccgcccgtctcggtcgcgcacgccgcatcagcggtgcggacgaccgctatatcgaattttgcaaatccaccttccccagccattccgaccttcggggtttgaagttggttatcgataccgccaacggcgcggggtacggtgtcgcacccaaggtgtttcacgaactgggcgcacaagtcgtcagcatcggcgacgaacccaacggctacaatatcaatgaaaaatgcggtgcgacttataccaagacactccaggcagccgttttacagcatgaagccgactacggcatcgccttagacggcgacggcgaccgcctgatgatggtcgataaaaacggtaaggtttacgacggcgacagcctgatttacgtcatcgccaaagcccgcgcccgagaaggtatcaacatcggcggcgtggtcggcacggttatgaccaatatggcgatggaaatcgccctgaaagagcagggcgtcgatttctgccgcgccaaagtcggcgaccgctatgtgttggaacagctgaaccaacgcggctggctcatcggcggcgaagccagcggccatattttgtgcatggacaaacacaacaccggcgacggcattatttccgcgctgcaagttttggcggcactgcaaacgctgaaccaagacctcgccaccgtttgcgccgattggcagccgtatccgcaaactatgattaacgtgcgcatccaaaaaggtcagaaatggcaggaagcctcaaaagacgtgttggcggaagtggaaaaagaactcgaaggcaaagggcgtgtcgtgttgcgcgcttcgggaaccgaacccgtcgtgcgagtgatggttgaggcgcggcaggcggattgggcgcgcgacggtgcggaacgtattgcttccgccatcggcagcctttag

SEQ ID NO: 39628 - DNA, 303 bp, Neisseria meningitidis
atgggttatcgtgtcggcatgaactgttttgatacaagattgcaggcagacgactatttattgtcgtctcttcctcctactgttacagaagaaggaaaaatcatcaggccggaaagggtgggcgataaatggattttgaacggaaagccggttacgttgtcttatccggaatgttccaattttgagcagataaagcaaggttcttatgtcggttcgacggttctaattctgttcgtagtcattttcggtttcaggcttctgattaatttcttaaaagacatgggcaaggttggtactgattga

SEQ ID NO: 39629 - DNA, 738 bp, Neisseria meningitidis
atgaaaaaattatctcggattgtattttcaactgtcctgttgggtttttcggccgctttgccggcgcagacctattctgtttattttaatcagaacgggaaactgacggcgacgatgtcttctgccgcttatatcaggcaatatagtgtggcggagggtattgcgcacgcgcaggatttttattatccgtcgatgaagaaatattccgaaccttatatcgttgcttcaacgcaaatcaaatcttttgtgcctaccctgcaaaacggtatgttgattttgtggcattttaatggtcagaaaaaaatggcggggggcttcagcaagggtaagccggacggggagtgggtcaactggtatccgaacggtaaaaaatctgccgttatgccttataaaaatggtttgagtgaaggtacggggtaccgctattaccgtaacggcggcaaggaaagcgaaatccagtttaaacagaataaggcaaacggcgtatggaagcaatggtatgccgacggcaatatcaaaacggaaatggttatggtcaacgatgagcctgccaaaattctgacttgggatgaaagcggccgattactctcggaactgtctatccgccaccatcaacgcaacggggtggttttggagtggtatgaagatggttctaaaaagagcgaggctgtttatcaggatgacaagttggtcaggaaaacccagtgggataaggatggttatttaatcgaaccctga

SEQ ID NO: 39630 - DNA, 2301 bp, Neisseria meningitidis
atgcaccgacccaccgccaaacagattctgcacgaagtattcggttatcccgaatttcgtggcaagcaggaggctattgtcaatgctttggccggcggcgagagtttgatggtgctgatgccgacgggcgggggcaagtctttgtgttaccagattcccgcgctgatgcgcgaaggcgtggcggttgtcgtatcgccgctgattgcgttgatgaacgaccaagtggccagcctgcatgtggccgggattgaagcggcggcagtcaacagcggcacatcggcagacgaggcgcgcgagattgccgacaagcttgcccaaggccgtctgaaactgctttatgtcgcaccggaacgcttggttaccgaccgctttttgcgttttctcgaccaacaaaccgtcagcctgttcgccattgacgaagcgcactgcgtcagccagtggggacacgatttccgccccgaataccaacagctcggcatgcttgccgaacgctatccgaacgtcccgcgcatcgccctgaccgccaccgccgatgccgccacgcgcgccgacatcaagcattatctgcacttggacgatgcgcccgaatttatttccagcttcgaccgcccgaatatttattatcaggttatcgaaaaaaacaacggcaaaaaacaactgcttgaatttatccgcaaagaaatggcggggcaaagcggcattgtgtattgcctaagccgcaaaaaggttgaagatgtggcgcagtttttgcgtgaaaacggattaaacgcgattccgtatcatgctggtttgagcatggacgtgcgcgaggaaaaccaacgccgctttacgcatgaagacaatattatcgtggtggcgaccgtggcgttcggcatgggcatagacaaacccgacgtgcgctttgtcgcccatctcgatatgccccagagtgtcgaacatttctatcaggaatcggggcgtgccggcagggacgggctgcctgccgcgagctggctgtgttacggcttgaacgattgggtgttgctgcgcgaacggattgccgaaggcaacagcgatgaggtgcaaaagcaaatcgaaatgcaaaaactcgatgccatgctttccgtctgcgaaaccgccgcctgccgccgcgtactgttgctcaaacattttggcgaagaatccgaaccctgcggccattgcgacaactgcctgcatccgcctgtgcggtttgacggcacggtgttggtacaaaaattactcagctgcgtgtaccgcgccggacaacgttttgccgccggttacatcaccaaccttttgcgcggtaaaagcgacgattggatacgcggcaaccggcacgaacaactgtctaccttcggcatcggtgcggagttgtccgacaaagaatggcgcagcgtcatccgccagtgcatcagcctcggctacctcaccgtcaacattgcccgatatcaggcattgcaactgaccgaagccgccaaaaaagtcctcaaaggcgaaaccgaagtgatgctgcgtccgctcaagcgcggcaagcccgccgcccgcaccctcaaagacaactggctgcgtaccgaacgcgaagaacgcctgtggcaggcattgcgcgtttggcgtatgaaacaggcagaagccgaaggcatccccgcctatatgattttcggcgacaaaaccctgcgcgaccttgtcgaaaaaatgccgcaaaacctcaacgggctgcacgacatctacggcttgggcgaagccaaaaccgaacgtttcggacacggcatactcgaagtctgccgcaacgccgccggcttcagccgcgacgcggtcatccgtccgcaaaccgaacgcgaacaacaactgcgtcaaaaactcgaggcctggcggtatgaacaggcaagggcggaaaactgcgccctgcatgccgtcctctccgacgaaagccttgccgatatgcttgccgatacgcccgaaaccgaaaccgacctcgaaggcgtacacggcttgggcagcgtacgcgccgccaaatacggacgggacatcctcgccgtctgccgtccgttttcagacggcatcgatgaaaccgccaaacacaaacgccgcctgatgcgcgccctgatccaatggtgcaacgaaacggcaaaacacgaacagtccgaaccctaccgcattctcagcaaagccgccctacgcgccattgccgccaaacagccggaaggtttggcggagcttgccgccgtatatggcgtaggcgaagaaaaagccgcacgttacggtgcggcggtgttggcggtattggaacgaaatgccgtctga

SEQ ID NO: 39631 - DNA, 1197 bp, Neisseria meningitidis
atgccgtctgaagcgttcagacggcataacgcaacaaacactttaatatccatcacacaggatgacacgatgacccatatcaaacccgtcattgccgcgctcgcactcatcgggcttgccgcctgctccggcagcaaaaccgaacagcccaagctcgactaccaaagccggtcgcaccgcctgatcaaactcgaagtcccacctgatttgaacaaccccgaccaaggcaacctctaccgcctgcctgccggttcgggcgccgtccgcgccagcgatttggaaaaacgccgcacacccgccgtccaacagcctgccgatgccgaagtattgaaaagcgtcaaaggtgtccgcctcgagcgcgacggcagccaacgctggctcgttgtcgacggcaagtctcatgccgaaatctggccgctcctgaaagccttttggcaggaaaacggcttcgacatcaaatccgaagaacccgccatcggacaaatggaaaccgagtgggcggaaaaccgtgccaaaatcccccaagacagcttgcgccgcctattcgacacagtcggtttgggcggcatctactccaccggcgagcgcgacaaattcatcgtccgtatcgaacagggcaaaaacggcgtttccgacatcttcttcgcccacaaagccatgaaagaagtgtacggcggcaaagacaaagacacgaccgtatggcagccctccccgtccgatcccaacctcgaagccgctttcctgacgcgctttatgcaatatttgggcgttgacggacagcaggcggaaaacgcatcggcaaaaaaacctacccttcccgccgccaacgaaatggcgcgtatcgaaggcaaaagcctgattgtcttaggcgactacggcagaaactggcggcgcaccgtgctcgccctcgaccgcatcgggctgaccgtcgtcggtcaaaacaccgaacgccacgctttcctggttcaaaaagccccgaacgaaagcaatgcagttaccgaacaaaaacccggcctgttcaaacgcctgctgggcaaaggcaaagcggagaaacctgccgaacagccggaactgattgtctatgccgagcctgtcgccaacggctcgcgcatcgtcctgctcaacaaagacggcagcgcatatgccggcaaagacgcatccgcattattgggcaaactccattccgaactgcgttaa

SEQ ID NO: 39632 - DNA, 1239 bp, Neisseria meningitidis
atgatttatccgtggcataatgagcaatggcggcagattgcggaacattgggagcgtcgtcccaatgcatggctgtttgtcggcaaaaaagatacggggaaaactacatttgcccgctttgcggcgaaggcactgttgtgcgaaacccctgcaccgggctgcaaaccctgtggcgaatgtatgtcctgccatctgtttggacagggaagccatcccgatttttacgaaatcacccccttgtcggacgaacccgaaaacggacgcaaactgttgcagatcaaaatcgatgccgtcagggaaatcatcgataatgtgtacctgacttcggtacggggcggtttgcgcgtgattctgattcatcctgcggaaagtatgaatgtccaagccgccaacagtttgttgaaagtgttggaagagccgccgccacaagtggtctttttgctggtcagccacgcggcggacaaggttttaccgaccattaaaagccgctgccggaagatggttttgcccgcgccttcccatgaagaggcattggcatatctgcgtgaaaggggtgtggcggaacctgaggaacgtctggctttccattccggagcgccgctgtttgatgaggcggacggtgtccgtgcgttgcggattaaactgttggatattttggcagaaccgaggttgttgaagattttggattacgccgcgcttttcgataaggaaaaacttccgctcgccgtatttgatcagtcgggcggaattgccgatggcgtgcgcgccggtggtacaggcggaaaccatcccgtagctcgggccgcggtagcctttgaggatggtaacgtgtccggaaatcaggttgatcagcgaaccggggataaagaaagggttgattttgcgcgcgccgccttcgattacggctttgccggtgacctcgatgctgggcagtccgccgatgccggaaccgatgttcacgccgatgcggtctttgtcgaggttttccacatcgtccaagcccgaatcggcgattgcctgcaatgcggcggcaatgccgtagtggatgaatacgtccatccggcgcgcttctttcgcgctgatgtattgtccgatgtcgaaaccgcgcacttcgccggcgacacggctgttgatgtcggatgcgtcaaagcgggtaatcgcgccgatgccgcttttgccggcgagcagggtgtcccaagcctctgcgacagtgttgccgacaggggaaacctgacctaa

SEQ ID NO: 39633 - DNA, 1278 bp, Neisseria meningitidis
atgcgtagcagcgatattttaattgtagacgacgaaatcggcatccgcgacctgctgtcggaaatcctgcaggacgaaggttattcggtcgcattggcggaaaacgccgaagaggcgcgcaagctgcgccatcaggcgcgccccgcgatggtgctgctggatatttggatgcctgattgcgacggcatcacccttttgaaggagtgggcgaaaaacgggcagctcaatatgccggtggtgatgatgagcgggcatgccagcatcgataccgccgtagaagcgaccaaaatcggcgcgctcgactttttggaaaaaccgatttccctgcaaaagctgctgtctgccgtcgaaaacgcgttgaaacacggtgcggcgaaaatcgaaacgggaccggtgttcgacaagctgggcaacagtgcggcgattcaggaaatgaaccgtgaggtaggggctgcggtgaaacgtgcctctcccgtacttttgacgggcgaggcgggttcgccgtttgaaacggtggcacgctatttccataaaaacggtacgccgtgggtcagcccggcaagggtcgaatatctgatcgatatgccgatggaactgttgcagaaggcggagggcggcgttttgtatgtcggcgacatcgcccaatacagccgcaacatccaagccggcattgcctttattgtcggcaaggcagaacgctgccgcgtcagggtggtcgcatcgggcagcagggcggcaggttcagacggcattgcctgcgaggaaaagctggcggaactgctgtcggaatcggtcgtccgtattccgccgctgcgtatgcagcatgaagatattcccttcctgatacaggggattgcctgcaatgtggcggaaagtcaaaagattgcgcccgccgcattcagtgaagaggcacttgccgcattgacccgttacgactggccgggaaatttcgaccaactgcaaagcgtcgttgcaacgctgttgttggaggcggacggacaggaaatcggcgcggcggcggtttcttcccttttggggcagaatgtgcctgccgagggagcggaagatatggtgggcgggtttaatttcaacctgcccctgcgcgaattgagggaggaggtggagcggcgttatttcgagtaccacatcgcccaagaaggtcagaatatgagcaaagtggcgcagaaggtcggtttggaacgcacgcacctttaccgcaaactcaaacagctcggcatcggcgtttcgcgccgggcgggggaaaaaaccgaagaatag

SEQ ID NO: 39634 - DNA, 3435 bp, Neisseria meningitidis; identical to SEQ ID NO: 38192

SEQ ID NO: 39635 - DNA, 267 bp, Neisseria meningitidis
atggcacgcatggtattctgcgtcaagctcaacaaagaagccgaaggcatgaaatttccgccgcttcccaacgaattgggcaagcgcatttttgaaaacgtatcgcaagaagcgtgggcggcgtggacgcgccaccaaacgatgctgattaacgaaaaccgtttaagcctcgccgatccgcgcgcgcgcgaatacctggctcagcagatggagcagtatttcttcggcgacggcgcggatgccgttcagggatacgttccgcaataa

SEQ ID NO: 39636 - DNA, 924 bp, Neisseria meningitidis
atgccgtccgaacacccgttttcagacggcatttccacacccaaccccaaagaaaccatgaacgacaccgcccaaattaccgccagctacggccgccgctacattgtccgcacgcccgacggcacaacctacgaagccagcacgcgcaaaaaacgcgtcgatttcgcctgcggcgaccgtgtccgcatcagccccgtcaacgccgaacaagttgtgattgaagattttttaccgcgccaaagcctgctctaccgccaagacgcgtggaaaaccaaactcatcgccgccaacgttacccaactcctcatcgtaaccgccgccgtcccgagtccgagcatgcggctgctgcaacgcgccctgcttgccgccgaagccgccggcatccgcgccgtcatcgtcctgaacaaagccgacctgcccgaaaccgccctttggcgcgaaaaactcaaattctacgaaacgctgggttatcccgtcatcgaaacccgcgcactggaaaacgccgacatcctgcgccccgtcctgcaagggcacagcaacatcctgctcgggcagagcggtatgggcaaatccaccctgaccaacgcccttttgggcagccaaaccgcccgcaccggcgacatttccgccgcactcgactcgggaaaacacaccaccacccacgcccggctttatgatttgaacggcgaaacccaactcatcgactccccgggtttgcaagaatttggtttacaccacctccaagccgccgatttgccgcgctatttccccgatttccgccaccttgtcgggcaatgccgcttccacaactgcacccaccgcgccgaacccggctgcgccttcaaagccgccgccgaaaccagggcggcaagccccgaacgcctcgcctttttgcagggcatcaccgacgatctgctcaaataa

SEQ ID NO: 39637 - DNA, 810 bp, Neisseria meningitidis
atgattcaagacacccgaccccttatccgcgtcgttgccggcatcctgctcgattcagacggcaactacctgctcagctcgcgccccgaaggcaaaccctatgccggatattgggaatttgccggcggcaaggtcgaagcgggcgaaaccgacttccaagccttgcaacgcgagtttgaagaagaactcggcatccgcatccttgccgccacgccttggctgaccaaaatccattcctacgaacacgcccgcgtctgcctgaaattcctatgggtcaaccccggccaatggacgggcgaaccgcaatcccgcgaagggcaggaatggtcttggcagaaggcgggtgattttaccgttgcccccatgctgcccgccaacggcgcgcttttgcgttcgctgtccgttccgcgccgtttgtacggcagcctgaaaacgggtttgcacggggagaacagtatgggcgcgtaccgcgtcctgcctttgggttcggcagagggaagcggtgcgaacgttttgatggaggcggcgcaatggcaggacagacccgaacacgccgacagcgtgtggatgatggtgcagacccgcgaacaatggcggcaggcgcaggaaaagggcgcggatgttgtcgtgtggcgcgtgtgcaatgatgttcaggcacaagaggcggcagaagccctgcggcagggcgtatccgtgccgctcgtacttgcagcaaacggacagacggttgcacgttatggaaaactatggctcggattgggggcgcacgtggtggtaagggatgaaacaatagggaagaatcatgaataa

SEQ ID NO: 39638 - DNA, 1635 bp, Neisseria meningitidis
atgataaaaccgaacctgaggccgaagctcggctcttccgcgctgattgccttcctttccctgtattcctcgctggtattgaattacgccttttttgccaaagttgtcgagcttcatccttttaacggcaccggggcggatatcttcctctatacgatgccggtggtgctgttttttttaagtaatttcgtttttcacgtcattgccctgcctttcgtgcataaggtattgattccgttgatattggttatcagtgcggcggtgtcttaccaagaaatatttttcaatatctatttcaacaagtcgatgttgaataatgtcttgcaaactacggctgccgaaagcgcgcgcctgattacgccgggctatgtgctgtggattgtatgtttgggcgtattgcccgcgctggcgtatatcgccgtcaaggttaaataccgcgtttggtataaggagcttttgacgcgccttgtgcttgccgccgtttcctttttgtgcgcgttgggcatcgcaatgttgcaatatcaggattacgcctcgtttttccgcaacaataaatcagtaacccatctgattgtgccgtctaatttcatcggcgcgggcgtgtcgaaatacaaagattggaagcgttccaatattccttatacgcaattggatatggcggtcgtgcaaaaccggccggccggcagcctgcgccgtttcgtggtgctggtcgtgggcgagaccacgcgtgccgccaactggggtttgaacggttacagccgccaaactacgccgctgcttgccgcgcgcggcgatgaaattgtcaatttcccgcaggtcagaagctgcggcacatcgaccgcgcactccctgccgtgtatgttctcaaccttcgaccgcacggattatgacgaaatcaaagccgaacaccaagacaacctgctggacatcgtgcagcgcgccggtgtggaagttacttggttggaaaacgattccggctgcaagggcgtgtgcggcaaagtgccgaataccgacgttacctcgctcaacctgcccgaatactgccgcaacggcgagtgcctcgacaatatcctgctgaccaagttcgacgaagtcctcaacaaaaacgataaagacgcggttttaatcctgcataccatcggcagccacgggccgacgtattacgaacgctataccgaagccgaacgcaaattcacgccgacctgcgacaccaacgaaatcaacaaatgcacccgcgccacgctggtcaacacttacgacaatacggttttgtatgtggaccagtttatcgacaaggttatccgcaaacttgaaaaccgcgacgatttggaaagcgtggtgcattatgtttccgaccacggcgaaagtttgggcgaaaacgggatgtacctgcacgccgcgccttacgccatcgcgccttccgggcagacgcatatcccgatggttatgtggttttccaaagccttccgccaacacgggggcatagatttccaatgcctcaaacaaaaagcggcggaaaacgaatattcgcacgaccactatttcagcacggtattggggctgatggacatttccaatagccaaacctatcggaaggaaatggatatattggcagcctgccgccgtccgcgctga

SEQ ID NO: 39639 - DNA, 1266 bp, Neisseria meningitidis
atgagcaaaaaccaacccgcacaaccgaccaggcgcactctttttaaaaccgcgatcgcagccggagcagtcggcgcaatcggaggttatctcggcggcaaaaaacggggcgaaaccgccgaacgcaccgccgaaagtcaacactcgccccaagcctatccctgctacggcgaacatcaggcaggcatcgttacgccgcagcaggcgttttcgattatgtgcgccttcgacgtaaccgcgcaaagtgccaagcagctggaaaacctgttccgcacgctgaccgcccgcatcgagtttctcacccaaggcggcgaataccaagacggcgacgacaaacttccgccagccggcagcggcattttgggcaaagccttcaaccccgacgggttgaccgttaccgtgggggtgggcagcagcctgtttgacggccggttcggactcaaagacaaaaaaccgattcatttgcaggaaatgcgcgacttctccaacgataagctgcaaaaaagctggtgcgacggcgatttgagcctgcaaatctgtgccttcacccccgaaacctgccaagccgccctgcgcgacatcatcaaacacaccgtccaaaccgccgttatccgctggagtatcgacgggtggcagcctaaatccgaacccggcgcgatggcggcgcgcaacctgttgggcttccgcgacggcacgggcaaccccaaagtttccgaccccaaaaccgccgacgaggttttgtggacgggtgtggccgccaacagcctcgacgaaccggagtgggcgaaaaacggcagctatcaggcagtccgccttatccgccactttgtcgagttttgggacaggacgccgcttcaagagcaaaccgacattttcgggcggcgcaaatacagcggtgcgccgatggacggcaaaaaagaagccgaccaaccggattttgccaaagaccccgaggggaataccacgcccaaagacagccatatacgcctggcgaatccgcgcgatcccgaattcctcaaaaaacaccgcctcttccgccgcgcctacagctattcgcgcggactcgcctcaagcggacagcttgatgtcgggctggtgttcgtctgctatcaggcaaaccttgccgacggattcatcttcgtgcaaaacctcctcaacggcgaaccgctggaagaatacatcagccccttcggcggcggctatttcttcgtcttgcccggcgtggaaaaaggcggctttttggggcaagggctgctgggcgtataa

SEQ ID NO: 39640 - DNA, 1602 bp, Neisseria meningitidis
atgagtatcgtagaaatcaaagtccccgatatcggcggtcacgaaaacgtcgacatcatcgccgtagaagttaaagcgggcgacaccatcgccgttgacgacaccctgattacactggaaaccgacaaagccacgatggatgtgcctgccgatgcggccggtgtcgtgaaagaagtaaaagtcaaagtcggcgacaaaatctccgaaggcggcgtaattttgaccgttgaaaccggtgccgccgctgccgaagccgctcctgctgctgccgaagcacaacctgcacctgctgccgcacccgttgccgcaggcggtgcaaccgttcaagtagccgttcccgatatcggcggccataccgatgtggatgtcatcgccgttgaaatcaaagtgggcgacaccgttgccgaagacgacacgctgattactttggaaaccgacaaagcgacaatggacgtaccttgtaccgctgccggtgtcgttaaagccgtattcttaaaagtcggcgacaaagtgtccgaaggctctgcaattatcgaagtagaaaccgccggctctgccgcagcagcccctgcgcctgccgctcaagctgccgcacccgcaccggctgccgctccggttccggctgctgccgccgcgcccgcaccttctgcacctgccgctgccaaaatcgacgaggccgctttcgccaaagcacacgccggtccttccgcacgcaaactggcgcgcgaattgggcgtggatttgggccaagtcaaaggcaccggcttgaaaggccgtatcatgggcgacgacatcaaagcctttgtgaaatccgtgatgcagggcggcgcggcaaaacctgccgcagccagcgcatctttgggcggcggtctggacttactgccgtggcctaaagtggacttctccaaattcggcaatgtcgaagttaaagaattgtcccgcattaagaaaatttccggtcaaaacctgtcccgcaactgggttgtgattccccacgttaccgtacacgaagaagcggacatgaccgagctggaagaattccgcaaacagctgaacaaagaatgggaacgcgaaggcgtgaaactgtccccgttggcgttcatcatcaaagcctctgtttccgcgttgaaagcattccccgaattcaacgcctcactggacggcgacaacctggtgctgaaaaactacttcaacatcggtttcgcagccgatacgccgaacggcttggttgttcccgtcatcaaagacgtggatcaaaaaggcttgaaacaaatcagccaagaattgaccgaattgtccaaaaaagcccgtgaaggcaagctcaaaccgcaagaaatgcaaggcgcgtgctttaccatttccagcttaggcggcatcggcggcacaggcttcacgccaattgtgaacgctcccgaagtcgccatcttgggcgtgtgcaaatcccaaatcaaacctgtttggaacggcaaagagtttgccccgcgcctgatgtgcccgttgagcctgtccttcgaccaccgtgtcatcgacggtgcggccggtatgcgcttcaccgtattcttggcgaagctgttgaaagacttccgccgcattaccctgtaa

SEQ ID NO: 39641 - DNA, 1512 bp, Neisseria meningitidis
atgaaatggttgaaacgcctgacggttattgtcgggactttttaccgctatcggctggcaggtctgtgtgcttcgctgatgggtagcggttggatatgcgctctgctgaaaatgatgccgcagtcgtccaaattgaaaaacgaaccgcctgctgtccgtctgcgccttgccttggaaagcctggggccgattttcatcaagttcgggcaggttttgtccacacgccccgatttgattccgcacgattacgccgtcgaactggcaaagctgcaagacaaagtgccgccttttgacgcgcggctttcgcgtgaacaaatcgaaaaatcgttgggtcagtccatcgaaaagctgtatgcggaatttgaaaccgagcccatcgccagcgcgtccatcgcccaagtacacaaagcccgcctgcattcgggcgaacgagtggcggttaaagttttgcgccccaaccttttgccccttatcgaacaggatttgtcgctgatgcgtttcggcgcggcctgggtcgaacgcttgttttcagacggcaggcgtctgaagccgctcgaagtggtggcggagttcgacaaatacctgcacgacgagttggatttgatgcgcgaagccgccaatgccggacagctcgggcgcaatttccaaaacagcaatatgctgattgtgcccaaggtgttttacgactactgcaccagcgacgtgctgacaatcgaatggatggacggcacgccggttgccgacatcgccaaactcaaagcagacggcatcgatttgcacaaactcgccgattacggcgtggaaatctttttcacgcaggtcttccgcgacggctttttccacgcggatatgcaccccggcaatattttggttgccgccgacaaccgctacatcgccctcgatttcggcatcgtcggcacgctgaccgattacgacaaacgttatctcgccatcaatttcctcgcctttttcaaccgcgattaccggcgcgtcgccaccgcccacatcgaatcgggctgggtgcctgccgacacgcgtgcggaagaattggaagccgccgtccgcgccgtgtgcgaaccggtgttcaacaaaccgatttcgcagatttccttcggcttggtgctgatgcgcctgtttgaagtcagccgccgcttcaatgtcgaaatccaaccgcagcttgtgctgctgcaaaaaacgctgctcaacatcgaaggcttgggccgccagctcgatcccgatttggacttgtggaaaaccgccaaaccgtttttggtgaaatggatgaacgggcaggtcggccctaaagccctttggcgcaacctcaaaaacgaagcccccgactgggcgcaaatcatcccttcattgccgcgcaaaatcagtgcgttgattgatgaaaaccgccagcaggaaatgcgtgatgcctatatccatttggtcaaagtgcagcagcggcaaagcctgtggctggctgtgattgcggttgttttgctgctgattttgcttttgaaatag

SEQ ID NO: 39642 - DNA, 204 bp, Neisseria meningitidis
atggacaatctgaatacgcaggaaatttccgtgttgccggaaaatctgccgttgtattgctcggggcccgacaacgagcagtggaacgggcatccgagagtgtttttgcctttgtgcgaaggagaatcgggcagcgttgcctgcccgtattgcggcacgcgctaccgctttgacggcaagatgccgcatcatcattacgcctga

SEQ ID NO: 39643 - DNA, 345 bp, Neisseria meningitidis
ttgattggcagccgatcgagcaaaggtacgaccatctatgccgataaaggctatgacagtgcggaaaaccggcaacatctggaagaacatcagttgcaggacggcattatgcgcaaagcctgccgcaaccgtccgctgacggaagtgcaaaccaaacgcaaccggtatttatcgaagacccgttatgtggtcgaacaaagcttcggtacgctgcaccgtaaattccgctatgcgcggtcaacctatttcggactgattaaagtgagtgcgcaaagccatctgaaggcgatgtgtttgaacctgttgaaagccgccaacaggctaagtgcgcccgctgccgcctaa

SEQ ID NO: 39644 - DNA, 1908 bp, Neisseria meningitidis
  misc_feature 4, 5, 6, 7, 8: 'n' is a, c, g or t
gtgnnnnncggcggctatatcgtcgacattccgaaaggcaatctgaaaaccgaaatcgaaaagctgtccaaacagcccgaatacgcctacctgaaacagcttcagacggccaagaacgtcgattggaaacaggtgcagctggcctacgacaaatgggactataaacaggaaggcttgaccggagccggtgcagcgattgtggtgattattgtaaccgctctaacttatggatacggagcggctgcagcgggtagcgtaactgccgcaggaagtagtacagccgcagctgcaacaacgacagcggcagcaactaccactgtttctactgcagctgccatgcaaaccgcagctttagcctccttgtatagccaagcagctgtagccatcatcaataataaaggcgatgtaggcaaagcattaaaagatctcggcaccagtgatacggtcaagcagattgttacttccgcactgacggcgggtgcattaaaccagatgggagcagatattgcccaattgaacagcaaggtaagaaccgaactgttcagcagtacgggcaatcaaaccattgccaaccttggaggcagattggccaccaacctcagcaatgcaggtatctcagctggtatcaataccgccgttaacggcggcagcttgaaagacaacttaggcaatgccgcattgggagcattggttaatagcttccaaggggaagccgccagcaaaatcaaaacaaccttcagcgacgattatgttgccaaacagttcgcccacgctttggcgggttgtgttagcggactggtacagggaaaatgtaaagatggggcaattggcgcagcagttggggaaatcgtagctgaatccatacttggcggcagaaaccctgctacactcagcgatgcagaaaagcataaagttatcagttactcgaagattattgcgggcagcgtggcggcactcaacggcggcgatgtgaatactgaggcgaatgcggctgaggtagctgtggtgaataatgctttgaattttgacagtacccctaccaatgcgaaaaagcatcaaccgcagaagcccgacaaaaccgcactggaaaaaattatccaaggtattatgcctgcacatgcagcaggtgcgatgactaatccgcaggataaggatgctgccatttggataagcaatatccgtaatggcatcacaggcccgattgtgattaccagctatggggtttatgctgcaggttggacagctccgctgatcggtacagcgggtaaattagctatcagcacctgcatggctaatccttctggttgtactgtcatggttacgcaggctgctgaagcgggcgcgggaatcgccacgggtgcggtaacggtaggcaacgcttgggaagctccagtaggagcgttgtcgaaagcgaaggcggctaagcaagctgctcctaaagaaacaataaacaatttggcaaatttagccaaagcagaacagcagattttattccgtattgcccaacgcgatacgcaactggatgcatggaagacgggatttaacaatagagtaaggaaaggagcaggcttgcttgatgcaagtaatattccgataaccattaacggaaaaaccatcaaacctgtacaagccataagcttaaagggagcacccgtttacagcggcgtaagcgaacaggagatttttgcgctttatcggcagatgactggccagaatccgaattttagagttttgcctgacggaagattagcaaatggcattatcagtactggagaatgggcaggaacaaaaattgcattaagaaatttttcaaaaacagagaattcaactcaagcacgatggacattagatttgcagaatcctccatcatttattaaaggtactaaattggagcttaaattccaataa

SEQ ID NO: 39645 - DNA, 2274 bp, Neisseria meningitidis; identical to SEQ ID NO: 38845

SEQ ID NO: 39646 - DNA, 282 bp, Neisseria meningitidis
atgaaaaccctcgtcctcctcctgctttccttctccacgaccaccgctttcgccgcatacggtttgggtttggggcaggcaccgaaatatcctgccggctttcgcgcctacggttatgtttattccggacggcagggctgggttttaaaaacagaggcggatgccattaaattagacacgcttttcaaacgctttgtgtaccgtccttccgccgccaatcaaaaccccgtcggacagcgttcggacggcatacccgccaaccacacaaaggaaaaaccatga

SEQ ID NO: 39647 - DNA, 717 bp, Neisseria meningitidis
atgaactttgaaaacgacgacattatccatgcgccgaccacgtcttccctgattctcgaagagcggcacgattcggagctgttccgtgtttacgccctgattttggacggcattaccgatcaggtgctgctgcctggcaaaaagctgaccgaatccgaactttgccgccagatggtgtgttcgcgcaacaccgtccgcggcgcgctgtcgcttttggcgcacgacaagattgtcgatttgcaacccaacaggggcgcgttcgtccacgttcccgatttgaaagaaatgcaggatgtgttcaatgcgcgcatcgaaatggagacgatgattttgaatatcctcgcagatttgccggatttggaaacgcgcctcaagccgctttatgcgatgatacggcgcgaagaagaggcctccggcaggggagaccgcgttggctggaaccgcctgtccaatgcctttcacgtcgaactggcgcgcctggtgggcaacgatgtgctgttcgacattatgaacacgctgtgcgcgcggtcttccctgattgtcgccgtggcgggcgtgcatcgcgaggaaaaacacgccatcaatacgcatacgcattccgaacaccgcgaaatcctcgacctgctgctggcgggcaggcgcaaccgcgtggtcaaaatcctgcgccgccatttgggcaactgtatggagcgtttggaaaagactttggaagattga

SEQ ID NO: 39648 - DNA, 1044 bp, Neisseria meningitidis
  misc_feature 1025, 1026, 1027, 1028, 1029: 'n' is a, c, g or t
atgtccaacgaaaaccgtacctgttccttttgcggaaaatccaaatcacacgtcaaacatttaattgagggcgaaaacgcctttatctgtgacgaatgcgtctcaaactgtattgaaatattgcatgaagacggaaatgacggcacgcctccggaaagtgccggaggggagccggaagaatccggcaaactgcccacgcccgccgaaatcgtcgccaacctcaacgaccacgttatcggtcaggaacaagccaagaaagccttggcggtgtcggtgtacaaccattacaaacgcctgcgccacccgaaagccggagctaatgtcgaattgtcgaaatccaacatcctgcttatcggcccgaccggatcgggtaaaaccctgctggcgcaatctttggcgcgtaaactggacgtaccgttcgtgatggcggatgcaaccacgctgactgaagcaggttatgtcggcgaagatgtcgagcaaatcatcaccaaactcttgggcaaatgtgatttcgatgttgaaaaagcccagcgcggcatcgtctatatcgacgaaatcgataaaatttcacgcaaaggcgacaatccgtccatcacgcgcgacgtgtccggcgaaggtgtgcaacaagccttgctgaaactgattgaaggtacggtggcaagtgttccgccccaaggcggccgcaagcatccgaatcaggaatttatcaacgtcgataccaccaacatcctgtttatctgcggcggtgcgtttgcaggcttggaaaaagtcatccgccagcgcaccgagaaaggcggtatcggtttcggtgcgtccgttcacagcaaggacgaaaatgccgacattaccaagctgttcggcatcgtcgaaccggaagatttaatcaaattcggtctgattccggaattaatcggacgtttgcctgtgattgcaacgttagaagaactggatgaggacgcgctgattaatattttgaccgagccgaaaaatgctttggtcaagcagtatcaagccttgttcggtannnnncacacacttaattaa

SEQ ID NO: 39649 - DNA, 192 bp, Neisseria meningitidis; identical to SEQ ID NO: 37615

SEQ ID NO: 39650 - DNA, 1398 bp, Neisseria meningitidis
atgactgtccgtaccgaacacgatttattgggcgaccgcgagattcccgccgaagtgtattggggcatccacaccctgcgcgccattgaaaactttaaaatctccacacaaaaaatttctgacgtgccgcagtttgtccgcagtatggtgatggtgaaaaaggcgacggcacaggcaaacggtaagttgggcgcggtcaagcccgaaatcgccgccgccattgaaaaggcttgcgacgaagttctgctgaacaaccgctgcctcgaccaattcccgtccgatgtgtatcagggcggtgcgggtacttcggtcaatatgaacaccaacgaagtcatcgccaacctcgcattggaagtcttgggatacgaaaaaggccgctacgatatcgtcaatccgatggatcatgtcaacgccagccaatccaccaacgatgcctaccctaccggcttccgccttgccgtgtattacagcatcggcgaattgctcgacaaactggccgtcctgaaaaacgcctttgccgccaaagccgaagcgtttaaagacgttttgaaaatgggccgcacccagcttcaagatgccgtgccgatgactgccggacaagaattccaatctttccaagtgttgttggaagaagaaatcctcaacctcgaccgcacgcgccaactgctgttggaagtcaatttgggcgcaacggcaatcggcacgggcgtgaacacgcccaaaggctacgccgaactggtggtcaaaaaactctccgaagtcagcggcttgccttgcaaactgaccgaaaacctgattgaggcgacctccgactgcggcgcatatgtgatggtacacggcgcattgaagcgcacggcggtcaaactctccaaaatctgcaacgacttgcgcctgctctcttccggcccgcgtgccggcttgaaagaaatcaacctgcccgaattacaggccggttcttccattatgcctgccaaagtcaatcccgtgattcccgaagtggtcaaccaagtctgcttcaaagtcatcggcaacgacaccaccatcactttcgccgccgaagcaggtcagttgcaattaaacgtaatggagccggtcatcgcccaatgtatgtttgaaacgatttccctcttgggcaatgctgcggtcaacctcgccgaaaaatgcgtcaaaggcattacggtcaaccgcgaaatctgcgagcgttacgttttcaactccatcggtttggtcacttatctgaatccgtacatcggccaccacaacggcgacttggtcggcaaaatctgcgcccaaaccggcaaaggcgtgcgcgaagtcgtactggagcgcggtttgttgagtgaagaagagctcaaccgcatcctctccccggaaaacctgatgaaccctcatctgtaa

SEQ ID NO: 39651 - DNA, 1410 bp, Neisseria meningitidis
atgacagcacaaaccctctacgacaaactttggaacagccacgtcgtccgcgaagaagaagacggcaccgtcctgctctacatcgaccgccatttggtgcacgaagttaccagccctcaggcatttgaaggcttgaaaatggcggggcgcaagctgtggcgcatcgacagcgtcgtctccaccgccgaccacaacaccccgaccggcgattgggacaaaggcatccaagacccgatttccaagctgcaagtcgatactttggacaaaaacattaaagagtttggcgcactcgcctattttccgtttatggacaaaggtcagggcatcgtacacgttatgggccccgaacaaggcgcgaccctgcccggtatgaccgtcgtctgcggcgactcgcacacttccacccacggcgcattcggcgcactggcgcacggcatcggcacttccgaagtcgagcacacgatggcgacccagtgcattaccgcgaaaaaatccaaatccatgctgattgccgttgacggcaaattaaaagcgggcgttaccgccaaagacgtggcactttacatcatcgggcaaatcggcacggcgggcggtacaggctacgccgtcgagtttggcggcgaagccatccgcagcctttctatggaaggccgcatgactttatgcaatatggcgatcgaagccggtgcgcgctcaggcatggttgccgtcgaccaaaccaccatcgactatgtaaaagataaacccttcgcacccgaaggcgaagcgtgggacaaagccgtcgagtactggcgcacgctggtgtctgacgaaggtgcggtattcgacaaagaataccgtttcaacgccgaagacatcgaaccgcaagtcacttggggtacctcgcctgaaatggttttagacatcagcagcaaagtgccgaatcctgccgaagaaaccgatccggtcaaacgcagcggtatggaacgcgcccttgaatacatgggcttggaagccggtacgccattaaacgaaatccccgtcgacatcgtattcatcggctcttgcaccaacagccgcatcgaagacttgcgcgaagccgccgccatcgccaaagaccgcaaaaaagccgccaacgtacagcgcgtgttaatcgtccccggctccggtttggttaaagaacaagccgaaaaagaaggcttggacaaaattttcattgaagccggttttgaatggcgcgaaccgggctgttcaatgtgtctcgccatgaacgccgaccgcctgaccccggggcaacgctgcgcctccacctccaaccgcaattttgaaggccgtcaaggcaacggcggacgtacccacctcgtcagccccgctatggcagccgccgccgccgttaccggccgctttaccgacatccgcatgatggcgtaa

SEQ ID NO: 39652 - DNA, 429 bp, Neisseria meningitidis
  misc_feature 406, 407, 408, 409, 410: 'n' is a, c, g or t
atgaacgaatattaccaattaatcaagcatcccgatatttccctttccccgatttcagacggcatcggggtcgacaatccggcaacgggcgaaattttggcgtatgtccgcaagacggattcggacaagctgaaaaacctgattcaaaaagcagctgcagcacaaaaattatgggcggcaaaaactgcgttggaacgcgccgatgtgttgtggcgttggtattttcagattaaagaaaacaaagaagcattagcgcgcctgatgacgatggagcagggcaaaagcctgaccgaggcgcgtggcgaaatcgattatgcggcttcgtttgtgcgctggtttgccgaagaggcgcggcggattgacggcgatgtgttaacgagtgtgaaagcgtcgcaaaaactggttnnnnncacacacttaattaattaa

SEQ ID NO: 39653 - DNA, 705 bp, Neisseria meningitidis
atgttgaatattaccttgccggacggctcagtccgccaatacgaatcccccgttaccgtggctcaaattgctgcgtctatcggtgccggtttggcgaaggcggcggtggcaggcagggtaaacggcaaattggtcgatgcgtgcgacccgattgttgaagattctgctgttcaaatcattactccgaaagatcaggaaggcatcgaaatcatccgccattcctgcgcccatcttgtcgggcatgccgtcaagcaactctatcctaatgcaaaaatggttatcggccccgtcattgaagagggcttttattacgacattgccacggaaaaaccgtttacaccggaagatgttgccgccattgaagcgcgtatgaaagaattgattgcccaagactatgatgtggtcaaaatcatgactccgcgtgcggaggcgattaaaatttttcaagagcgcggcgaagaatacaaactgcgcctgattgacgatatgcctgaagtggaagcgatggggatgtatcatcatcaggaatatgtcgatatgtgccgcggtccgcacgttccgaatacccgtttcctgaaaaacttcaaactgaccaagttggcgggcgcatactggcgcggcgacagcaacaatgaaatgctgcaacgcatatacggtacggcttgggcgaacgtgcaggcaatgcttcggttgaagaaatcgtga

SEQ ID NO: 39654 - DNA, 1386 bp, Neisseria meningitidis
atgtcttcaggactcgtaacagcggcgtatatcgttgccgcaattttattcatcttctcactggcggggctgtccaaacaggaaaccgccaaacagggctgctattccggtatcgccggtatggcggtcgccctttttgtaactgttttttccgacaatacccacggactgggctggatcatcatcgccatgctcatcggcgcggcaatcggcatctacaaagccaaaaaggtggaaatgaccgaaatgcccgaactgattgccctgctgcacagcttcgtcggcctagcggcggttttggtcggcttcaacagctatatcgcgccgggcaacgtttcgcacgatatgcacaccatccatctggtcgaagtgtatttaggcatcttcatcggcgcggtaacctttaccggctcgctggtcgcattcggcaaactcaacggcaaaatcagcagcagcccgctgcaactgcccgccaaacacaagctcaacgcactggcacttggcgtatcgtttgtgttgctgctcgtattcgtcggcattgacggcagcggcttcatcctgctgattatgaccctgattgccctcgcattcggctggcacttggttgcctccatcggcggcgcagatatgcccgtggtcgtgtccatgctcaactcctactccggctgggcggccgcagcggcaggctttatgctctccaacgacctgctcatcgttaccggcgcgttggtcggctcaagcggcgcgattctgtcctacattatgtgcaaagccatgaaccggtcgtttgtctcggtaatcgccggcggtttcggcagcgacagcggcacatcatcttccggcagccaagagataggggaataccgagaagtcaaagctgccgatgttgccgaaatgctgaaaggcgcaaacagtgtcatcattaccccgggctacggtatggcagtcgcacaagcgcaataccccgttgccgaaatcaccgagcttttgcgtaaaaacggcacagaagtgcgcttcggcatccaccccgtcgccggccgcctgcccggtcatatgaacgtactgcttgccgaagccaaagtcccctacgacatcgtgttggaaatggacgaaatcaacgacgacttccccgaaaccgatgtggtcttggtgattggtgcgaacgataccgtcaatcctgccgcccaaaccgacccgaacagcccgattgcgggtatgcccgtgttggaagtatggaaggcaaaagaagtcgtcgtcttcaaacgctcgatgaataccggctacgcaggtgtacaaaacccgctgttcttcaacgaaaacagcgtaatgtgtttcggagatgcgaagaaaaccgtggatgacattctgtccgaactgaaaaaataa

SEQ ID NO: 39655 - DNA, 1293 bp, Neisseria meningitidis; identical to SEQ ID NO: 38978

SEQ ID NO: 39656 - DNA, 756 bp, Neisseria meningitidis
atgatggatttggatttgttaagtgaagaagcccgccgcgaaatgctggcgtgtgctgaagaagccgtaccgtctgaaatgtgcggggttttggttttcagttatgaaggctatgagtttctgcctttgtccaattgcgccgaaaatccgcatgaaacctttgagatttccgctgacgactggatggcggcggagcgcgtcggcgagattgtggcagtcgtgcattcccatccgcgcggcgagccgtttttatcgggtgcagacagatggatgcaggtcgaaacgggcttgccttggattttggttacacaaggccgtctgaaactgttccgccccgttccgcatttgcgcgggcgtgtattcgaatacggcaagacggattgcggcgcgctggtgcgcgatgccttcatgctgatggggctggtttttcccgaccatccacgcggtgatatggatgaggacgcagcggcgggcttttgggaaaagcatttggaaaactgcgggttttcccgtgtttcagacggcctttgcgccggcgatgtggtcttgacggcaacgggcgggcatgcgtcccatgccgtcctgtatttgggcaacgactggatgctgcaccatgcctacaatcaattgagctgccgtgtaccttatacccgctattgggcggatgttacgcacagcgtttggcggcatcccgatttcgagccggccatgatgcaggcacttgagaacgattttacccatatggagcaagcatga

SEQ ID NO: 39657 - DNA, 285 bp, Neisseria meningitidis; identical to SEQ ID NO: 38289

SEQ ID NO: 39658 - DNA, 285 bp, Neisseria meningitidis
atgaaattgttggccgcattgattccgctgttgatgagcgtcgcaggccgtatattgactgcattaggcttgatggctgttacttattcgggtgtagatagattggtagcccattttcagcaggcgataaccagtagcataacgggcgcgcctcaagcgatgttgcagctcttttatataagcggtggcggcaccgttcttaatatcctgtttggcgcgatcgcctttattctgtcattcaaacaaatgacaaaactagcaacctcaatcgggaagaaaaaataa

SEQ ID NO: 39659 - DNA, 339 bp, Neisseria meningitidis
atgtcggatgaaagccctattatttttactgacagctgctgtgccaaagttgccgatttgattgccgaagaaaacaatcccgatttgaaattgcgggtttttgtcaatggcggcggctgttcgggtttccagtacggatttacttttgacgaaatcaaaaacgacgacgattttgaaattgagaaaaacggtttggtctttttggtcgatccgatgagctatcaatatctggtcggtgcggaaatcgactatacggaaagtttgcagggttcgcaattcgtcatccgcaatccgaatgcggaaacaacctgcggttgcggatcgtcgttttccgtatga

SEQ ID NO: 39660 - DNA, 486 bp, Neisseria meningitidis
atgagatttttcggtatcggttttttggtgctgctgtttttggagattatgtcgattgtgtgggttgccgattggctgggcggcggttggacgctgtttctgatggcggcaacctttgccgccggtgtgctgatgctcaggcatacggggctgtccggtcttttattggcgggtgcggcaatgagaagcggcgggagggtatccgtttatcagatgttgtggcctatccgttatacggtggcggcggtgtgtctgatgagtccgggattcgtatcctcggtgttggcggtattgctgctgctgccgtttaagggaggtgcagtgttgcaggcaggaggtgcggaaaattttttcaacatgaaccaatcgggcagaaaagagggcttttcccgcgatgacgatattatcgagggggaatatacggttgaagagccttacggcggcaatcgttcccgaaacgccatcgaacacaaaaaagacgaataa

SEQ ID NO: 39661 - DNA, 195 bp, Neisseria meningitidis
gtgggcatcaatgccaaccctaattgtgctgatgaagcaggaaaactgatatgggaaaacgaccccaataaaaattggtgggctaaccgtatggatgatattcgcggcatcatccaaggtgcggttaatcctttaatttacaaggtaagcaagcaaaagattatttacaacaacaaactcatattaagaacttag

SEQ ID NO: 39662 - DNA, 261 bp, Neisseria meningitidis
atgaaatacttgatccgcaccgccttactcgcagtcgtagccgccggcatctacgcctgccaaccgcaatcagaagccgcagtgcaagtcaaggctgaaaacagcctgaccgctatgcgcttagccgtcgccgacaaacaggcagagattgacgggttgaacgcccaaatcgacgccgaaatcagacaacgcgaagccgaagaattgaaagactaccgatggatacacggcgacgcggaagtgccggagctggaaaaatga

SEQ ID NO: 39663 - DNA, 687 bp, Neisseria meningitidis; identical to SEQ ID NO: 38997

SEQ ID NO: 39664 - DNA, 1005 bp, Neisseria meningitidis
atgagcattaaagtagcgattaacggtttcggccgcatcggccgcctcgcattgcgtcaaattgaaaaagcccacgacatcgaagtcgtcgccgtcaacgacctgacccctgccgaaatgctgctgcaccttttcaaatacgacagcacgcaaggccgtttccaaggtactgccgaattaaaagacgatgccatcgtggtaaacggcaaagaaatcaaagttttcgccaatccgaatcccgaagaattgccttggggcgagttgggtgtggatgtcgtcctcgaatgtaccggcttctttaccaataaaaccaaagccgaagcccacatccgtgccggcgcgcgcaaagtcgtgatttccgcacctagcggcaatgatgtgaaaaccgtcgtatatggcgtgaaccaaaacattttggacggcagcgaaaccgttatctccgctgcttcctgcaccaccaactgccttgccccgatggcggcagtcctgcaaaaggaatttggcgtagtcgaaggcctgatgaccaccatccacgcctacaccggcgaccaaaacacccttgacgcgccgcaccgcaaaggcgatttgcgccgcgcccgcgccgccgcgctcaacatcgtgcccaacagcaccggtgccgccaaagccatcggtctggttatccccgaattgaacggcaaactcgacggctccgcccaacgcgtccctgttgccaccggctcgctgaccgaattggtttccgtcctcgaacgccctgtaaccaaagaagaaatcaacgccgcgatgaaagccgccgccagcgaatcttacggctacaacgaagatcaaatcgtttcttccgacgttgtcggcatcgaatacggctcgctcttcgatgcgacccaaacccgcgtgatgaccgtgggcggcaaacaactggtgaaaaccgttgcctggtacgacaacgaaatgtcctatacctgccaactcgtccgcactttggaatactttgtaggcaaaatctaa

SEQ ID NO: 39665 - DNA, 1041 bp, Neisseria meningitidis
  misc_feature 4, 5, 6, 7, 8: 'n' is a, c, g or t
gtgnnnnnaatcgccgtcagcctgttgcgcctgtcgcgcggcaatatgaaagtggcggttttgatgttgttcctcgttaccgcctttctgtccatgtggatcagcaacaccgccaccgccgcgatgatgctgcctctagcaatgggtatgctgagccacctcgaccaggaaaaagaacacaaaacctacgtcttcctcctgctcggcatcgcctattgcgccagcatcggcggcttgggcacgctcgtcggctcgccgcccaacctgattgccgccaaagccctaaatctggacttcgtcggctggatgaagctcggcctgccgatgatgctgttgattctgcccttgatgctgctctccctgtacgtcatcctcaaacctaatttgaacgaacgcgtggaaatcaaagccgaatccatcccttggacgctgcaccgcgtgatcgcgctgttgattttccttgccacagccgccgcgtggatattcagctccaaaatcaaaaccgccttcggcatttccaatcccgacaccgttatcgccctgagtgccgccgtcgccgtcgtcgtcttcggcgtggcgcaatggaaggaagtcgcccgcaataccgactggggcgtgttgatgctcttcggcggcggcatcagcctgagcacgctgttgaaaacatccggcgcgtccgaagccttgggacagcaggttgccgccaccttttccggcgcgcccgcatttttggtgatactcatcgtcgccgccttcattatttttctgaccgagttcaccagcaacaccgcctccgccgcattgcttgtaccgattttctccggcatcgctatgcagatggggctgcccgaacaagtcttggtattcgtcatcggcatcggcgcatcttgtgccttcatgctgccggttgccacaccgcctaacgcgattgtgttcggcacgggcttaatcaagcaacgcgaaatgatgaatgtcggcatactgctgaacatcctctgcgtagtattggttgctctgtgggcttatgctgtactgatgtaa

SEQ ID NO: 39666 - DNA, 945 bp, Neisseria meningitidis
atgtctgcatctaagaaatttccgattcctttgagctatttcagcatcgcgctgggcttgtttgccttggggctgtcgtggcgttacggcgcgtctgtcgggctgctccccgccttggccgccgaatcgctgcttgcggcggcttcggttgtctggctcttgctggtggcggcatacctgatcaaaatgtttgcgtaccgaaacgattttttgtctgatttgcgcgacttggtgcaatgctgcttcatcagcgcgattccgattaccgctatgctggagggactcgcgctgaagccctatcaggcaggcgcggcggcagtcctgatttatgtcggcgttgccggacagttggcgttttcgatgtatcgggcggccggtctgtggcgcggcctgcattccttggaggcgacgacgccgattatttatctgcctacggttgcgacaaactttgtcagcgcgtcatctctggcggcgttggggcatcatgattatgcagctttgtttttcggcgcgggtatgttttcctggctgagcttggaagcctccatcttgggcaggctgcgcacggcggcaccggtcggcacggcggcgcgtggcgtggtcggcatccagcttgcgcccgcctttgtcggctgcggcgcgtattttgccgtcggcggtaaagtcgacggttttgcgttggcattaatcggctacggctgcctgcagcttttgttcttgctacgcctgacccgctggttttgggaaggtggttttacgatgagcttttggggattttcattcggtttcgcggcaatggcaggatgcggtctgcatctggcggcttctggcgtattgtcgggcttggggctgacgcttgccaccgccggatcggcaggcgtggcgctgctgcttgtcggtacgctgcaccggatagcgacggggcgtttcttggtacgcggctga

SEQ ID NO: 39667 - DNA, 672 bp, Neisseria meningitidis
gtgcaggcggatttagcttatgccgccgaacgtattacccacgattatccgaaagcaaccggtgcaaacaacacaagcacagtaagcgattatttcagaaacatccgtgcgcattccatccacccccgggtgtcggtcggctacgatttcggcgactggagaatagcggcagattatgccagttacagaaaatggaacaacaataaatattccgtaaacacaaaagagttggaaaacaagaataacaataagagagacctgaagacggaaaatcaggaaaacggcagcttccacgccgcttcttctctcggcttatccgccatttacgatttcaaactcaacgataaattcaaaccctatatcggtgcgcgcgtcgcctacggacacgtcagacacagcatcgattcgaccaaaaaaacaacagaggttcttacctcctcccatgctcctggcacagcacctacgatttataatcagggaagtacgcaaaacgcctatcacgaaagccacagcatccgccgcttaggtcttggtgtcatcgccggtgtcggtttcgacatcacacccaagctgaccttggacaccggataccgctaccacaactggggacgcttgaaaaacacccgcttcaaaacccacgaagtctcattgggcatgcgctaccacttctga

SEQ ID NO: 39668 - DNA, 420 bp, Neisseria meningitidis; identical to SEQ ID NO: 38483
  misc_feature 401, 402, 403, 404, 405: 'n' is a, c, g or t

SEQ ID NO: 39669 - DNA, 1527 bp, Neisseria meningitidis
atgaacacgccccttccttattccaattacctcatccgcatcctgacggcatctgtctatgatgtcgcggtcgaaacgcctttggaaccggcacgcagcctttctgtacgtttgaaaaacaacatccttttgaaacgcgaagatttgcagccggttttttcgttcaaaatacgcggcgcgtacaacaaaatgtccaagttgccgaaagatgcgctcgcttgcggcgtgattgcggcaagcgcgggcaatcatgctcaaggcgtggcattgtccgcacagcgtttgggttgccgtgccgttatcgttatgccggaaactacgccgaaaatcaaagtggatgcggttaaaagccatggcggcgaggtggttttgcggggcgtttcatacaacgatgcctacgattatgcgatggagttggcggaaaaagaagggttaacctatatcgcgccgtttgatgatcctgatgtgattgcgggacaggggacggtggggatggaaattgtcagccagcatcccgatccaatccgcgccgtattcgtaccgataggcggtggcggtttggcggcgggcgtggcggcatttatcaagcaggtccgccccgaaatcaaagttatcggcgttcagaccaacgattcctgctgtatgaagcagtcggtcgaagcgggtgaaatcgtccatttgaaagatgtcgggctgttttcagacggcactgcggtcaaagttgtcggagacgaaaccttccgcctctgcaaagaacttttggatgaaatcattacagtcgataccgatgcggtttgcggcgcggtcaaggatattttcgatgacacgcgcagcattaccgagccggcgggcgcgttggcgttggcgggtctgaaagcctatatcgcccgagaaggcgcggaaaaccaaaccctgattgccgttaccagcggtgcgaatatgaattttcaccgtttgcgccatgtgtcggagcgtagtgaattgggcgagggcaacgaaggtatttttgccgttaccatccccgaagaacgcggcagcttccttaagtttgtcaatatattgggaaataggaatattaccgagttcaactaccgctacggagacgatgaaaaagcgcatatctttgtcggacttcaagcggcaggcccgcaggatttggcggttatcggcagccggttggatgaggcgggattgcccaatgtcgacctgactgatgatgagattgccaaaatccatatccgttatatggttggagggcggacggacaaagtagaaaacgagcgtttggtcagttttgagtttccggagcgtccgggggcgttggcgcgttttttgaaccatatgcagggcggttggaacattacgctcttccattaccgcaaccacggtgcggattacgggcggattttggtcggtatcgatgtgccgccgcacgatgccgccgcatttgacggtttcttggaaagtctgggatacagctatcacgaggaaacgcaaaatgccgcgtacaagctgtttcttgcctga

SEQ ID NO: 39670 - DNA, 1026 bp, Neisseria meningitidis
atggattatcagggtaagaaagaccgattggaagaagttatcggtctttccgaagaccccgaactttggaacgacccgaaacgcgcccaagaaatcggcaaagagcgcaaaatcctcgaaggcatcgtgttgacgctcgacaacatcgcttcgggcatcgaagacaaccgcatgctgattgaaatgaccgtcgaagaaaacgacgaagaaggttttgccgccgtgcaggaagatgtggcggggctggaaaaacagatggcggatttggagttcaaacggatgttcaaccagcccgccgacccgaacaactgctttatcgacatcaccgcaggcgcgggcggtacggaagcggaagactgggcgggtatgctgttccgcatgtacagccgctacgccgagcgcaaaggcttcaaaatcgaaatcctcgaagaagacgatggcgaaatcgcgggcatcaaccgcgcgactatccgagtggaaggcgaatacgcctatggtttgctgcgtaccgaaactggcgttcaccgcttggtgcgctattcaccgtttgactcgaacaacaaacgccatacttcgtttgcctccgtgttcgtttaccctgaaatcgatgattccattgaaatcgaaatcaaccccgccgatttgcgcatcgacacctatcgcgcatcgggcgcgggcggtcagcacatcaacaaaaccgactccgccgtgcgtattacccacgagccgacggggattgtggtgcaatgtcaaaacgaccgttcgcaacacgccaacaaagcggccgcgatggaaatgttgaaatccaaactgtatgaattggaaatgcgcaaacgcaatgaagagaaacaggcgttggaagaaggtaaatccgatgtaggttggggcagccaaatccgttcgtatgttttggattcctcacgtatcaaagacttgcgtacaggctacgaagtcggcaacaccaaagccgtattggatggcgatttggacggctttatcgaagccagcctgaaacagggcgtgtag

SEQ ID NO: 39671 - DNA, 993 bp, Neisseria meningitidis
atgaaaacgcacgaaataagcaaagattcggtcagcctgataggggttgccgaacatgaggcgggtcaacgccttgataactatctgataaaaatcctcaagggtgttcccaagagccatatccaccgcattatccgcgccggcgaggtgcggttgaacaaaaaacgctgcaaacccgacagccgtattgcggagggggatacggtgcggattccgcctgtgcgcgtggcggagaaggaaatgccgtctgaaaggcgtgccgccgtaccggcgcgtgcgtttgacgttgtttacgaagacgatgcgcttttggtcatcgacaaaccgtccggcgttgccgtccacggcggcagcggcgtgagtttcggcgttatcgaacagttgcgccgcgcccgtccggaggcgaagtatttggagttggttcatcgtttggacaaggatacgagcggcttgttgatggtggcgaagaaacgcagcgcgctcgtcaaacttcacgaagccatccgtaacgaccaccccaaaaaaatctaccttgcgctgggggtgggcaaactgccggacgacaatttccatgtcaaactgcccctgttcaaatataccggcgcacaaggcgaaaagatggtgcgcgtcagtgcggacgggcagtcggcgcatacggtgttccgtgtgttaagccgtttttcagacggcattttgcacggtgtcgggctgtcgcacctgactttggtgcgggcgacgttgaaaacggggcgcacgcaccaaatccgcgtccacctgcaatctcaaggctgtccgattgcgggcgacgaacgctacggcgattatcaggcgaaccgtcgtttgcagaagttgggtttgaagcggatgtttttgcacgcgtccgagctgcacttgaaccatccgctcacgggtgagccgctggtgttgaaggcggagctgccgccggacttggcgcagtttgcggtgatgttggaaaacgggacgaaaatgtga

SEQ ID NO: 39672 - DNA, 213 bp, Neisseria meningitidis; identical to SEQ ID NO: 38488

SEQ ID NO: 39673 - DNA, 864 bp, Neisseria meningitidis
atggaattgaacgaatttctcgataaagcctatgccgttttgcggcgtttggatgccgtgcttccgcccgaacctgggcatacggattggaacgcgcttgccttccgctggcagagtgcgggcaaaaaaggtttttgggaacacttgcccgatccgcacaccttccccttggcaaggctggcgggagtcggcaggcaaaccgaattgctggtgcgtaataccgaacagttcattgtcggcagacccgcgaacaatgtattgatgagcggcgcgcgcggaacaggcaaatcctcgctggtcaaagccctgctgcacgaatatgcggacaaggggttgcgcctgatcgaagtcgataaaagcgatttaatcggcctgccttacctgttgacgcttttgaaggaacgtccggaaaaatttatcgtattttgcgacgatttgtcgtttgaaagcggcgatgaaacctataaggcattgaaaaccgcgttagacggcggtctgtctcaacgttgcgccaacgtgctggtgtacgcgacttccaacagacggcacctgatgcccgaatattttgacgagaatgccggtacgacggggatgcggggggaagtccatcagaaagaagcggtggaagaaaaaatatccctgtccgaccgattcggattgtggctcagtttttatccgttcgatcaaaacgattatctggcggcggtgcaaaattggctggaagatttcggcgtgccgtatgatgaaaccgcacagatggcggcattgcagtgggcgcagacgcggggcagccgttcgggacgttccgcgtggcagtttgcctgcgactgggcgggcaggctgccggagcaacgtgcgccgtga

SEQ ID NO: 39674 - DNA, 876 bp, Neisseria meningitidis
atggcagtaggaaaagagattctcaccaaaatccgcagtgttcagaatacccaaaagatcactaaagcgatgcagatggtgtcaacctctaaaatgcggaagactcaggaacggatgcgtttggcgcgtccgtatgccgaaaaagtgcgtatggtgatgagccatcttgcgcaaaccaataccgatcatggtattccgttactggaatctcatcgggaaatcagacgtgtcggttttattttgattacgtctgataagggtttgtgtggcggtttgaacgccaacgtgctgaaaaagtttttggcacaagttcaagagtatcggaatcaaggtattgaagaggaaatcgtatgccttggcagtaaaggtctgatggcgtgtcagagcattggtctgaatgtgattgccagtgccgtaaatttgggcgataccccaaaaatggaaatgctgctcggacctttgacagaactcttccaacggtatgagaaacatgaaattgacagaatccatctggtgtattcgggttttgtcaataccatgcgtcaagaaccgagaatggaagtattgctgcctatcggtgagaacgtgattggcgattcagctcccaaatcaccgttcagctgggaataccgctacgaaccgactgcacttgcagtgttggaatatctggttcgccgctatttagagtctgtggtttatcaggcgttgagcgacaatatggcatccgaacaggcagcccgcatggttgccatgaaagctgcaacagacaatgcaggcaatgccatcaaagagttgcgtttggtatataacaaatcgcgtcaagctgcgattaccacggaattgtcagaaattgtagcaggtgcggcggctgtctga

SEQ ID NO: 39675 - DNA, 1353 bp, Neisseria meningitidis
  misc_feature 8, 9, 10, 11, 12: 'n' is a, c, g or t
gtgtgtgnnnnnaacagcaaggtaagaaccgaactgttcagcagtacgggcaatcaaaccattgccaaccttggaggcagattggccaccaacctcagcaatgcaggtatctcagctggtatcaataccgccgttaacggcggcagcttgaaagacaacttaggcaatgccgcattgggagcattggttaatagcttccaaggggaagccgccagcaaaatcaaaacaaccttcagcgacgattatgttgccaaacagttcgcccacgctttggcgggttgtgttagcggactggtacagggaaaatgtaaagatggggcaattggcgcagcagttggggaaatcgtagctgaatccatacttggcggcagaaaccctgctacactcagcgatgcagaaaagcataaagttatcagttactcgaagattattgcgggcagcgtggcggcactcaacggcggcgatgtgaatactgaggcgaatgcggctgaggtagctgtggtgaataatgctttgaattttgacagcacccctaccaatgcgaaaaagcatcaaccgcagaagcccgacaaaaccgcactggaaaaaatcatccaaagtattatgcctgcacatgcggcaggtgcgatgactaatccgcaggataaggatgctgccatttggataagcaatatccgtaatggcatcacaggcccgattgtgattaccagctatggagtttatgcagcaggttggacagctccgctgatcggtacagctggtaaagcagctatcagcacctgtatggctaatccttctggttgtactgtcatggttacgcaggctgctgaagcgggcgcgggaatcgccacgggtgcggtaacggtaggcaacgcttgggaagctccagtaggagcgttgtcgaaagcgaaggcggctaagcaggctataccaacccagacagttaaagaacttgatggcttactacaagaatcaaaaaatataggtgctgtaaatacacgaattaatatagcgaatagtactactcgatatacaccaatgagacaaacgggacaaccggtatctgctggctttgagcatgttcttgaggggcacttccataggcctattgcgaataaccgttcagtttttaccatctccccaaatgaattgaaggttatacttcaaagtaataaagtagtttcttctcccgtatcgatgactcctgatggccaatatatgcggactgtcgatgtaggaaaagttattggtactacttctattaaagaaggtggacaacccacaactacaattaaagtatttacagataagtcaggaaatttgattactacatacccagtaaaaggaaactaa

SEQ ID NO: 39676 - DNA, 1272 bp, Neisseria meningitidis
gtgggcgacggtgtccacactctgctgctcgacaggccgattgtgcgcgacggcaggaaattcgacgcgccgcttttgtggatggtggtgctgatgacggcgttcagcctgctgatgatttattcggcttctgtgtatttggcatcgaaggaaggcggcgatcagtttttctatttgaccagacaggcggggttcgtcgttgccggcttgatagcgagcggttttttatggtttctttgcaggatgaggacatggcggcggcttgtgccgtggatttttgccctatccggcctgttgctggtagtcgtattgattgccgggcgcgaaatcaatggcgcgacccgttggatacctttgggtccgttgaatttccagccgaccgagctgttcaagctggcggtcatcctttatttggcaagcctgttcacgcgccgtgaagaagtgttgcgcagcatggaaagtttgggttggcagtcgatttggcgggggacggccaatctgatcatgtccgccaccaatccgcaggcacgtcgtgaaacattagaaatgtacggccgtttccgggcgatcatcctgccgattatgctggtggcgttcggtttggtgctgataatggtacagccggatttcggttcgtttgtcgtcattaccgtcattgccgttggaatgctgtttttggcaggattgccgtggaaatattttttcgtcctggtaggcagcgtcttgggcgggatggtgctgatgattaccgccgctccctaccgtgtgcagcgggtagtggcatttttggacccgtggaaagacccgcagggtgccggctaccagcttacccactctctgatggcaatcgggcgcggagagtggttcggtatgggtttgggtgcgagtttgagcaaacgcggctttctgccggaagcgcataccgattttatttttgccatcatcgccgaagaattcggtttcttcggtatgtgtgtgctgatattctgttacggctggctggtggtgcgggcgttttccatcggcaagcagtcgcgcgatttgggtttgactttcaacgcctatatcgcttcgggtatcggcatttggatcggtatccaaagtttcttcaatatcggtgtgaacatcggtgctttgccgaccaaaggtctgacgctgccgttgatgtcctatggcggttcgtcagtctttttcatgctgatcagcatgatgctgctgttgcgtatagattatgaaaaccgccggaaaatgcgcggttatcgggtggagtaa

SEQ ID NO: 39677 - DNA, 1035 bp, Neisseria meningitidis
atgccgaattgtttcaaatttcataccgttatcgaacggcattggcaaaaaccttatccggttttgtcttttctgcttaagccgctctccgggctgtttgccaaaattgcggcaaaacggcggacggattttttatcgggaaaacggcaaagcgaaaagctgcccgtgcctgtggtcgtggtcggcaatattcacgcgggtgggacggggaaaacgccgattgttgccgcgctggtgtcgggtttgcaggaaaagggcgtcaaggtcggcatcatcagccggggctacgggcgcaagagcaaggcggttcatgtattgaatgctgagagccgagcggaagatgcgggcgatgagcctttgctgctgttccgcaaaaccggtgcgccgacggcggtgggcagcagccgtgcagaggcaggcagggcgttgctggcggcgcatcccgacatcggactgattgtggcggacgacggtttgcagcattacgccctgcagcgagatgtggaaatcgcggtgtttccgtcggcggatacggggcgcacggatttggatttactgcccaacggcagtttgcgcgaacctttgttgcggctggattcggtggatgcggtcgtcgtcagcggcggcaaggcggatgcgctgtttaggccgtctgaaaatatgtttcacagccgtatcgaagcgggacggatttaccgtttgaacaatccgtccgaaatactggacacaggccgtctgaaaaatcaaaccgtcgtcgccgtggcaggtattgccaagccggcgcgttttttcgattcgttgcggaatatgggcattaccgtgaagcgaaccgtcgcgctgcctgaccacgccgacatttcggcggcagatttgcccgatgcggacgcggtcattattacggagaaagatgcggtcaaattttcagacggcatttgcaccgataatgtttgggtgttgcccgtttgtgcgataatcgaacctgatttggcggcgtttgtgttggagcggttggaagatgtaccgaaggccgtctga

SEQ ID NO: 39678 - DNA, 669 bp, Neisseria meningitidis
atgaaccacgacatcactttcctcaccctgttcctactcggtttcttcggcggaacgcactgcatcggtatgtgcggcggattaagcagcgcgtttgcgctccaactccccccgcatatcaaccgcttttggctgatcctgctgcttaacacaggacgggtaagcagctatacggcaatcggcctgatactcggattaatcggacaggtcggcgtttcactcgaccaaacccgcgtcctgcagaatattttatacacggccgccaacctcctgctgctctttttaggcttatacttgagcggtatttcttccttggcggcaaaaatcgagaaaatcggcaaaccgatatggcggaacctgaacccgatactcaaccggctgttacccataaaatccatacccgcctgccttgcggtcggaatattatggggctggctgccgtgcggactggtttacagcgcgtcgctttacgcgctgggaagcggtagtgcggcaacgggcgggttatatatgcttgcctttgcactgggtacgctgcccaatcttttggcaatcggcattttttccctgcaactgaaaaaaatcatgcaaaaccgatatatccgcctgtgtacgggattatccgtatcattatgggcattatggaaacttgccgtcctgtggctgtaa

SEQ ID NO: 39679 - DNA, 351 bp, Neisseria meningitidis
atgtcagacggacaaaatattccggcaaaaatgatgtcgttgcagctgaaagacatgaatctgctgtacagctcctatatgccgtttttggaacatggcggcctgtttgtgcagaccgacgacgtattttccatcggggacgatattctgcttgccgtagaaatcctcaacttccccaaactgttcctgccaaccaaggtcgcttggattaatcctgcgcgtacttcctccaaacccaaaggggttgggctggcattcacaaaacacgaaaactgcctgaaagtcaaagaccagatcgaagtcgaactgggcagcacaatcggcggcagcagacctacgtttaccatgtaa

SEQ ID NO: 39680 - DNA, 852 bp, Neisseria meningitidis
atgattacccatccccaattcgatcccgtcctcatcagtatcggcccgcttgccgtccgctggtatgccctaagctacatcctcggatttattttttttacctttctcggcagaaggcgcatcgcgcaaggcttgtccgtttttaccaaagaatcgctcgacgacttcctgacatggggcattttgggcgtaattttgggcgggcgtttgggttacgtcctgttttacaagttttccgactacctcgcccatccgcttgatattttcaaggtatgggaaggcggaatgtcgttccacggcggctttttgggtgtagttattgccatatggttgttcggccgcaaacacggcatcggcttcctcaaactgatggacacggtcgcaccgctcgttccgctgggtctcgcttcgggacgtatcggcaacttcatcaacggcgaactttggggacgcgttaccgacatcaacgcattttgggcaatgggcttcccgcaggcgcgttacgaagatgccgaagccgccgcgcacaatccgctttgggcagaatggctgcaacaatacggtatgctgccgcgtcatccctcgcagctttatcagtttgcacttgaaggcatctgcctgttcgccgtcgtttggctgttctctaaaaaacagcggccgaccggacaagtcgcctcgctcttcctcggcggctacggcatattccgcttcattgccgaattcgcacgccaacccgacgactatctcgggctgctgaccttggggctgtcgatggggcaatggttgagcgtcccgatgattgttttgggtatcgtcggctttgtccggttcggcatgaaaaaacagcactga

SEQ ID NO: 39681 - DNA, 2595 bp, Neisseria meningitidis
atgtccaaatccgccgtttccccaatgatgcagcaatacctcggcatcaaagcgcaacataccgacaaactggtgttttaccgtatgggcgatttttacgagatgtttttcgacgatgcggtagaagcggcaaaacttttggatattaccctgaccacgcgcgggcagatggatggcgagccggtcaaaatggcaggcgtgccgtttcacgccgccgaacaatatctggcgcgcctggtcaagttgggcaaaagcgtggcgatttgcgaacaggtcggcgaagtcggcgcaggcaaagggccggtggaacgcaaagtcgtgcgcatcgtaacgcctggcacgctaaccgattccgcattgctggaagacaaggaaaccaaccgcatcgttgccgtgtcccccgacaaaaaatacatcggtttggcgtgggcatcgctgcaaagcggcgaattcaaaaccaagctgacaactgtggataaattggacgacgaactggcgcgcctgcaggcggcggaaattctgttgccggacagtaaaaacgcaccgcaacttcagacggcatcgggtgttacgcgcctgaacgcgtggcagtttgccgccgacgcgggggaaaaactgctgacggaatatttcggctgccaggatttgcgcggcttcggtttggacggcaaagaacacgccgttgcgattggcgcggcaggtgcactgttgaactatatccgtctgacgcaaaacctgatgccgcaacatttggacggcctgtcgctcgaaaccgacagccaatatatcggtatggatgccgccacgcgccgcaatctcgaaatcacgcaaaccctctccggcaaaaaatcgccgaccctgatgtccacgctcgacctttgcgctacccatatgggcagccgcctcttggctctctggctgcaccaccctttacgcaaccgcgcccacatccgagcgcgccaagaagccgttgccgcgctggaaagccaatacaaacccctccagtgccgtctgaaaagcattgccgacatcgaacgcatcgccgcccgtattgccgtgggtaacgcccgcccgcgcgacctcgccgccctgcgcgacagcctgtttgccctgtccgaaatcgaattgtccgccgagtgcagcagtctcttaggaaccctcaaagccgttttcccggaaaacctatccacagccgaacagctccgccaagccattttgcccgaaccttccgtctggctgaaagacggcaatgtcatcaaccacggttttcatcccgaactggacgaattgcgccgcattcaaaaccatggcgacgaatttttgctggatttggaagccaaggaacgcgaacgtaccggtttgtccacacttaaagtcgagttcaaccgcgttcacggcttttacattgaattgtccaaaacccaagccgaacaagcacctgccgactaccaacgccggcaaacccttaaaaacgccgaacgcttcatcacgccggaactgaaagcctttgaagacaaagtgctgactgctcaagagcaagccctcgccttagaaaaacaactctttgacggcgtattgaaaaaccttcagacggcattgccgcagcttcaaaaagccgccaaagccgccgccgcgctggacgtattgtccacattttcagccttggcaaaagagcggaacttcgtccgccccgagtttgccgactatccggttatccacatcgaaaacggccgccatcccgttgtcgaacagcaggtacgccacttcaccgccaaccacaccgacctcgaccacaaacaccgcctcatgctgctcaccggccccaatatgggcggcaaatccacctacatgcgccaagtcgcgctgattgttttattggcacacaccggctgtttcgtgcctgccgatgccgccacaatcggacccatcgatcaaatcttcacccgcatcggcgcatcggacgacctcgcctccaaccgctccaccttcatggtcgaaatgagcgaaaccgcctacatcctgcatcacgccaccgaacaaagccttgttttaatggacgaagtcggacgtggcacttccactttcgacggcctcgccctcgcgcacgccgttgccgaacacctgctgcaaaaaaacaaatccttcagcctgtttgccacccactatttcgagctgacctacctgcccgaagcccacgccgccgccgtcaatatgcacctttccgcgctcgaacagggacaggacatcgtgtttctgcaccaaatccaacccggtcccgccggcaaaagctacggcatcgccgttgccaaactcgccggcctgcctgtacgcgcattgaaatccgcccaaaagcatttgaacggactggaaaaccaagccgccgcaaaccgtccccaactggatattttcagtaccatgccgtctgaaaaaggagatgaaccgaatgtggacagctttgtggacaaagcagaggaaaaacattttgaaggtatattggcagcagccctggagaaactcgatcccgacagcctgaccccgcgcgaagcattgtcagaactgtaccgtctgaaagatttgtgcaaatccgtatcttaa

SEQ ID NO: 39682 - DNA, 609 bp, Neisseria meningitidis
  misc_feature 594, 595, 596, 597, 598: 'n' is a, c, g or t
atgaaacctttgattttagggcttgccgccgtgttggcgctgtctgcctgccaagttcaaaaagcgcccgatttcgactacacgtcattcaaggaaagcaaaccggcttcaattttggtggttccgccgctgaacgaatcgcccgatgtcaacggaacatggggtgtactggcttcgaccgccgcgccgctttccgaagccggctattacgtcttccccgccgcagtcgtggaggaaaccttcaaacaaaacggcttgaccaatgccgccgatattcacgccgtccggccggaaaaactgcatcagattttcggcaatgatgcggttttgtacattacggttaccgaatacggcacttcatatcaaattttagacagcgtgacgaccgtatccgccaaagcacggctggtcgattcccgcaacggaaaagagttgtggtcgggttcggccagcatccgcgaaggcagcaacaacagcaacagcggcctgttgggggctttggtcagcgcagtggtcaatcagattgccaacagcctgaccgaccgcggttatcagtttccaaaccgccgcatacaacctgctgtcgccctattnnnnncacacacttaa

SEQ ID NO: 39683 - DNA, 234 bp, Neisseria meningitidis
atgtggcacatcgtcgccatcggctatctttttgttgccgttatgtattccgccgcgcagccgagtattgcgcgcgccttgatttatttggttttttgggcggtgctgcccaccgtgttcacggttttcaccattaccgtccgccgccgcaaccacctgatgaggcagcaggaacaggcggaatccgaacagcagcgcgcacaacggcaaaaagacagcggcacaaaaccctga

SEQ ID NO: 39684 - DNA, 1311 bp, Neisseria meningitidis
atgatcgtgcccgacctctttgtcgcccacttccgcgaagccgtcccctacatccgccaaatgcgcggcaaaacgctggtcgccggcatagacgaccgcctgctcgaaggtgataccttaaacaagctcgccgccgacatcgggctgttgtcgcaactgggcatcaggctcgtcctcatccacggcgcgcgccacttcctcgaccgccacgccgccgcgcaaggccgcacgccgcattattgccggggcttgcgcgttaccgacgaaacctcgctcgaacaggcgcagcagtttgccggcaccgtccgcagccgttttgaagccgcattgtgcggcagcgtttccgggttcgcgcgcgcgccttccgtcccgctcgtatcgggcaacttcctgaccgcccgtccgataggtgtgattgacggaaccgatatggaatacgcgggcgttatccgcaaaaccgacaccgccgccctccgtttccaactcgacgcgggcaatatcgtctggctgccgccgctcggacattcctacagcggcaagaccttccatctcgatatgcttcaaaccgccgcctccgtcgccgtctcgcttcaggccgaaaaactcgtttacctgaccctttcagacggcatttcccgccccgacggcacgctcgccgtaaccctctcggcacaggaagcgcaatcgctggcggaacacgccggcggcgaaacgcgacggctgatttcgtccgccgttgccgcgctcgaaggcggcgtgcatcgcgtccaaatcctcaacggagccgccgacggcagcctgctgcaagaactcttcacccgcaacggcatcggcacgtccattgccaaagaagccttcgtctccatccggcaggcgcacagcggcgacatcccgcacattgccgccctcatccgcccgctggaagaacagggcatcctgctgcaccgcagccgcgaatacctcgaaaaccacatttccgaattttccatcctcgaacacgacggcaacctgtacggttgcgccgccctgaaaacctttgccgaagccgattgcggcgaaatcgcctgccttgccgtctcgccgcaggcacaggacggcggctacggcgaacgcctgcttgcccacattatcgataaggcgcgcggcataggcataagcaggctgttcgcactgtccacaaataccggcgaatggtttgccgaacgcggctttcagacggcatcggaagacgagttgcccgaaacgcggcgcaaagactaccgcagcaacggacggaactcgcatattctggtgcgtcgcctgcaccgctga

SEQ ID NO: 39685 - DNA, 471 bp, Neisseria meningitidis
gtgaatatcaatgcaacattattcgctcaaatcatcgtctttttcggtttggtatggtttaccatgaaattcgtgtggccgccgattgcaaaagctttggatgagcgtgccgcaaaagtcgccgaaggcttggctgccgccgagcgtggtaaaagcgatttcgagcaggctgaaaaaaaggttgcagaactcttggcagaagggcgtaatcaggtttccgaaatggttgccaacgccgaaaaacgtgccgccaaaattgtcgaagaagccaaagaacaggcttcttccgaggcggcgcgcattgcagctcaggcaaaggccgatgtggagcaggaattgttccgcgcacgcgaatccctgcgcgagcaggttgccgtgttggctgtcaaaggtgccgaatctattttgcgcagcgaagtcgatgcttccaaacacgcaaaactgctcgataccctgaaacaggagctgtaa

SEQ ID NO: 39686 - DNA, 702 bp, Neisseria meningitidis
  misc_feature 8, 9, 10, 11, 12: 'n' is a, c, g or t
gtgtgtgnnnnngaaacacgcggcaagggcgtgccggttgccgccaaaaaagactgggtggcactgagcggacgttcgcgcgtcgtcgtttacgacacccgcaaactgtctgaaaaagatttggaaaaatccgtcctgaattacgccacgccgaaatggaaaaaccgcatcggttacgcccccacttccggcgcgttcttggaacaggttgtcgccatcgtcaaactgaaaggcgaagcggccgcattgaaatggctcaaaggtctgaaagaatacggcaagccttacgctaaaaactccgtcgcccttcaagcggttgaaaacggcgaaatcgatgccgccctcatcaacaactactactggcacgctttcgcgcgtgaaaaaggcgtacaaaatgtccacacccgcctgaatttcgtccgccacagagatcccggcgcactcattacctattccggcgcagccgtgttaaaatcctcccaaaacaaggatgaggcgaaaaaattcgtcgccttcctcgccagcaaggaaggacagcgcgccctgaccgccgtccgtgccgagtatcctttgaatccgcacgtggtatccaccttcaatttggaacccatcgccaagttggaagcaccccaagtgtccgccaccactgtttccgaaaaagaacacgccacccggctgcttgagcaagccggtatgaaataa

SEQ ID NO: 39687 - DNA, 2472 bp, Neisseria meningitidis
atgaaaaaaacctgtttccactgcggtctggatgttcccgaacacctccacctgactgtccgttacgaaaacgaagaccgcgaaacctgctgcgccggctgtcaggcggtcgcacaaagcattattgacgcgggcttgggcagttattacaaacaacgcaccgccgacgcgcaaaaaaccgagctgccgccccaagaaatcctcgaccaaatccgcctgtacgacctgcccgaagtccagtccgactttgtggaaacccacggcggcacgcgcgaggcggttttaatgctcggcggcatcacctgcgccgcctgcgtctggctgatcgaacagcagcttttgcgtacagacggcatcgtccgcatcgacctcaattacagcacgcaccgctgccgcgtcgtctgggacgacggcaaaatccgcctttccgacattctgttgaaaatcaggcagataggctacaccgccgcaccctatgacgcgcaaaaaatcgaagccgccaaccaaaaagaacgcaaacaatacatcgtccgcctcgccgttgccgggctggggatgatgcagacgatgatgttcgcgctgccgacctacctttacggcggcgacatcgaacccgatttcctgcaaatcctccattggggcggctttttaatggtgctgcccgtcgtattctattgcgccgtcccgttttatcaaggcgcgctgcgcgacttgaaaaaccgccgcgtcggcatggatacgccgattaccgtcgccatcatcatgacctttatcgccggcgtttacagccttgcgacaaatgcggggcaggggatgtatttcgaatccatcgcgatgctgctgtttttcctgctgggcggacgctttatggaacacattgcccgccgtaaggcaggcgatgccgccgaaaggctggtgaagctgattcctgcgttttgccatcatatgcccgattaccccgatacgcaggaaacctgcgaggcagctgtcgtcaaattgaaggcgggcgatatcgtgctggtcaaaccgggcgaaaccatccccgttgacggcacggtgctggaaggcgcaagcacggttgacgaatctatgctgaccggcgagagcctgcccgtcgccaagatgccgtctgaaaaagtaaccgccggcacactcaacacgcaaagccccctgattatacgcaccgaccgcaccggcggcggcacgcgactgtcgcacatcgtccgcctgctcgaccgcgccttagcgcaaaaaccgcgcactgccgagttggcggaacaatacgcctcgtctttcatattcggcgaactcctgcttgccgtccccgtcttcatcggctggacgctgtacgccgacgcgcacaccgcattgtggattaccgtcgccctgctggtcattacctgcccctgcgccttatcgcttgccacgccgaccgcgctggcagcttctaccggtacgctggcgcgcgaaggtattttaatcggcggaaagcaggcaatcgaaaccctcgcccaaaccaccgacatcatcttcgacaaaaccggcacgctgacccaaggcaaacccgccgtccgccgtatctcattgttgagaggcacagacgaagcctttgttctcgcggtggcgcaggctttagaacaacagtccgaacatccccttgcccgcgccatcctcaactgccgcatttcagacggcagcgtccccgacatcgctattaaacaacgcctcaaccgcatcggcgaaggcgtgggcgcgcaactgaccgtcaacggcgaaacacaggtttgggcattgggcagggcatcctatgtcgccgaaatttcaggtaaagaaccgcaaacagaaggcggcggcagcgcggtttacctcggcagtcaaagcggtttccaagccgtgttctacctgaccgaccccttgaaagacagcgcggcggaggcggtgcggcagttggcaggcaaaaacctgaccctgcacatcctcagcggcgaccgcgaaaccgccgttgccgaaaccgcacgcgccctgggtgtcgcgcactaccgcgcccaagccatgcccgaggacaaactggaatacgtcaaagccttgcaaaaagaagggaaaaaagtgctgatgataggcgacggcatcaacgacgcgcccgttttggcgcaggcagacgtatccgccgccgcagcgggcgggacggatattgcgagggacggcgcggacattgtgttattgaacgaagatttgcgtaccgtcgcccacctgctcgatcaggcgcggcgcacccgccatattatccggcaaaacctgatatgggcgggcgcgtacaatatcattgccgtaccgcttgccgttttgggctatgtccaaccgtggatagccgcactgggtatgagcttcagttcgctggcggttttgggcaacgccctgcgccttcacaaacgggggaaaatgcagtctgaaaaaatgccgtccgaacaatga

SEQ ID NO: 39688 - DNA, 966 bp, Neisseria meningitidis
gtgaaaccgcgtttttattgggcagcctgcgccgtcctgctgaccgcctgttcgcccgaacctgccgccgaaaaaactgtatccgccgcatccgcatctgccgccacactgaccgtgccgaccgcgcggggcgatgccgttgtgccgaagaatcccgaacgcgtcgccgtgtacgactgggcggcgttggatacgctgaccgaattgggcgtgaatgtgggcgcaaccaccgcgccggtgcgcgtggattatttgcagcctgcatttgacaaggcggcaacggtggggacgctgttcgagcccgattacgaagccctgcaccgctacaatcctcagcttgtcattaccggcgggccgggcgcggaagcatatgaacagttggcgaaaaacgcgaccaccatagatctgacggtggacaacggcaatatccgcaccagcggcgaaaagcagatggagaccttggcgcggattttcggcaaggaagcgcgcgcggcggaattgaaggcgcagattgacgcgctgttcgcccaaacgcgcgaagccgccaaaggcaaaggacgcgggctggtgctgtcggttacgggtaacaaggtgtccgccttcggcacgcagtcgcggttggcaagttggatacacggcgacatcggcctaccgcctgtagacgaatctttacgcaacgaggggcacgggcagcctgtttccttcgaatacatcaaagagaaaaaccccgattggattttcatcatcgaccgtaccgccgccatcgggcaggaagggccggcggctgtcgaagtattggataacgcgctggtacgcggcacgaacgcttggaagcgcaagcaaatcatcgtcatgcctgccgcgaactacattgtcgcgggcggctcgcggcagttgattcaggcggcggagcagttgaaggaggcgtttgaaaaggcagaacccgttgcggcggggaaagagtag

SEQ ID NO: 39689 - DNA, 756 bp, Neisseria meningitidis
atgattaaaatccgcaatatccataagaccttcggcgaaaacactattttgcgcggcatcgatttggatgtgggcaaagggcaggtggtcgttatcctcgggccttccggctcaggcaaaacgacgtttctgcgatgcctaaacgcgttggaaatgcccgaagacggacaaatcgagttcgacaacgagcgaccgctgaaaatcgatttttctaaaaaaccaagcaaacacgatattttggcactgcgccgcaaatcaggcatggtgtttcaacaatacaacctctttccgcacaaaaccgccttggaaaacgtaatggaaggaccggttgccgtacagggcaagcctgccgcccaagcgcgcgaagaggctctgaaactgctggaaaaagtcggcttgggcgacaaagtggatttgtatccctaccagctttccggcggtcagcagcagcgcgtcggcattgcccgcgcattggcgattcagcctgaactgatgctgtttgacgaaccgacttccgcgctcgatcctgaattggtgcaagatgttttggataccatgaaggaattggcgcaagaaggctggaccatggttgtcgttacgcatgaaatcaagttcgccttagaagtggcaaccaccgtcgtcgtgatggacggcggcgttattgtcgaacaaggcagcccgcaagatttgttcgaccaccccaaacacgaacggacgcggagatttttaagccaaatccaatctaccaagatttga

SEQ ID NO: 39690 - DNA, 1197 bp, Neisseria meningitidis
atggcgaaaatcattacgccgctgtcggcaaatcaggttaaaaatgcgaagccgcgcgataagctgtataagttgtcggacgggggcgggctggctttgtgggtctacccgacgggcgggcggagttggaagctgtcgtttgtgcaggatggaaggcagcagacaatttcgctggggcggtatcctgatttttcgctggccgatgcgcgggaatggcgggaggaggtgcgccgaaaacgggcgcacggggaaaatgtcgtcaataagaaggtgcgggcggattttgcttttgagaaggtggcgcgtgattggtttgtgcgttggtcgaaggggcggtctgaaaagtatgccggacaggttatgcggaattttgagcggtgggtttttccggctatcggcaatcttgatattcgtcaagtcaggacggcggatgtggtcggctgtctgcgtgtgatggaggcgcgcggtatcgttgatacgttgcgcaaaacgaaaaacagtctgaagatggtgtttgcgtttgcggtcggttcgggaatgatggaaatcaaccctgtcgcgcaaatcggttcgggtgtgtttgaacgggcgaaaacggggaatatggcggcgttgagtccgtctgaattgccgcgcctgattgattttttggagcagcgcaatgaatttgcggtttatgcgggcagggtgcgtatccatcctgtaacgcggctttgtatctattggctgctgttgacaatgacgcggattcaggaggcggcgttgatggagtggtcggagttggacggggaggtttggcgtatccccgccgaacggaaaaaggagcggcgggggcatgatgtgccgctgtcgcgggcgatgcagtgggtgttggatcaggcgcgggcgttgaatgtgaacgggcggtttgtgtttgaaagtgtgaattttcaagggcatatcaataaggaaagtccgcgcgtggcgatgcagcgggcggggctggatacgacggcgcacggtttgcgcttgcttgcgcgtacttatttgcgcgaggttctgaaggtggataatgatgtggcggaaaagctgcttgcccattcgttggggacgaggacgcaaacggcttacaaccgctcggagctttgggaggagcgtaaggatgcgctggaacggtgggggaatgatgttttgaggcttgccaaaaacggaaaatga

SEQ ID NO: 39691 - DNA, 204 bp, Neisseria meningitidis
atgccgtctgaagcatgtttggttttcagacggcatttccttcgcttaaaacagcgtatcggcaaccccgccctgcctgtccacggcaatctgcatctgaaaaccatctgtatcccaaaccacacccccatccctgtttccgtcatttgcaccctgcccgtattgggcaatcatcggtttttcgcttacaatagccgaatctga

SEQ ID NO: 39692 - DNA, 465 bp, Neisseria meningitidis
  misc_feature 450, 451, 452, 453, 454: 'n' is a, c, g or t
gtgatttccgcctttcagacggctgggacggcaatgactgacaacctaatacagatagcaacgccgatattgactgttatcggcgtttttgttgccgcttacggcatcatgaggaatacagaaaacgccaaaaagcgcgccaccatcgacatgatcatggccgaacgtaacaatgccgcccttcaagaagccataaccatagtaaacgggctggcaaaaacagacggatgcatactcgccacctatacatcggatacctcggacaagaagaaagaccgtgaagccatactgacagttttaaaccagcgcgaatttgtctgtgcgggcgtattgggcggagcactgcacgagaaaatgtataaagatttcgaatactccatgctgttacgtgactgggacaacctaagcagcttcatttttgaaatacgccgtatcaggagcgcaccgacnnnnncacacacttaa

SEQ ID NO: 39693 - DNA, 1653 bp, Neisseria meningitidis
atggttgcctatgttttcctatttttgtttgtaacggcggcgttggtgctgattatcaggtcgcactaccgttggacgtattttttcgcatccgcgctgtttgtctttttggcgggcggtatgctgatgttgacggctcagtggcagcgcgccttgaatttcgcttcggtctggtttgtggtgctgatactgttccacaggttgaaaatccattattacaaacagccgctgttgatttccgactttttgctgattgccgactggaggaattgggaaacgctgttccactataaggaagcggttatcggtatggcggggctgctggcgttggcggcatatgcggttttcggctggagcggtgcggatactttgggtgtgccgtggcgttgggcgggcgcggcgttgtttgcggcatcgtttgcgttgatgcggcatttttccaagcaccccggcgcggtaaagacgtggctggactcgctgccggacgacgggcgcgacgtgtttttgaacctgccgatgtcctgtcgtgcggtgtttttccaagtacccgtgttcgagggcgacggagaggggtttgccaaacagatgccgtctgaacctcctttgcgcggcagttcggatgaaaaacccgatattgtcgttaccctgatggaatcgacgctcgatccgcactgtttcgactttgccgccgccaagattcccgatttgaaaatgttcggacggcaggaagataccgtatttttctcacctttgcgcgtgcatactttcggcggcgcaacgtggaagtccgaatttgcgtttttagcgggtgttccgtccacggatttcggcgcgttggcaagcggcgtgttttactcggtcgtaccgcatttgcagaccggtttggtccgcaacctgcgcgaacacggttatttttgcgtggcgctctcgccgtttaccaagggcaactacaatgccaaggcagcatacgaccatttcggctttaatctgatgtttcagccgcaagatttgggctatcccgcgccgatgggcaaaaacctgtggcatatttccagcgaggaaatgatgcagtatgcgcggatgattctcgaaaaacgccatcccgatttggaaaacgtgcggcagccgatgttcgtatatgtgctgaccatgaaggagcacgggccgtatcggacggataccgacaatgtgtttgatttggatgcacctgatttgaatgcgaaaaccgtatccgcgcttaacgactacatcgggcgcattgccgatttggacaaagcggtggaaagtttcgaccgttatctgcacgaacgcggcaaaccctttgttttcggttatttcggcgatcatcaggtaccgtttgagggcgtgtccgtcaggaagaaatgggattacgcgcagccggattatgtaacgcagtttgccgtcaggagcaatattgccggcggattcgtacagcggcaggatttcctcgaccttgcctttgcaggcggcgtgctgatggaggcggctggtctggaagccaaagacggcttcatgcgtgcgaatatggcgatgcgcggtttgtgcggcggagggttggaagactgcccgaaccggaaactggtcggagactatcggaactatctgtacgacgttttgaaaattgtccgttag

SEQ ID NO: 39694 - DNA, 477 bp, Neisseria meningitidis
atgccgatagaaatcgaacgccgttttttgattggaaacgacaactggcggcaatacgccgacgaaccgctgctcttgaaacaggcttatctttctgtcgagaaagaacgtaccgtccgtgtccgtattgtcggacaacaggcgtggctgacactgaaaggctatatttcagaactcagccgcagtgagtttgaatacgaaatcccgcttgccgatgcggaaaagatgatggaaacgatgtgtccgtttaagatggaaaaatggcgttatccggtcagatggggcggcagcctgtttgaaatcgatgtttttcttggcgataatgcgcctttggtcgtcgcggaaatcgagttgcccgacgagaatgccgattttgaccgtccggactggctgggacgggaaatcactgccgacggtatgtttaccaatgcctatttgagcaggcatccgttctcaagctggaaaaatgccgtctga

SEQ ID NO: 39695 - DNA, 1218 bp, Neisseria meningitidis
ttggttaatcctcaaaaaccgattccgcagtttgtggtggggctgacggggatttcagacggcatggttgccgatgcgcctgtttttgcagagattgccggcgagttgttttcggtattgaagggttgtgtgctggttgcacataacagccgtttcgactatacgtttttaaagcatgagtttcatcgtgtgggtatcggattttcatcgcctgttttgtgcagtgtgcagctgtcccggtgtctgtatccgcaattttacaagcacagcctggacagtatcatcgaaaggttggggattgttgtggaagacaggcatcgtgcgatggcggatgtatcggcattgtgcgattatttggaatacagtctgtcggaacacggggtcgaggcatggatcaggcagtgtttccgtttgatgaatccgaaaccgttgcctgccgcgctgcccgaacggttgagggaacagttgtacggtttgcctgacggtatgggggtgctggcctgtttcgacggcggaggaaaagtaaattacatcggtacgtttgaacgggtatatagcgaggtttcggctttattggattccggaaaagccccgtttgattggtgcaatacggaggaagtccgtttttttcctgcattgggcagcctgcatgcatataagattaaagcggaattggtcggacgttatcattcgggttgttatgtatctgccaaaaatctgcttaaaacatttacgaccgtcaggtttgaaaaaggttcagacggcatgttgaatgcgaaaacagcggctttgaaaaacggtgtgacggataatccgcctaccggattatttgccaataaaaaggcagcgagacgggctttgtcgtcgtgggcggaaacatacggattgtgtcctgccgcagccggtatcctgtcggacggttatacagaggatgagccttgtcccgtatatgtttcagaccgatgtgataaggcgtgcgtccgctctgacgaacaggttttggcgtttgcacacaagctgcctgtcttggattggggaaaaatgcatgaggtggaaattaccgaaaccgatcctttaacgggggaaaaagttgttctgcatggaatgggcggcgcattagaaatggatgacgggctttggtatttcgataaagatttaccggatgcgtttaaggcgaagtttaaaacggacaggaaaaatattaaggaaatcggttaa

SEQ ID NO: 39696 - DNA, 483 bp, Neisseria meningitidis; identical to SEQ ID NO: 38704

SEQ ID NO: 39697 - DNA, 300 bp, Neisseria meningitidis; identical to SEQ ID NO: 39584

SEQ ID NO: 39698 - DNA, 1773 bp, Neisseria meningitidis
atgatactgccagcccgtttttcagacggcatcagcctttccctacgcctgaaactcctgaccggactgtgggtcgggttggcggcattgtctgtcgttttgacactgctgctctctttgcgtctggaaaacgcggcctccgtcatcgaagaggcgggcaacttgagaatgcaggcataccgtctggcatacatggcgggtgaaggctcgccccgtgcgcaaattgacaatcaggttgccgaatttgaaaaaagtttaaaacgcattgcccaaagcgatgccatccatccgctgattccttcggacacccctcttgcttatgatttgatacaatccatgctgattatagattggcaggcacacatcctccccccgctccagtcctaccggcgaccgactcaggtcgatctctaccgctttgccggaaacatcgaactgtttttgcaggcattggaaaatgccaacgaaaaaaacacatggtggctcaggcgttttcaatgggcaattatgttgatgacgctggtgtcgtctgtactgatgctgttttggcaccagatttgggttatccggccgctgcaggcgttaagggaaggtgcggaacgcatcggacggaggtgtttcgatattccggttcccgaaggcggtacgccggaattcaaacaggtcgggcgttgtttcaatcaaatgggcggcaggttgaaaattttatatgatgatttggaaggacaagtcgccgagcagacacgcagtctcgaaaaacaaaatcaaaacctgaccctgctgtaccaaactacacgggacctgcaccaatcctacataccgcaacaggctgcagaacattttctaaaccgtatcctgcccgccgtaggagcagattccggcagagtttgtttggacggcggatccgatgtttatgtttccattcatcatgcggattgcggcacagcagcttcggatttggggaagtaccatgaggaaatcttccccattgagtaccagaacgaaacattgggcaggctgttgctcagctttccaaacggcatttctcttgatgaagacgaccgcatcctgcttcaaacactaggcaggcaattgggcgtatcgcttgccggcacaaaacaggaggaagaaaaacgcctgcttgcagtattgcaggaacgcaacctgattgcgcaaggattacatgacagcatcgcacaagcattaacgttcctaaacctacaggtacagatgctggaaaccgcctttgccgaaaacaaacgggaggaagccgcagaaaacatcggcttcatcaaaacaggcgtgcaggaatgttatgaagatgtccgcgaactgctgctcaacttccgtaccaaaatcagcaataaagaatttcccgaagccgttgccgacctattcgcccgctttacgcaacaaaccgggataacggtcgaaaccgcctgggaaaacggttcgttcctgccgcctcaggaagcgcagctccaaatgatttttatcctgcaggaaagcctgtccaacatccgcaaacacacccgcgccacccatgtaaaattcaccctttccgaacacggcggacgctttaccatgaccatccaagacaacggacaaggtttcgacacggagaaaataggagaacccacgggcagccatgtcggactgcacatcatgcaggagcgtgccaaacgcatccatgccgttttagaaatccgttcccaagctcaacagggaaccaccgtctcattgacggttgcatctgaagaaagcttgaaatga

SEQ ID NO: 39699 - DNA, 303 bp, Neisseria meningitidis
ttgggattcaataatcttgtttcgcttgccgcgttaattgaaaaggttttccctattcgatatacgcctgccggaatccctgttttagatattattttaaagcacgaatcgtggcaggaggaaaacgggcagcaatgccttgtccaattggaaattccggcacggattttaggcaggcaggcggaagagtggcagtatcggcaaggtgtatatgttcacgtcgaaggttttttagctcaaaaaagtagacgttcccttatgccgatgctcaggatacaaaatattcaagaatataaaggttaa

SEQ ID NO: 39700 - DNA, 4365 bp, Neisseria meningitidis
atgaaaacaaccgacaaacggacaaccgaaacacaccgcaaagccccgaaaaccggccgcatccgcttctcgcctgcttacttagccatatgcctgtcgttcggcattcttccccaagcttgggcgggacacacttatttcggcatcaactaccaatactatcgcgactttgccgaaaataaaggcaagtttgcagtcggggcgaaagatattgaggtttacaacaaaaaaggggagttggtcggcaaatcaatgacaaaagccccgatgattgatttttctgtggtgtcgcgtaacggcgtggcggcattggtgggcgatcaatatattgtgagcgtggcacataacggcggctataacaacgttgattttggtgcggaaggaagcaatcccgatcaacatcgttttacttataaaattgtgaaacggaataattataaagcagggactaacggccatccttatggcggcgattatcatatgccgcgtttacataaatttgtaaccgatgcagaacctgttgaaatgaccagttatatggatgggcggaaatatatcgatcaaaataattaccctgaccgtgttcgtattggggcaggcaggcaatattggcgatctgatgaagatgagcccaataaccgcgaaagttcatatcatattgcaagtgcgtattcttggctcgttggtggcaatacctttgcacaaaatggatcaggtggtggcacagtcaacttaggtagtgaaaaaattaaacatagcccatatggttttttaccaacaggaggctcatttggcgacagtggctcaccaatgtttatctatgatgcccaaaagcaaaagtggttaattaatggggtattgcaaacgggcaacccctatataggaaaaagcaatggcttccagctggttcgtaaagattggttctatgatgaaatctttgctggagatacccattcagtattctacgaaccacgtcaaaatgggaaatactcttttcacgacaataataatggcacaggaaaaatcgacgccaaacatgaacacaattctctgcctaatagattaaaaacacgaaccgttcaattgtttaatgtttctttatccgagacagcacaagaacctgtttatcatgctgcaggtggtgtcaacagttatcgacccagactgaataatggagaaaatatttcctttattgacgaaggaaaaggcgaattgatacttaccagtaacatcaaccaaggtgctggaggattatatttccaaggagattttacggtctcgcctgaaaacaacgaaacgtggcaaggcgcgggcgttcatatcagtgaagacagtaccgttacttggaaagtcaatggcgtggcaaacgaccgcctgtccaaaatcggcaaaggcacgctgcacgttcaagccaaaggggaaaaccaaggctcgatcagcgtgggcgacggtaaagttattttagatcaacaagcagatgaaaataataaaaaacaagcctttagtgaaatcggcttggtcagcggcaggggtacggtgcaactgaatgccgataatcagttcaaccccgacaaactctatttcggctttcgcggcggacgtttggatttgaacgggcattcactttcgttccaccgtattcaaaataccgatgaaggggcgatgattgtcaaccacaatcaagacaaagaatccaccgttaccattacaggcaataaagatattgctacaaccggcaataacaacagcttggatagcaaaaaagaaattgcctacaacggttggtttggcgagaaagatacgaccaaaacgaacgggcggctcaaccttgtttaccagcccgctgcagaagaccgcaccctgctgctttccggcggaacaaatttaaacggcaacatcacgcaaacaaacggcaaactgtttttcagcggcagaccaacaccgcacgcctacaatcatttaaacgaccattggtcgcaaaaagagggcattcctcgcggggaaatcgtgtgggacaacgactggatcaaccgcacatttaaagcggaaaacttccaaattaaaggcggacaggcggtggtttcccgcaatgttgccaaagtgaaaggcgattggcatttgagcaatcacgcccaagcagtttttggtgtcgcaccgcatcaaagccacacaatctgtacacgttcggactggacgggtctgacaaattgtgtcgaaaaaaccattaccgacgataaagtgattgcttcattgaccaataccgacatcagcggcaatgtcagccttgccgatcacgctcatttaaatctcacagggcttgccacactcaacggcaatcttagtgcaaatggcgatacacgttatacagtcagccacaacgccacccaaaacggcgaccttagcctcgtgggcaatgcccaagcaacatttaatcaagccacattaaacggcaacacatcggcttcgggcaatgcttcatttaatctaagcgaccacgccgtacaaaacggcagtctgacgctttccggcaacgctaaggcaaacgtaagccattccgcactcaacggtaatgtctccctagccgataaggcagtattccattttgaaagcagccgctttaccggacaaatcagcggcagcaaggatacggcattacacttaaaagacagcgaatggacgctgccgtcaggcacggaattaggcaatttaaaccttgacaacgccaccattacactcaattccgcctatcgccacgatgcggcaggggcgcaaaccggcagtgcgacagatgcgccgcgccgccgttcgcgccgttccctattatccgttacacctccggcttcggcagaatcccatttcaacacgctgacggtaaacggcaaattgaacggtcagggaacattccgctttatgtcggaactcttcggctaccgcagcgacaaattgaagctggcggaaagttccgaaggcacttacaccttggctgtcaacaataccggcaacgaacctgcaagcctcgaacaattgacggtagtggaagggaaagacaacaaaccgctgtccgaaaaccttaatttcaccctgcaaaacgaacacgtcgatgccggcgcgtggcgttaccaactcatccgcaaagacggcgagttccgcctgcataatccggtcaaagaacaagagctttccgacaaactcggcaaggcagaagccaaaaaacaggcgggaaaagacaacgcgcaaagccttgacgcgctgattgcggccgggcgcgatgccgtcgaaaagacagaaagcgttgccgaaccggcccggcaggcaggcggggaaaatgtcggcattatgcaggcggaggaagagaaaaaacgggtgcaggcggataaagacaccgccttggcgaaacagcgcgaagcggaaacccggccggctaccaccgccttcccccgcgcccgccgcgcccgccgggatttgccgcaaccgcagccccaaccgcaaccccaaccgcagcgcgacctgatcagccgttatgccaatagcggtttgagtgaattttccgccacgctcaacagcgttttcgccgtacaggacgaattggaccgcgtgtttgccgaagaccgccgcaacgccgtttggacaagcggcatccgggacaccaaacactaccgttcgcaagatttccgcgcctaccgccaacaaaccgacctgcgccaaatcggtatgcagaaaaacctcggcagcgggcgcgtcggcatcctgttttcgcacaaccggaccgaaaacaccttcgacgacggcatcggcaactcggcacggcttgcccacggcgccgttttcgggcaatacggcatcggcaggttcgacatcggcatcagcacgggcgcgggttttagcagcggcagtctttcagacggcatcggaagcaaaatccgccgccgcgtgctgcattacggcattcaggcacgataccgcgccggtttcggcggattcggcatcgaaccgcacatcggcgcaacgcgctatttcgtccaaaaagcggattaccgctacgaaaacgtcaatatcgccacccccggccttgcgttcaaccgctaccgcgcgggcattaaggcagattattcattcaaaccggcgcaacacatttccatcacgccttatttgagcctgtcctataccgatgccgcttcgggcaaagtccgaacgcgcgtcaataccgccgtattggctcaggatttcggcaaaacccgcagtgcggaatggggcgtaaacgccgaaatcaaaggtttcacgctgtccctccacgctgccgccgccaaaggcccgcaactggaagcgcaacacagcgcgggcatcaaattaggctaccgctggtaa

SEQ ID NO: 39701 - DNA, 594 bp, Neisseria meningitidis
atggaacactatttgagcctcttcatcaaatccgtcttcatcgaaaatatggcgctatccttctttttgggtatgtgcacgtttttggcggtatccaaaaaagtatccaccgcattcggtttgggtgtggcggtgattttcgtactcggactgtccgtccccgccaaccaattggtttactcgctgctcaaagacggcgcgattgtcgaaggcgtggatttgaccttcttaaaattcatcaccttcatcggcgtaattgccgctttggtgcagattttggaaatgttcttggacaaattcgtccccgccctctataacgcgctgggcatctacctgcctctgattaccgtaaactgcgcgattttcggtgctgtatcgtttatggcgcagcgcgaatacaacttcggcgagtccgtcgtgtacggcttcggcgcgggcttgggctggatgttggcgattgtcgctttggcgggcattaccgaaaaaatgaaatattcggacgctcccaaaggcctcaaaggcttgggcattacctttatcgccgccggcctgatggcgatggcgtttatgtcgttctccggcatccagttataa

SEQ ID NO: 39702 - DNA, 1434 bp, Neisseria meningitidis
atgtctcaatatgatgtagtagtgattggtgcaggcccgggcggatacgttgccgccatccgtgccgcacaactgggtttcaaaactgcctgtgtcgatgcaggcgttaacaaagcaggcaatgcccctgcattgggcggtacttgcttgaacgtaggttgtatcccttctaaagccctgttgcaatccagcgaacatttccacgcagcgcaacacgagtttgccgaacacggtatcactgtcggcgacgtaaaattcgacgtggccaaaatgattgagcgcaaagatgccatcgtaaccaaactgaccggcggcgtgaaattcctgttccagaaaaacaaagtaaccagcctgttcggtacggcttcctttgccggcaaaaatggcgatgcttaccaaatcgaagtcgataacaaaggtgagaaaaccgttatcgaagccaaacacgtcatcgtagcgaccggttccgtaccgcgtccgttgccgcaagtcgctatcgacaatgtgaacgtattggacaacgaaggcgcattgaacctgaccgaagtacctgccaaactcggcgtgatcggttccggtgtgattggtttggaaatgggttccgtatggaaccgcgtgggtgcggaagttaccattcttgaagccgcgccgaccttcctggctgccgccgaccaacaaatcgccaaagaagccttcaaatacttcaccaaagagcaaggtctgagcatcgaattgggcgtgaaaatcggcgacatcaagtctgaaggcaaaggtgtttccgttgcttacgaaactgctgccggcgaagccaaaaccgaagtattcgacaaactgatcgttgccatcggccgtattccaaacaccaaaggcctgaacgcggaagccgtaggcttggaaaaagacgagcgcggctttatcaaagtagatggcgaatgccgtaccaacctgcctaacgtatgggcaatcggcgacgtggttcgcggcccgatgttggcacacaaagccagcgacgaaggcgttgccgttgccgaacgcattgccggtcaaaaaccgcatatcgacttcaacaacgtaccgttcgtgatttacaccgatcctgaaatcgcttgggtgggtaaaaccgaagagcagctcaaagccgaaggcgtggagtacaaaaaaggtacttcaggttttggtgcgaatggtcgcgcattggcaatgggcaaagccaaaggtacggttaaagtgttggcagacgccaaaaccgaccgcatcttgggcgtacacatgattggtccggttgtcagcgaattgcttaccgaaggcgtgactgcgctcgaattcttcgccagcagcgaagacatcgcccgcattatccatgcccacccaaccttgtccgaagtggttcacgaagctgcattggcggccgacaaacgcgctttgcacggttga

SEQ ID NO: 39703 - DNA, 741 bp, Neisseria meningitidis
atggaaacgacactgttcaaacccgccctgtggcagataccgcatatcggatccggcggcgaaaccgcccttgcggaaaaaacggaaaccctcaaacaacgcctgcaccggattgtcggcagccaccgggatgcacggtttgccagcagccttgcggcagaagatatggtgattaccgaccttatcgccggcgaaaacctcaatatcggcatttttaccttggatacggggctgctccacacggaaaccctaaacctgctggacaggctcggacgcgcatatccccatttgcggataaagcgtttccggccggttcgagaagatgccgaccgttatgtggaaagcaaaggcaggtttgccttttacgacagcgttgaagcgcgccgcgaatgctgccgcatccgaaaaatcgaaccgctcaaccgcgccattgcaggcgcggacgcctggcttaccgggcaacgccgcgaacaatccgccacacgcacggaactgccgtttgccgaatacgatgccggacggggcatcggcaaatacaacccgattttcgactggtcggaacacgacgtgtgggcatacatcctcgccaacaatgtgccttacaacgatttgtaccggcaaggatttcccagcataggctgcgacccctgcacccgccccgtcaaggcgggcgaagacatccgcgccgggcggtggtggtgggaaggcagaaacagcaaagaatgcgggctgcacaaataa

SEQ ID NO: 39704 - DNA, 1497 bp, Neisseria meningitidis
atgtcgcttgccttggtttacagccgcgccttgagcggtatgaatgcgccgttggtcgaagtggaagcccaccttgccaacggcctgccgcatttcaacatcgtcgggctgcccgatacggaagtaaaggaaagtcgcgaccgcgtccgtgccgccattattcaaagcggttttgaattccccgccaaaaaaattaccgtcaacctcgcccccgccgacctgcccaaagagtcggggcgtttcgatttgccgattgcaatcggcatccttgccgcatcggggcaggttgcgcccgaaaaactggcggaatacgagtttgcgggggaattggcactgtcggggctgttgcgccccgtgcgcggcgcgttggcgatggcgtggcagggtatgcaggcaaaacgtgcatttgttttgcctgaagaaaacgcaggacaagccgccgtgatgcgcggcattaccgtttacggcgcgcgctctttgggcgaagtcgccgcccatttgaacggcatcgaacctttggtgcaaaccgactgtcaagttcctcagatgccgtctgaaaacaccaaattgctcgacctcgtcgatgtcaagggtcagcacactgcccgccttgctttggaaatcgctgccgcaggcggacacagcctcttgatgatgggtccgccgggaacgggcaagtctatgctctcccaacggctgcccggcatcctgccgccgctgaccgaagacgaattggttgaagtttgggcattgcgttcgctcctgcccaaccaccagcaacaactcgacagcaaccgtcctttccgcagtccgcatcacagcgccagcgcggcggctatggtcggcggcggttcggatccgcgtccgggcgagatttcattggcgcatcacggtgttttgtttttggacgaattgcccgagttcgaccgcaaagttttggaagttttgcgcgaaccgttggaaaacggcgaaatccacatttcccgcgcggcgcgccaagccgtctatcctgccaaattccaacttgtcgccgccatgaacccgtgtccgtgcggttatctcgggcatcccgtcaaaccctgccgctgcacgcccgaaagcgtcgcgcgttaccgcagcaagatttccggcccgctgctcgaccgcatcgatttgaccatcgaagtccccagcctgtccgccgtcgaactgatgcagcaggaagcgggcgaaagcagcgcgtccgttttggaacgcgttatcgccgcccgcgacaaacaatacgcacggcagggcaaagtcaacgccgctttgagcgtcagcgaactcgattcccaagcccgcatccaaaaagaagcgcaggaagcattgggcagcctgctggaaaaactctccctctccgcccgcagtttccaccgcatcatgcgcgtggcgcgtacattggcggatttggcgggcgacgaagaagtcggcagaagccacgtcatgaaagccataggtttccgccgcgctttatag

SEQ ID NO: 39705 - DNA, 213 bp, Neisseria meningitidis
atgaccgctatgccgtctgaaccgcctttcagacggcattccacacatcaaaacagaaaaaccgcgcccaaaatcatcatcacaagacacaacggcaaaccggatacaaaacccaacaccgccgccaaaatgccgtctgaagccgtcggcgcaaccatccttatctggggcgcgcttcaggggcgcataactttccttaaccatcccttttga

SEQ ID NO: 39706 - DNA, 348 bp, Neisseria meningitidis
atgtatattcccgacaaaggcgatattttccatttgaatttcgacccttccagcggcaaggaaatcaagggcgggcggtttgcgctggctctgtctccaaaagcattcaaccgcgcaacgggattggtttttgcctgccccatttcacaggggaatgcagcggctgcacgaagcagcggcatgatttcaaccttactcggtgcaggaacggaaacgcagggcaatgtccactgccaccagctcaaatctctggactggcaaatccgcaaggcttcttttaaagaaactgtacccgattatgtattggacgatgtgctggcgcgcatcggcgccgtcttattcgattaa

SEQ ID NO: 39707 - DNA, 825 bp, Neisseria meningitidis
atggacggcgcacaaccgaaaacgaatttttttgaacgcctgattgcccgactcgcccgcgaacccgattccgccgaagacgtattaaacctgcttcggcaggcgcacgagcaggaagtttttgatgcggatacgcttttaagattggaaaaagtcctcgatttttccgatttggaagtgcgcgacgcgatgattacgcgcagccgtatgaacgttttaaaagaaaacgacagcatcgaacgcatcaccgcctacgttatcgataccgcccattcgcgcttccccgtcatcggtgaagacaaagacgaagttttgggtattttgcacgccaaagacctgctcaaatatatgttcaaccccgagcagttccacctcaaatcgatattgcgccctgccgtcttcgtccccgaaggcaaatcgctgaccgcccttttaaaagagttccgcgaacagcgcaaccatatggcgatcgtcatcgacgaatacggcggcacgtcgggtttggtaacttttgaagacatcatcgagcaaatcgtcggcgacatcgaagacgagtttgacgaagacgacagcgcggacaacatccacgccgtttcttccgaacgctggcgcatccacgcggctaccgaaatcgaagacatcaacaccttcttcggtacggaatacagcagcgaagaagccgacaccatcggcggcctggtcattcaagagttagggcatctgcccgtacgcggcgaaaaagtcatcatcggcagtctgcaatttaccgtcgcacgcgccgacaaccgccgcctgcatacgctgatggcgacccgcgtgaagtaa

SEQ ID NO: 39708 - DNA, 156 bp, Neisseria meningitidis
atgtggcttggggatatgaaaattttttacggacaatatggaaaagatttttatgattatcatgagtttatgaaagataaaggcatagaagaaataaatatgtgggaaggagagctttttgatcacccatattatgaggatgaaaaatttaaataa

SEQ ID NO: 39709 - DNA, 465 bp, Neisseria meningitidis
ttgaaagaaaacaaagtggacgaagttttcaaaactgaatcggcaggctatttgatgaaccacattgcccgccaatttgccattttattgggcgaaggtttaaagcctttgggcatcgcccccgcgcaatttccgatattgctggaactgtggcaaaaagacggtttgagccagcaggaattggtggaacgcgccgatttgaagcaggcaacgattgccaacactttggcgcggatggagcgcgacggactgattacgcgcgaaccgaatcccgacgatgcgcgcagccgcctgattatgctgacggagcaagctcgcgccttgcagcagcagtccacggaaattgcccaagccatcaaccaaacggctttgtcggatttgtcggcaaacgaacaaaagttgtttttggaaatggcggcaaaaattgtggcgcgacagcaagagatgattacgggcgagaagtga

SEQ ID NO: 39710 - DNA, 495 bp, Neisseria meningitidis
atgaaaaagaacatattggaattttgggtcggactgttcgtcctgattggcgcggcggcggttgcctttctcgctttccgcgtggcgggcggcgcggcgttcggcaattccggcaagacttataccgtatatgccgatttcggcgacatcggcggtttgaaggtcaatgcccccgtcaaatccgcaggcgtattggtcgggcgcgtcggcgctatcggacttgacccgaaatcctatcaggcgagggtgcgcctcgatttggacggcaagtatcagttcagcagcgacgtttccgcgcaaatcctgacttcgggacttttgggcgagcagtacatcgggctgcagcagggcggcgacacggaaaaccttgctgccggcgacaccatctccgtaaccagttctgcaatggttctggaaaaccttatcggcaaattcatgacgagttttgccgaaaaaaatgccgacggcggcaatgcggaaaaagccgccgaataa

SEQ ID NO: 39711 - DNA, 288 bp, Neisseria meningitidis
atgaataaaatattggaaaaattaattgaacaggcttgcacaaataatgcattgttttgcggaaaattgctaaccgatttaacaaaagatgaaatggatatattaagtagttttcatgctattgatgtagatatgattgttttgaatgatgattatttttgtggaattagagcagatcattttgttattgaatttggatggagtgaatgccatgagggagatttaattctaataacggctaaccataaaggatctagagctttaacattgatagacatatcaaaatga

SEQ ID NO: 39712 - DNA, 1212 bp, Neisseria meningitidis
atgaaccaactgaaacttgccgtttccggcgcgcagattttatttgtggcattcggcgcaatggtgctggttcccctgctgaccggtctgaatccggctcttgcgcttttgggcgcaggcttgggaacgctgctgttccaaatcacaaccaaacgcaaagtgccgatttttcttggttcttcgtttgcctttatcgcaccgattatctactccgtcggcgaatgggggctgccttccaccatgttcggactgtttgccgccggctttatgtattttgtgtttgccgcgctgatccgttggcgcggactggcagcggtacacaaactgctgcctccggtcgtcatcggccccgtcatcatggtcatcggtctgtctgttgccgtggcggcaagcagcatggcaatgggtcaggcggacggcaaacaggtcatcgactataccgattcgctgattctttccggctttacctttgccgttaccgccatcgtatcggttttcggcagcaggatgatgaagctgattcccatcttgatcggtgtcgcttcgggttatgttttggcactgctgatgggactggtggacacggcaagcattgcacacgcgccctggttcgccgttccccattttgaaacgcctcaggtcaactggcaggctgcactgtttatgctgcccgttgccgtcgcccccgccatcgaacacatcggcggcatcatggcaatcggcaatgtgacggggaaagactatacgaaagacccgggcttggacaaaacccttgcaggcgacggtttgggcgtatgcgttgcgggtctgatcggcggcccgccggttacgacctacggcgaagtaacgggtgcggtgatgattaccaaaaacagcaaccccgtcatcatgacttgggcggcggtttttgccgtctgcatggcgtttttcggcaaattcaatgcgtttttggcttccattccgatgccagtaatgggcggcattatgctgctgctgttcggcacgattgcttctttgggcgtgaaaacgttgattgatgccaaagtcgatttgatgctgccgaaaaacctggtcatcgtcagctcggtactgaccacgggcatcggcggcatgacgctcaaattgggcagcttcagctttgccggcgtgggcttgtgcgccgtacttgccattatgttgaacagcctgctgcccgatccgaaagaatcctga

SEQ ID NO: 39713 - DNA, 867 bp, Neisseria meningitidis
atgaaaggcatcatactggcaggcggcagcggcacgcgcctctaccccatcacgcgcggcgtatccaaacagctcctgcccgtgtacgacaaaccgatgatttattaccccttgtcggttttgatgctggcgggaatccgcgatattttggtgattaccgcgcctgaagacaacgcctctttcaaacgcctgcttggcgacggcagcgatttcggcatttccatcagttatgccgtgcaacccagtccggacggcttggcacaggcatttatcatcggcgaagaatttatcggcaacgacaatgtttgcttggttttgggcgacaatattttttacggtcagtcgtttacgcaaacattgaaacaggcggcagcgcaaacgcacggcgcaaccgtgtttgcttatcaggtcaaaaaccccgaacgtttcggcgtggttgaatttaacgaaaacttccgcgccgtttccatcgaagaaaaaccgcaacggcccaaatccgattgggcggtaaccggcttgtatttctacgacaaccgcgccgtcgagttcgccaaacagctcaaaccgtccgcacgcggcgaattggaaatttccgacctcaaccggatgtatttggaagacggttcattgtccgtccaaatattaggacgcggtttcgcatggttggacaccggcacccacgagagcctgcacgaagccgcttcattcgtccaaaccgtgcaaaacatccaaaacctgcacatcgcctgcctggaagaaatcgcttggcgcaacggttggctttccgatgaaaaactggaagaattggcgcgcccgatggcgaaaaaccaatacggccaatatttgctgcgcctgttgaaaaaataa

SEQ ID NO: 39714 - DNA, 639 bp, Neisseria meningitidis
ttgacaatcgccttatccaaggggcgcatttttgaggagacgctgccgctgcttgccgctgccggcattgttccgactgaagagcctgaaaaatcgcgcaagctgattatcgggacgaaccatgaaaacatccgccttgtcattgtccgcgcaaccgatgtgccgacttatgtccgctacggcgcggcggacttcggcattgcgggcaaagacgtgctgatcgaacacggcggcacggggctttaccggcctttggatttggagattgccaagtgccgcatgatggttgctgtgcgtaaagggtttgattacgaagcagcttcgcaacccggatgccgtctgaagattgccacgaagtatcctgaaatcgcggcatctcattttgccggcaagggtgtccatgtggacattatcaaactgtacggctcgatggaacttgcgccgctggtcggcttgagcgatgcgattgtggacttggtttcgacgggcaacaccttgaaggcaaacggcttggaagcagtcgaacacatcgtcgacatttccagccgcctggtggtcaacaaggctgctttgaaaacgaaatacgcgctgctggagccgattattcaggcgttcggcggcgcagtgaaggcgaagtaa

SEQ ID NO: 39715 - DNA, 291 bp, Neisseria meningitidis
atggcactgacacttgccgacgtagacaaaatcgcccgactctcccgactgcacctgactgcggaagaaaaagaaaaatcgcttcaagaattaaacgacattttcactatggtcgaacagatgcaaaccattaacacagacggcatcgaaccgatggcgcacccgcacgaggccgccctgcgcctgcgcgaagacgaagtaaccgaaaccgaccgcgccgccgaatatcaggcgggtgctccggaagtacgcaaccgtctgtacatcgtaccgcaagttatcgaagaataa

SEQ ID NO: 39716 - DNA, 453 bp, Neisseria meningitidis
atggcaaaaccgctcaaataccccgtttccgcactggtcgtcctttatagcggggacggcggcatcctgctcatcgaacgcacgcatccgaaaggattttggcagtcggtaaccggcagcctcgaaccgggcgaaaccgtcgcccaaacggcaaggcgcgaagtttgggaagaaaccggcatcctgctggcggacgggcagcttcaagactggcacgacagcacggtttacgaaatctaccaccactggcggcaccgctatccaaaaggcgtgtttgaaaaccgcgaacacctcttctctgccgaaatcccgcgcgatacgcccgtcgtcctgcaacccgaggaacacgtctcctacggctggttcggcttggaagaagcggcggaaaaagtgttttccccgtccaacaggcgcgcgattctggaactgggcaggtttttgggcaaacggtaa

SEQ ID NO: 39717 - DNA, 567 bp, Neisseria meningitidis
  misc_feature 544, 545, 546, 547, 548: 'n' is a, c, g or t
atggcgttgaaagtgcgccacgacttgttcggcttggaaaccggcatcgataccacgcaaatcgtgccttcgtccaaactggtgtccaccattacgggctatcccgtgcagcccaacaaagccattgtcggtgccaatgccttttcgcatgaatcgggcatccatcaggacggggtgctgaaacaccgcgaaacttacgagattatgtctgccgaatcggtcggttggtcggctaaccgattgagcttgggcaaattgtccggccgcaacgccttcaaaaccaagctggcggatttgggcatcgagttggaaagcgaagaggcactgaacgcggcatttgcacgcttcaaagaactcgccgacaaaaaacgcgaaatcttcgatgaagacctgcacgcgctggtgtcggacgaaatgggcaatatgaataccgaaagctacaaattcatttcccaaaaaatcagcaccgaaaccggcgaagagccgcgcgccgacatcgtgttcagcatcaaaggcgaagaaaaacgcgcttccgcaaccggtnnnnncacacacttaattaattaa

SEQ ID NO: 39718 - DNA, 729 bp, Neisseria meningitidis
atgtctcaaattactatgcgtcagatgattgaagccggtgttcacttcggccaccaaacccgtttctggaacccgaaaatggcacaatacattttcggtgcgcgcaacaaaatccatatcgtaaacttggaaaaaaccctgccgatgttccaagacgcgcaagaagccgtacgccgtttggttgccaacaaaggtacagtattgttcgtaggtaccaaacgccaagcccgcgacatcatccgcgaagaagcgacccgtgccggtatgcctttcgttgattaccgctggttgggcggtatgctgaccaactacaaaaccgttaagcaatccatcaaacgcctggaagaaaaaaccgcagccttggaaaatgctgccgaaagcggtttcagcaaaaaagaaattctggaaatgcaacgcgatgttgaaaaactggaacgttctttgggcggtatcaaaaacatgaaaggcctgcccgacgcgattttcgttatcgataccggctaccaaaaaggtactctggtcgaggctgaaaaactgggcatccccgttatcgccgtagtcgataccaacaacagccctgacggcgtgaaatacgtcatccccggcaacgacgactccgccaaagccatccgcctgtactgccgcggcatcgctgacgcagttttggaaggcaaaaaccaagcgctgcaagaaaccgtagccgctgcccaagaagccgctgccgagtaa

SEQ ID NO: 39719 - DNA, 537 bp, Neisseria meningitidis
ttggaagacgaagattttattcgcgccgcgtccatgctcgccgaagaagttttcggtttcggtatctacaaagaatccaaaggctcgggcggtcgtttctatgagcgctgttggttgatgggttcggaagacgtcctatacggtcgcgtccattttggcggacaaaacaataccatccttttcgaactgaccggcaccggttgcggcgtcgcaaaagaaggctgggaatcacgacttttcgcattcctgactaatgcaatccgcccaaaaatcacacgcgttgacatcgcaaaagactttttcaacggcgaatacagcccgaaccaagcccgtgaagaccgaaataaaggtatgtttacctgtcatcacgtcaaaccaaaaggcgaatgtttggggtcagattgggaagaagacgatgaagccaaaatgaccaaaggcaagacctatggtatcggctcccgtgaatcgtccaaatatgtccgcgtctatgaaaaggcaagcagttgggcgataaaacagcacatggacgcgctttga

SEQ ID NO: 39720 - DNA, 1182 bp, Neisseria meningitidis
atgcgaaaaaaacttaccgccctcgtattgtccgcactgccgcttgcggccgttgccgatgtcagcctgtacggcgaaatcaaagccggcgtggaaggcaggaacatccaggcgcaattgaccgagcagccccaagtaactaacggtgtgcaaggcaatcaggtaaaagttactaaggccaaaagccgcatcaggacgaaaatcagcgatttcggctcgtttatcggctttaaggggagcgaggatttgggcgaagggctgaaggctgtttggcagcttgagcaagacgtatccgttgccggcggcggcgcgtcccagtggggcaacagggaatcctttatcggcttggcaggcgaattcggtacgctgcgcgccggtcgcgttgcaaatcagtttgacgatgccagccaagccattaatccttgggacagcaataatgatgtggcttcgcaattgggtattttcaaacgccacgacgatatgccggtttccgtacgctacgattctccggaattttccggtttcagcggcagcgtccaattcgttccggctcaaaacagcaagtccgcctataagccggcttattatactaaggatacaaacaataatcttactctcgttccggctgttgtcggcaagcccggatcggatgtgtattatgccggtctgaattacaaaaatggcggttttgccgggaactatgcctttaaatatgcgagacacgccaatgtcggacgtaatgcttttgagttgttcttgatcggcagcgcgacgagtgatgaagccaaaggtaccgatcccttgaaaaaccatcaggtacaccgcctgacgggcggctatgaggaaggcggcttgaatctcgccttggcggcccagttggatttgtctgaaaatggcgacaaagccaaaaccaaaaacagtacgaccgaaattgccgcgactgcttcctaccgcttcggtaatgcagttccacgcatcagctatgcccatggtttcgacttgatcgaacgcggtaaaaaaggcgaaaataccagctacgatcaaatcatcgccggcgttgattatgatttttccaaacgcacttccgccatcgtgtctggcgcttggctgaaacgcaataccggcatcggcaactacactcaaattaatgccgcctccgtcggtttgcgccacaaattctaa

SEQ ID NO: 39721 - DNA, 450 bp, Neisseria meningitidis
atgagccttatcggcgaaattttgcctttgtcccatattgttttggatatggaggtgggcagtaaaaaaaggctgtttgaggaagcgggcctgcttttggaacgcgaatcctcattgtcccatgctgatgttttcgaatgtctttttgcccgtgaaaaactcggttcgaccggtttggggcagggcgttgccatcccgcacggccgtcatgccggcgtgaagcaggcgacgggcgcgtttatccgcacgcgcgaacccgtcggatttgacgcaccggacggcaaaccggtttccctggtttttatcttgctggttccggaaaatgcgacgggagagcatttggaagtattgtccaaactggccggcaagttttcccaaaaaagcatccgcgaatcgctgatgaccgtttcttctgcggaagaagcccgcgccatcctgactgaagaataa

SEQ ID NO: 39722 - DNA, 408 bp, Neisseria meningitidis
atgactgtatggtttgttgccgctgttgccgtcttaatcatcgaattattgacgggaacggtttatcttttggttgtcagcgcggctttggcgggttcgggcattgcttacgggctgaccggcagcacgcctgccgccgtcttgaccgccgctctgctttccgcgctgggtatttggttcgtacacgccaaaaccgccgttagaaaagttgaaacggattcatatcaggatttggatgccggacaatatgtcgaaatcctccgacacacaggcggcaaccgttacgaagttttttatcgcggtacgcactggcaggcgcaaaatacggggcaagaagagcttgaaccaggaacgcgcgccctaatcgtccgcaaggaaggcaaccttcttatcatcgcaaaaccttaa

SEQ ID NO: 39723 - DNA, 831 bp, Neisseria meningitidis
atgattactctgaaaaccaccccatttcatcaagcccatcaagatgcaggcgcgaagccggtagattttgccggctgggagctgcccatccattatggttcgcaaatcgccgaacacgaagccgtgcgcaccgacgccggtatgtttgacgtatcccatatgcttgttaccgacgtagcaggcgcaaatgccaaagcctttttccgcaaattgattgccaacgatgtcgccaagctcgcttttgtcggcaaagccctttattccgctttgctcaacgacaacggcggcgtgattgacgacttgatcgtttaccgcaccaatgaagccgaaacccaataccgcatcgtgtccaacggcgcgactcgcgaaaaagatacggcacaattccacaaagtcggacaagagttcggtgtttccttcaatccgcgctacgacctcggcatgctcgccgtacaaggccctaaagccattgaaaaactcctgaccgtcaaacccgaatgggcagatgtcgtccataacctcaaaccgttccaaggcgcggatttgggcaacgactggtttgtcgcccgcaccggctacaccggcgaagacggcgtcgaagtcatcctgcccggcaccgaagccgtcgcattcttcaaagccctgcaagcagcaggcgtacaaccttgcggtctcggcgcgcgcgacaccctgcgcatggaagccggcatgaacctctacggcaacgatatggacgacgataccagcccgctcgaagcaggcatgggttggaccgttgatttgaaagacgaaagccgcgattttgtcggcaaagctgccttgttggcatga

SEQ ID NO: 39724 - DNA, 273 bp, Neisseria meningitidis
gtgaacaattcagtcatcaccgtcatcggcaaagaccgcgtcggcatcgtgtacgatgtttccaaaattttggcggaaaaccgaatcaacatccttaatatcagccaacagctgatggacgatttttttaccatgattatcttggtggatacctcgaaatgccccaaatctcggcaggaggttttggatttgtttgcggaagagagcaaaaaactcgcgcttgatatccgtatgcaaaacgaagaaattttccaagccatgcaccgtatttaa

SEQ ID NO: 39725 - DNA, 183 bp, Neisseria meningitidis
atgaaaaatcatcaaactacactctctttccctacttcgagtagcctgaaaccttgcgcagacaaacaaggcctgtctgaagaccgcagccaataccgcctgaccaaactcggcgaacaaatggcgcacctgcctatcgacccgaaaattgcgcgtattttgttagtattattccgtttttaa

SEQ ID NO: 39726 - DNA, 795 bp, Neisseria meningitidis
atgaaagcctatttggacttgatgcgccacgtcctcgacaacggtacggacaaatcagaccgcaccggtacgggcacgcgctccgtattcggttatcagatgcgttttgacttgggcaaaggttttccgctgctgacgaccaaaaagctgcatctgcgttcgattatccacgagctgctttggtttctcaaaggcgataccaatatcaaatacctgaaggacaacaatgtttccatttgggacgagtgggcggacgaaaacggcgacttgggcccggtttacggctaccagtggcgcaactggcccgcgcccgacggccgccatatcgaccaaatcgccaatgtggtggaacaaattaagaaaaaccccgactcgcgccgcctgattgtatcggcgtggaatccggctttggtcgatgagatggccttgccgccttgccacgcgctgtttcagttttacgttgccgacggcaaactgtcctgccagctttaccagcgtagtgcggatattttccttggcgtaccgttcaacatcgccagctacgcattgttgaccatgatgatggcgcaagtgtgcggattggaagccggtgagtttatccatacgtttggcgacgcgcatttgtaccgcaaccatttcgagcaggcagagttgcaattggaacgcgaaccgcgcaccttgcctgtgatgaaaatcaatcctgaagtcaaagatttgttttccttcaagtttgaagatttcgagttggaaggctacgacccccatccgcacatcaaggcggcagtgtcggtctga

SEQ ID NO: 39727 - DNA, 657 bp, Neisseria meningitidis
gtggcttcagtatttttagaaggagaagcagtcgaggtcggcaatattttctgtatcggcaggaactatgccgcacatattgaagagttaaaaaacgaaataccttccgaacctgtggtgtttatgaagccgtcaggcagcattttgaacagcggcggtacaatcttgctgcccgagtttagtagggatgtgcagtttgagtgcgaactcgtgctgctggtcggtaaggattcagacggcacgggcgagggtaaagatattttgggatgtgtcgcaggatatggtgtagggctggaccttacggcacgggatatccaatgccgtctgaaggaaaaagggctgccctggctgaaggcaaaagggttcaggcattccgcgtgcgtgtcggattttgcggcggcaggcagaatcggcaatcccgagaatgtgttgttttcattaaaacaaaacggcgtattgaaacagcgcggggataccggtttgatgatttacccgattcgggaaattttacacaaactggcggcagattacggtttggggaaaggggatttggtgtttaccggaacgccctccggcgtgggcgcaatcggtgcgggggacaatttggcattggagctggacggcttggtgcgcgcctctttcacggtagggtgttaa

SEQ ID NO: 39728 - DNA, 534 bp, Neisseria meningitidis
gtggatgcagttatcgttacccatacccacgaagaccattggggcgaaaccgccgcacgttccattccgaaaaacctgcccgtatatgtgcagcaccaagccgacgcggcaaaaatccgcagccaaggatttactgatgtacgcgtgttgaacggcagcactgtcttcaacggcgtaaccatcagcaaaaccggcggcgtacatggtacagaagccatgtatgccaacccgcagctagccgaaatcttaggtgatgcaatgggtgtagtattccaaagcagcggacacaaaaccgcttatattatgggtgatactgtgtggacggcagatgtaaacaaagcattgaaccgctacaaacccgattatctgattatgaacacgggctacgcgctgatttcaggcattaccgtacacatggataccgtgaatcataccgccgtcagccgcaccgatatgcgtaaatttatacgcggtcaaggcattgaaagccgtgtgaacgttccggaagacggagaaatcctgaaactggattga

SEQ ID NO: 39729 - DNA, 690 bp, Neisseria meningitidis
atgctgtttgaaggcttgccgtgtttggcggtttggtgcaaaaaccggctgtctgccgttttgcctgttggaggattgaacgtgtctgaaaatctgcttgaaatcgaaacccatcccttcgattccgtgttgccgccgaaggctgcggtcatgatgatggggacgtttccgcccaaggaagacaaacgcgcgatgcagtttcattatccgaatttccaaaacgatatgtggcgcgtttacgggctggtgttttttaatgatgcggcgcatttccaaaggttgtctgaaaaagcgtttgatgccgagaaaatcaaggcgtttttgcacgaacgggggattgcgtcctgtccgaccgtgttgaaggcggcaagggaacacggcaatgcgtccgacaagtttttaaaggtagtcgaaaccgtcgatttggcggcggtgttggcgaaaataccagactgccgccatatttgtacgacaggcggcaaggcgacggaaatcctgctcgatattcagggtggcggcatcaaaatgccgaaaacgggcgaaaccgtgccgtttccgtttgccggacgggatttgacgctgacgcgcctgccttcgacttcgcgtgcctatcctttgagtttggcgaaaaaagcggcggcgtatcgggcgttttttgaaatggcgggcttgtgtgaaaagcagttataa

SEQ ID NO: 39730 - DNA, 954 bp, Neisseria meningitidis
  misc_feature 8, 9, 10, 11, 12: 'n' is a, c, g or t
gtgtgtgnnnnngtactcaatctgacggaaaccgtccgcagcagcctggataagggcgaggcggtcattgttgttgaaaaaggcggggatgcgcttcctgccgacagtgcgggcgaaaccgccgacatctatacgcctttgagcctgatgtacgacttggacaaaaacgatttgcgcgggctgttgggcgtacgcgaacacaatccgatgtaccttatgccgctctggtacaacaattcgcccaactatgccccgggttcgccgacgcgcggtacgactgtacaggaaaaattcggacagcagaaacgtgcggaaaccaaattgcaggtttcgttcaaaagcaaaattgccgaagatttgtttaaaacccgcgcggatctgtggttcggctacacccaaagatccgattggcagatttacaaccaaggcaggaaatccgcgccgttccgcaatacggattacaaacctgaaattttcctgacccagcctgtgaaggcggatttgccgttcggcggcaggctgcgtatgctcggtgcgggttttgtccaccagtccaacggacagagccgtcccgaatcgcgttcgtggaacaggatttacgccatggcaggcatggaatggggcaaattgacggtgattccgcgcgtgtgggtgcgtgcgttcgatcagagcggcgataaaaacgacaatcccgatattgccgactatatggggtatggcgacgtgaagctgcagtaccgcctgaacgacaggcagaatgtgtattccgtattgcgctacaaccccaaaacgggctacggcgcgattgaagccgcctacacgtttccgattaagggcaaactcaaaggcgtggtacgcggattccacggttacggcgagagcctgatcgactacaaccacaagcagaacggtatcggtatcgggttgatgtttaacgacttggacggcatctga

SEQ ID NO: 39731 - DNA, 837 bp, Neisseria meningitidis; identical to SEQ ID NO: 38310

SEQ ID NO: 39732 - DNA, 1116 bp, Neisseria meningitidis
atgatttatcaaagaaacctcatcaaagaactctcttttaccgccgtcggcattttcgtcgtcctcttggcggtattggtctccacgcaggcaatcaacctgctcggccgtgccgccgacgggcgtgtcgccatcgatgccgtgttggcattggtcggcttctgggtcatcggtatgacgccgcttttgctggtgttgaccgcatttatcagtacgttgaccgtgttgacccgctactggcgcgacagcgaaatgtcggtctggctatcctgcggattggcattgaaacaatggatacgcccggtgatgcagtttgccgtgccgtttgccgttttggttgccgtcatgcagctttgggtgataccgtgggcagagctacgcagccgcgaatacgctgaaatcctgaagcagaagcaggaattgtctttggtggaggcaggcgagttcaacagtttgggcaagcgcaacggcagggtttattttgtcgaaaccttcgataccgaatccggcatcatgaaaaacctgttcctgcgcgaacaggacaaaaacggcggcgacaacatcatcttcgccaaagaaggtaacttctcgctgaacgacaacaaacgcacgctcgaattgcgccacggctaccgttacagcggcacgcccggacgcgccgactacaatcaggtttccttccaaaaactcaacctgattatcagcaccacgcccaaactcatcgaccccgtttcccaccgccgtaccattccgaccgcccaactgattggcagcagcaacccgcaacatcaggcggaattgatgtggcgcatctcgctgaccgtcagcgtcctcctactctgcctgcttgccgtgccgctttcctatttcaacccgcgcagcggacatacctacaatatcttgattgccatcggtttgtttttaatttaccaaaacgggctgaccctgctttttgaagccgtggaagacggcaaaatccatttttggctcggactgctgcctatgcacatcatcatgttcgtcatcgcaatcgtacttctgcgcgtccgcagcatgcccagccagcccttctggcaggcggttggcaaaagtctgacattgaaaggcggaaaatga

SEQ ID NO: 39733 - DNA, 195 bp, Neisseria meningitidis
ttgaggcaggcatttcagacggcattccttaaatgcgtgtacctgtggtgttccaaaaggtcgtctgaaagtgcagcttctgcgaagctaaagcgcggtatcaacgaagttaaaatttgcctgaaccttaaaggcagcctgcaccccaatcccctctccccgtgggagagggctaggacgaggctggcaaactga

SEQ ID NO: 39734 - DNA, 807 bp, Neisseria meningitidis
atgaaaagctcttttgtgcaaacgcttaccatcgccggttcggattcgggcggcggtgcgggcattcaggcggatttgaaaacgtttcagatgcgcggcgtgttcggaacgtgcgtcatcaccgccgttaccgcgcaaaataccttgggcgtgtcggcggttcatctcgtcccgaccgaaaccatcaccgcacaaatccaagcaatcagggaagactttgacatccgcgcctacaaaataggaatgctcggcacggcggaaatcatcgaatgcgttgccgacaagctgaaacactgtgacttcggcaggcgcgtactcgaccctgtgatgattgccaaaggcggtgcgccgctgttgcaggattccgccgttgcggcactgacgcgcctgctgcttcccgatacggatgtattgacccccaacctgcccgaggcggaagccctgaccggcgtgcatatcgaaaaccgtaaagatgcggaacgtgcggcaaaaatcctgcttgattacggtgtcaaaaatgtcgttatcaaaggcggacatttgaacggcagcagcagcggacgctgcacggattggctgtttacgcaaaacgaaacgctggaattggacagcccgcgctttccgaccgcccacacgcacggcacaggctgcacgttttccgcctgcattaccgctgaattggcaaaaggctcggacgtttgcgaagccgtacagactgccaaggcctatatcacggcggcaatctcaaaccctttggaaatcggcgcgggacacggcccggtcaatcattgggcgtatcgggactag

SEQ ID NO: 39735 - DNA, 837 bp, Neisseria meningitidis; identical to SEQ ID NO: 38310

SEQ ID NO: 39736 - DNA, 612 bp, Neisseria meningitidis
ttggtctgccgactgaatgcgccttccgaactgggcaaacagcaaaagttgtgggcgtttgccgctgcgctcgggcagcacgacaggattgaggaagtggtggtcggcatgaacaatctgaccgtgttcacccgtttcgataccgatttggcgacgcttgccgatgaattgcaatatgtgtgggaacacaccgccgttacagaccatcagggcaaactggtggaaattcccgtctgctacggcggcgaatacggcccggatttggcggaagtcgctgctttccatcagacggttatttccgaaatcgtccgccgccatacggcgcaaacttataccgtatttatgatgggcttccagcccggtttcccttatctgggcggcttgcccgaagcattgcacacgccccgccgtgccgtgccgagaacgtccgttcctgccggttcggtcggtatcggcggcagtcagaccggtgtgtatccgttcgcttcgcccggcggctggcagattatcggcagaaccgaattacccttgttccgagccgatttgaatccgccgaccctgctggcggcgggtgaccaagtccgctttgttgcagaaaggattgagccatga

SEQ ID NO: 39737 - DNA, 726 bp, Neisseria meningitidis
atgagtgagggaatgatgtctcctgttttgtatttgattcctacgcctttgggtacgcctgacacgccgtgcctgttgccgcatgaacaacaggcgattgtcgggctgacggattttgtcgtggaggcggaaaaaacggcgcgtgcgcatttgaaacatttgggcgtgactacgcctatccgcgagctgaatctgcaaacgttgaatgaacatacggatttgaagactttgccggaattgctgaaacctttgcaagaagggcgcagtatgggcattgtcagtgaggcgggttgcccggctgtggccgatccgggtgcgaatttggtggcattggcgcataaacacggttttgaagtgcgtccgctggtcgggccttccagcctgctgctggctttgatggcttcgggtgcgaacgggcagagttttgcgtttaaaggctatctgccgtctgaaaaaaacgagcggattcaggcttttcgggctttggaacagcgttcgcgccagtgcggcgagacgcagatttttattgaaacgccttaccgcaatgatgcgctgcttgccgatgcggtggaaaacctgcatcctgaaacgcgtttatgcacggctacggatttgaccttgccgacacaggaaatcatcagtcaaacaatcgtgcagtggcgaaaaagaaaagaaatgcccaatctgaaaaaacgcccgacgatttttgtgatgtatgcgggttga

SEQ ID NO: 39738 - DNA, 1443 bp, Neisseria meningitidis
atgcatccgacctattccgccgtacaggcgcggctgctcgaagccaaccgcctttcccccgaactgctcgccaaaagcctgtgcatcatcggcgcgcaccacgtcgattacgccgacatctactgccagcgcaccgcttatgaaagctggcatttggaagagggcatcgtcaaatcgggcagcttccaaatcaatcagggcgtgggcgtgcgcgccgtttcgggcgacaaaaccgcctttgcctacgccgacagcctgtgcatcgattcgataaaccgttccgcccgcgccgtccgcgcgattggggcggcaggcggcaaggtgtccgccaaaatgccgtctgaaacgcgcggcaagccggtttgttccgcgtccgaccccattgccggcctcgattccgccgccaaagtcgcgctgttgaacaaagtggaagcaatcgccaaagccgccgatccgcgcatcgtgcaagtgatggccggtttgacctgcgaatacgatatggtttacctcgcccgtctggacggcaaacacgccgccgacatccgcccgatggtgcgcctgaacgttaccgtcatcgccaaacagggcgaacgccgcgaacagggcagcgcgggcggcggcggacgctacgacttggcttatttcgatgaaaacttggtgcggcagtttgtcgatgccgccgtcaaacaggcactcaccaacctcgaatcccgccccgcgcccgccggcgaaatgaccgtcgttttgggcaacggctggccgggcgtgttgctgcacgaagcggtcggacacggtttggaaggcgatttcaaccgcaaggggaccagcgtcttttccggcagaataggcgagcgcgtcgccgccaaaggcgttaccgttgtggatcaaggcgatattgccggccggcgcggttcgctcaacatcgacgacgaaggcaacgaaacccgccgcaccgtattgattgaagacggcattttagtcggctatatgcaggacgaaaccaatgcccgcctgacgggtacgcaatccaccggcaacggccgccgcgaaagctacgcctccgtcccgatgccgcgcatgaccaatacctttatggaaaatggcagctatgagccggaagaaatcatcgcgtccatcgacaaaggcatttacgccgtcaactttggcggcggacaggtggacattaccagcggcaaatttgtgttcagcgcgtccgaagcatggtgggtggaaggcggcaggctgcaataccccgtcaaaggcgcgaccattatcggcaacgggcccgaagtgctgaaacacgtttcgatgataggcaacgataccgcgttggacagcggtgtcggcgtgtgcggcaaagaagggcagagcgtccccgtcggcgtggggcagccgaccctgcgtatcgatgccgggctgaccgtcggcggcagcgcaatctga

SEQ ID NO: 39739 - DNA, 201 bp, Neisseria meningitidis
atggaaaccatcaccatccctaaagaaaatttcgacgctttgctaaatctcgcaagaaccgccgtcgccctgaacgaaaattttattccaaaaataaattacggagcatccaccataccagcagccggctttgccgcacttaacgagtttggaatagctcgctccaccgtggaatctttggaaattctcaaaattaaataa

SEQ ID NO: 39740 - DNA, 1080 bp, Neisseria meningitidis; identical to SEQ ID NO: 38335

SEQ ID NO: 39741 - DNA, 408 bp, Neisseria meningitidis
atgacttatactactgccaaagccaccgaaaaaataggcatctccgcccacaccctacgtttttacgacaaagaaggtttgttgcccaatatcggacgtgatgaatacggtaaccgctgttttaccgataacgatttgcaatggttgggcttattgcaatgcttgaaaaatacgggaatgagcttaaaagacatcaaacgctttgcggaatgtaccgtcattggcgacgataccattgaagaacgcctttccttgtttgaaaatcaaatagaaaatgtgaagtgtcaaattgccgaattaaaacgctatttagatttgcttgaatacaaattggcgttttaccaaaaagcgaaagcattaggctcggtaaaagctgtaaatttgccgcaaattcctgaaacggcttag

SEQ ID NO: 39742 - DNA, 978 bp, Neisseria meningitidis
atgatttatccgtggcataatgagcaatggcggcagattgcggaacattgggagcgtcgtcccaatgcatggctgtttgtcggcaaaaaagatacggggaaaactacatttgcccgctttgcggcgaaggcactgttgtgcgaaacccctgcaccgggctgcaaaccctgtggcgaatgtatgtcctgccatctgtttggacagggaagccatcccgatttttacgaaatcacccccttgtcggacgaacccgaaaacggacgcaaactgttgcagatcaaaatcgatgccgtcagggaaatcatcgataatgtgtacctgacttcggtacggggcggtttgcgcgtgattctgattcatcctgcggaaagtatgaatgtccaagccgccaacagtttgttgaaagtgttggaagagccgccgccacaagtggtctttttgctggtcagccacgcggcggacaaggttttaccgaccattaaaagccgctgccggaagatggttttgcccgcgccttcccatgaagaggcattggcatatctgcgtgaaaggggtgtggcggaacctgaggaacgtctggctttccattccggagcgccgctgtttgatgaggcggacggtgtccgtgcgttgcggattaaactgttggatattttggcagaaccgaggttgttgaagattttggattacgccgcgcttttcgataaggaaaaacttccgctcgccgtatttgtcgggtggatgcagaaatggctggtcgatttgggattgtgcctgcaacacatgaaacccgtctattatcccgcttatgaagacaggctgcttcagacggcatccggtttccgcccgcgcaatgtatttgcggcggaggatatgctcaaacagcttgccccctacgggtttcatactttaaatgtcaaaatgcagatcgagcatctgctcatcaattatttggaattgaagaaagagaacgggtga

SEQ ID NO: 39743 - DNA, 1497 bp, Neisseria meningitidis; identical to SEQ ID NO: 38207

SEQ ID NO: 39744 - DNA, 1218 bp, Neisseria meningitidis
atgcaacgtcgtattataaccctgctctgcgcggcaggtatggcattctcaacacaaactttggcggcaaatttggaggtgcgcccgaacgcgccggaacgctacacggtcaaacagggcgacaccctgtggggcatttcgggcaaatacctgtacagcccgtggcaatggggccgcctgtgggacgcgaaccgggatcaaatccacaatcccgacctgatttatccggaccaggtattggtgttgcgccacgttgacggcgaaccgcgcctcggcttggaacagacagacggcatccccgtcgtcaaaatgagtccggataaggaagtgtccggatacggtattcccgccatcgatgtcaacttctaccgcatctttatgcggcacccgcaaatcgtttcccgcaaagaaaccgctgccgcgccgcgcctgctctcgggcccggaaggcaggctgctgtacaccaaaggcaccagggtttacaccaaaggcctgaaagagccgggccgctacctgacctaccgaatcaataaaaacatcaccgatccggatacgggtaaattcctcgggcaggaagtcgcattcagcggcatcgtgcgctccctcgactataccgactctgtcctcgaacaacgctcgaaacaggctggagaacggccgaaagacaacgaataccatacccgcacccatcctttgattaccccgctgcgcaccccttcgatacagccgctggtggtcgaaaccgccatttccgaaatacagcagggcgactacctgatgaaaatgccggaagacaccgaccgcttcaacatgatgccgcacgaaccgtcccgcccggttcaggctaaaatcgtttccgtgtttgaaggcacaaggattgccggccagtttcaaaccatcaccatcgacaaaggcgaggcggacggtttggacaaaggcacggttttgagcctctacaaacgcaagaaaacgatgcaggtcgacctctccaacaatttcaaaagcagggataccgtcgagctgatttccactcctgccgaagaagtgggcttggcaatggtttaccgcacctccgaacacctgtcgtccgccatcattttggaaaacatctccgatatttccgtaggcgacaccgccgccaatccgggacgcgatttggacaatataccggatcagggccgcagccgcgtgaagtttggcttcaaccgctccgaataa

SEQ ID NO: 39745 - DNA, 246 bp, Neisseria meningitidis; identical to SEQ ID NO: 38079

SEQ ID NO: 39746 - DNA, 2751 bp, Neisseria meningitidis
ttggaaaaccccgatgcggttgatgaaaaatggaagcagtatttcaccgatttgagcaaacagccggggacggttgctgtcgatgtcgcacacacaccgattcgcgaatcatttgttactttggcgaaaaagaaaattgcatctgccgttgcgggcggtgcggatgaggcaatgctgaaaaagcaagtcagcgttttacggctgatttccgcctatcgtatccaaggcgtgggtgcagcccaacttgatccgctcaaacgtatccccccgcgcgatattgaagccctcgatccgaaattccacggtctgtcagatgccgatatggcgcttcaattcaatatgggcgagggcgattttgccaatcgcggcaaactgcctttgtcccaaatcatcagcaacctcaaacaaacctactgcggccacatcgcattggaatatatctatattcccaataccgaagagcgccgctgggtacgcaattattttgaaagcgtattgtccacaccgcattacaatgccgatcaaaaacgccgtatcttgaaagagatgactgctgccgagactttggaacgttatctgcataccaaatatgtcggtcagaaacgtttcggtgtcgaaggcggcgaaagcgcgattgccggtttgaactacctgattcaaaacgccggtaaagacggcgtggaagaagtcatcatcggtatggcgcaccgtggccgtctgaatgttttggtgaacattttgggtaaaaaacccggagatttgttcgctgagtttgaaggccgtgccgaaatcaaattgcctagcggcgacgtgaaataccacatgggcttcagctccgacatcgccactccacatggtccgatgcacgtttctttggcgttcaacccgtcacacttggaaatcgttaacccggtagtcgaaggttctgcacgcgccaagcagaaacgtttgggcgaaaacggccgcgataaagtcttgcccgtattgattcacggcgactccgcatttatcggtttgggtgtcaaccaagcgacattcaatctgtctaaaacgcgcggttataccaccggcggtacggttcatatcgtcatcaacaatcaaatcggctttaccacttccgatatccgcgatacccgttcaaccgtacactgtaccgatatcgcaaaaatggtttccgctccggttatccatgtgaacggcgatgatcctgagcgtgtttgctttgccatccaagccgctttggattaccgcaaaaaattccataaagacatcgtgatcgacgttgtctgctaccgtaaatggggccacaacgagggcgacgatccgaccttgacccaaccgatgatgtacaaaaaagtatcgcaacacccgggtgcgcgtgctttgtacaccgagcaactgattgccgaaggcgtggtaacccaagccgaggctgacggttacatccaagcctaccgtgatgctttggataaaggcgaacacgtcgagcaaacaacgttgagcaacttccaacgcacacaaattgactggagcaaataccaaggtaaagattggcgcgaacacatcgaaaccggtttgcctgccgcggatattgagcgtcttaccgagaaatttaccgccgtaccggaaggctttgccctgcatccgactgcaaaacgtgtgattgaagcgcgtaaagccatggcatccggcaaacaagccatcgactggggtatggccgaaaccttggcatacgcaagccttgtaaccaaaggtcatggcgtgcgtatctccggtgaggactccgggcgcggtacattctcacaccgtcatgcagtattgcacgatcaaaaacgtgaaaaatgggatgacggtacttatgttcctctgcgccatatgggcgaaggtatgggcgagttcttggttatcgactccattttgaacgaagaagccgtgatggcgttcgagtacggctttgcctgctccgcgcctgacaagctgaccatttgggaagctcaatttggtgacttcgccaacggcgcgcaagtgactattgaccaattcctgtcttcaggcgaaaccaaatggggtcgtttgtgcggtctgaccaccatccttccgcacggctacgacggtcaaggtcccgagcactcttctgcacgcgtagaacgttggttgcaactgtgttctgagaacaatatgcaagtcatcatgccgtctgaagcgtcgcaaatgttccacctcttgcaacgtcaagtcttaggttcataccgcaaaccgctagtgattttcatgtccaaacgcctgttgcgattcaaaggggcaatgagcccgctggaaaacttcaccgaaggttcgactttccgtccggttatcggcgataccgccgaacgcgcaagcaacgacagcgtgaaacgcgtggcattgtgtgccggtcaggtttactatgacttggaagccggtcgagccgaacgtaaactggaagatgatgtcgctattgtccgcgttgagcagctgtatccgttcccatacgacgaggttaaagccgaactggcgaaatatccgaacgcaaaatctgtggtttgggcacaagaagagccgaaaaaccaaggcgcgttctaccaaatccgccaccgcatcgaagacgttatcagcgaagagcaaaaactgtcttatgccggtcgtccaagcagcgcatcgcctgcagtgggctactcaagcaaacacattgctcaattgaaacaattggttgaagacgctttggcattgtaa

SEQ ID NO: 39747 - DNA, 639 bp, Neisseria meningitidis
atgattgtttccattgatgttgatgcacaaaaaacgtttacgccactgtgtcctgacgaactgcccgtgaacgaggggcatttgattgtcgaggagttgaatgctcaagccgctttggcggatttgcgcgtgatgacgaaagatgcgcatcatatggtagcgaaatggcttgtggataaccctgttgatatgttgaagccgacaggtttgcctgatgcggatttgacttgggtggctcatgcgatggtcggtacgcgcggctatgaattattggacggactgccttctgccaaagaatatgattattgcgtttggaaaggtgttgatcctgaattgcatccttacggcgcgtgttttcacgatattgaggaaaaactaagcacagggctgattgaatggctgcgttgtcaaaatacggatacggttattatcggtgggttagctacggattattgtgttaaaacaacggttttgcagttacttaaaggtggtaattggcaggttatcgtcaatgaagcggcttgtcgggggggcattgcgccggataccattgaaacggcatggcaggaaatgagttctgccggtgcagtcatcttaaaaaacgttgaagaaattaaaaaatatattaataatcaataa

SEQ ID NO: 39748 - DNA, 660 bp, Neisseria meningitidis
atgaccacgcccaaactcatcatcttcgactgggacggcacgcttgccgatacgacccaacccatcatcgacaccatgcgccgcagcttcgccgaatgcggttttccgccgcccgaagcggaacgcgtccgcagcctgattggctacagcctgcccgaaatcatccgcgacctgctcgaaatgccgtctgaaaccgccgttgccgacatcgcacgcacctattccgcgcattacctcaatcccaacaaccgcaatatgacgctctttcccgatgccctgccctgtctggacaagctcaaagcacaaggcttccggcttgccgtcgccacgggcaaagggcgggcgggtttggacaacgccatcagccaaaccgccaccggcggctattggctcgccaccgcctgcgcgggggaatatccctccaaaccctcgcccgaaatggtattcggactctgcggcgaactggggttcgacccgaaagaggcattggtcgtcggcgatacggcgcacgacctgcatatggcggcaaacgcaggcgcggcggcagtcggcgtggccaccggcgcacattcgcgcgaacagctccttagcgcaccgcatctcgccgtattggacggtttgtccgaactgcccggttttcttgcacagcattacgcctga

SEQ ID NO: 39749 - DNA, 354 bp, Neisseria meningitidis
  misc_feature 331, 332, 333, 334, 335: 'n' is a, c, g or t
atgagtgagattggtttggtaaagatctattttggaaaagtgcgcgatttatatgaaatcgacgataaacgtatgctgatggtcgcttccgaccgcctgtctgcattcgatgtgattttggacgacccgattccgagcaaaggggagattctgacgcagatttccaatttttggtttaaaaaactggtgcatattatgcccaaccactttaccggtcaaacggtttacgatgttttgcctgaaaacgaagccaaagctttagagaaacgcgccgtcgtggctaaaaagctcactccggtgaaagtagaggcgattgtgcgtggttatctgnnnnncacacacttaattaattaa

SEQ ID NO: 39750 - DNA, 810 bp, Neisseria meningitidis
atgataccgctcaaaatcgccatcgccggcgtcaacggccgcatggggcgcgtattggttgaagccgtcaacaaccatcccgacaccgtcctttccggcgcgctcgaacactcgggctcagaagccctcgggctggacgcaggctacgccgtcggactcaaaaccggcatcgccatttcagacgacgttgacaccgttctcgcacaaagcgacgtactcatcgactttacccgccccgagccgaccctcaaacacctgcaaaaatgcgttgaaaaacaagtcaacatcatcatcggcacaacaggcttcgacgatgcgggcaaagccgccatccaagccgcaggcgaaaaaacaggcgttgtcttcgccgccaacttcagcgtcggcgtcaacctcaccttccacctcctcgacaccgtcgcccgcgtattaaacgaaggctacgacatcgaaatcattgaaggtcaccaccgccacaaagtcgatgcccccagcggcaccgcgttacgcatgggtgaagtcatcgccggcgcgctcggccgcgacctcaaacaatgcgccgtttacggccgtgaaggccacaccggtccgcgcgatccgtccaccatcggctttgccaccgtccgcgcaggcgacatcgtcggcgaccacaccgccctcttcgccaccgacggcgaacgcgtggaaatcacccacaaagccagcagccgcatgacctttgccgccggtgccgtccgcgccgcagtttgggtaaacggcaaaacgggtttgtacgatatgcaggatgtactcgggctgaacaaccgttaa

SEQ ID NO: 39751 - DNA, 246 bp, Neisseria meningitidis
atggtagttatccgtttggcacgcggcggctcgaaacaccgccccttctacaacgtcatcgttactgactcacgcagccgccgcgacggccgcttcatcgaacgcgtaggcttctacaaccccgtagccaacgaaaaacaagagcgcgtccgcctcaatgcagaccgcctgaaccactggattgcacaaggcgcgcaagtcagcgactccgttgcaaaactgattaaagaacaaaaagccgcctaa

SEQ ID NO: 39752 - DNA, 957 bp, Neisseria meningitidis
atgaaagtcctctttatcgccgacccgatggcaagtttcaaaacctacaaagacaccacctacgccatgatgcgcgagatggcaaaacgcggttggcggctgtttcataccttgagcggggaattgtcggttaaaaacggtctggtggttgctgatgcgtctgcttttgagtttctcggcgcacaagacgaccacgacaaaaactggtttgccgccgccgacaaagttcagacggcattgaaagcatttgatgccgtgattatgcgtaccgatccgccgttcgatatgcaatacctctacgccacacagcttctgacgctggcggagcagcagggcgcgaaggtctttaacagcggacaggcgatgcgtgatttcaatgaaaaactggcgattttgaacttcagccgctttaccgcgcccacgctggtaacgacccgttccgccgatgtccgcgcatttttgaaagaacacggcgacatcatcattaaaccgctcgacggcatgggcggtatgggcatcttccgcctgaccgaaaaagaccccaacatcggcagcatcctcgaaaccctgatgcagcttgattcccgcaccattatggcgcaacgctacattcccgaaatcgtacacggtgacaaacgcatcctgattatcggcggcgaagtcgtcccctatgctttggcgcgtatcccgcaaaacggcgaaacacgcggcaaccttgcggcaggcgggcgcggcgtggcgcaggaattgggcggacgcgaccgcgaaattgccgaaacgctcgcccccgaactcaaacggcgcggcatcctgctggccggtttggacgttatcggcagcaacctgaccgaagtcaacgtaaccagcccgaccggattccaagaaattatgaaacaaaaaggtttcgacgtggcggcaatgtttgccgatgccgttgccgcgtggtcggtacgttaa

SEQ ID NO: 39753 - DNA, 942 bp, Neisseria meningitidis
atgaaaaccctgctcctcctcatccccctcgtcctaaccgcctgcggcacactgaccggcatacccgcccacggcggcggcaaacgctttgccgtcgaacaagaactcgtcgccgcatcgtcccgcgccgccgtcaaagaaatggatttgtccgccctgaaaggacgcaaagccgccctttacgtctccgttatgggcgaccaaggttcgggcaacataagcggcggacgctactctatcgacgcactgatacgcggtggctaccacaacaaccccgaaagtgccacccaatacagctaccccgcctacgacactaccgccaccaccaaatccgacgcgctctccagcgtaaccacttccacatcgcttttgaacgcccccgccgccgccctgactagaaacagcggacgcaaaggcgaacgctccgccggactgtccgtcaacggcatgggcgactaccgcaacgaaaccctgctcgccaacccccgcgacgtttccttcctgaccaacctcatccaaaccgtcttctacctgcgcggcatcgaagtcgtaccgcccgaatacgccgacaccgacgtattcgtaaccgtcgacgtattcggcaccgtccgcagccgtaccgaactacacctctacaacgccgaaacccttaaagcccaaaccaagctcgaatatttcgccgtcgaccgcgacagccggaaactgctgattgcccctaaaaccgccgcctacgaatcccaataccaagaacaatacgccctctggatgggaccttacagcgtcggcaaaaccgtcaaagcctcagaccgcctgatggtcgatttctccgacatcaccccctacggtgacacaaccgcccaaaaccgtcccgacttcaaacaaaacaacggtaaaaaccccgatgtcggcaacgaagtcatccgccgccgcaaaggaggataa

SEQ ID NO: 39754 - DNA, 387 bp, Neisseria meningitidis
atggaaaagcaagacaacatcaccccgccgcactatcgaagccgcgccgtggaatgcattgaatttaccgaacggctgaatttctgcatgggtaatgcgtttaagtatgtctggcgtcatcgggaaaagaacggcgcggaggatttgaaaaaggcgcgatggtatttgcagcggcagcttgattcttgtgccgtaatgcatctgttggaacccgaagaatatgcggagttaatggacggtctggaaaaatgcgaattggatgacctgatgcagcatgtactggaagaaattctctatcatgcattttttgaatctgaagacagtctgcttgcggcaatgtgcggtgtttccgaactgttgaagggatacggcgatgagcggacatga

SEQ ID NO: 39755 - DNA, 372 bp, Neisseria meningitidis
atgtcaaaagacaaaaatcaaatcaccgtcggaatcaaccgtgaaatcatcgataccgaaaccgacagttctgccgagtttcacgtcatccgacatgtgtcgctggattatgcaaccggctttaatgtggtgtcgttagacagctatgtgcgcaaatcgacatttgaacgtcgcggacgttcggtcggttcgatgcagttgaatattccgggcgtgccgcctcgcggtacggatgtattggactgggcataccaggctgttgtagcagcggttgaagggggcgcggtcgatgcctacggtcagcctatttccgccaacagcctgaccggcgcggagttggtctatgccgatttgcctgaagcagccatctga

SEQ ID NO: 39756 - DNA, 498 bp, Neisseria meningitidis
atgaataacctccccgttgccgacctcctcgtcttcgccatcatcgccgcctgcatcgtgctatccgcgatgcgcggcgtgattgcggaggcaggttcgatggcggcatgggtggtttccttcttttttgccaaactctttgccgcacccttcgccgacctcgcctttgcctcgttccaaccccgcctgtttgcattggctctgtcgttcatttccctgttcgtcattgcctgtctgatccagaaaatgctccgttcgctgctgaccggcgcagtttcggcggtcggtttgggctttgccaaccgcattttgggcggcgtattcggtgcattgaaaggcattttgattattaccctgctggtcatgctcgcttcaaaaaccgacctgcccgataccgaagaatggcggcaatcttacacactgccgtttttcgtatcgctttccgaagccgtgttgaaccatagcggcggcacggcggaaactccggaagacgattga

SEQ ID NO: 39757 - DNA, 1026 bp, Neisseria meningitidis
ttggtcagtgcgattgatagcttgaaaaaaaatgtcaattataactatgtgaacagctcaaatacgcataccatacaaatcgtccatgttgaaaaaccggaaggtccgattaagattaaaaggggagatacggaaacttcgatatcgaaacaagcaatttggcggttggcagatgcgttgtccacgggggagcctgtcaatgtggacagggtgtttggcgcaagttataactttcgttccgcactggaggcattgcttgcccatacacctgaaatttactggtgcaaattgcagcggatacaaccgggtctgaataaaagcgaggtggtggaagggcacaagcacattatttggcttcccgataggccacatgaaaaaggcgtaatgaaggaatatgagacagatgtcgttatttcggaaatcccctccaacaatgtggtttacgatgctttatcccttccttcaacccattcagaaatagatatagatgtaaaacgccgccacgtgcaaatccagattgccctttcagcaataggttttcaacttggtttcaggacgtggattgcgagaaacgaccaaggtattagttatggggataagaaaattgctgatttggatggtatcgtacaaaagatagaaagcgagaaactgatcagttcgtttgacggcgcggttcaggcggcaatgaatattgattgcatctggttcaggaatggaaaactgatgccggcggtgatggaagtggaacatagtacgggtgtacgttccggccttgcacggatgaagcagttgaaagacctgttgccaccatatgctaatacgcgctgggttatcgttgctcctgatgaagatagggataaagtttttaaagaagcgaatgttccgatgtttaaaaatttagatacccaatattttccttattccgcagttgaagagttgtattccttgtgcattcgccggaaattgacaaataaagctgtcaatgaagaatttttagactgctttatggaaaaatgtgtaatgtaa

SEQ ID NO: 39758 - DNA, 342 bp, Neisseria meningitidis
atggtagaacgtaaattgaccggtgcccattacggtttgcgcgattgggcgatgcaacgtgcgactgcggttattatgttgatttataccgttgcacttttagtggttctattttccctgcctaaagaatattcggcatggcaggcattttttagtcaaacttgggtaaaagtatttacccaagtgagcttcatcgccgtattcttgcacgcttgggtgggtatccgcgatttgtggatggactatatcaaacccttcggcgtgcgtttgtttttgcaggttgccaccatcgtctggctggtcggctgcttggtgtattcaattaaagtaatttgggggtaa

SEQ ID NO: 39759 - DNA, 1287 bp, Neisseria meningitidis
atgagcgcaatcgttgatattttcgcccgcgaaattttggactcacgcggcaaccccacagtcgagtgtgatgtattgctcgaatccggcgtaatgggacgtgcagccgtaccgagcggtgcgtccaccggtcaaaaagaggctttggaactgcgcgacggcgacaaatcccgttattcgggcaagggcgtattgaaggcggtcgaacacgtcaacaaccaaatcgcccaagccctcattggtatcgatgccagcgaacaatcttatatcgaccaaatcatgatcgaattggacggtactgaaaacaaaggtaacttgggtgccaacgcgactttggccgtttctatggccgtagcacgcgcagccgctgaagatgcagggctgccgctttaccgctacttgggcggcgcaggtccgatgtccctgcccgtaccgatgatgaacgtcatcaacggcggcgaacacgccaacaacagcctgaacatccaagagtttatgattatgcccgtcggcgcaaaatctttccgcgaagcgttgcgctgcggtgcggaaattttccacgccttgaaaaaactgtgcgacagcaaaggcttcccgaccacagtcggcgacgaaggcggtttcgcccccaacctgaacagccacaaagaagccctgcaactgatggtcgaggcgaccgaagccgccggctacaaagcgggcgaagacgtattattcgcattggactgcgcctccagcgagttctacaaagacggcaaataccacttggaagccgaaggccgctcctacaccaacgcggaatttgccgaatatctggaaagtctggtcaacgagttccccatcatctccatcgaagacggcatggatgaaaacgactgggaaggctggaaactgctgaccgaaaaactgggcggcaaagtccaactcgttggcgacgacctcttcgttaccaacccgaaaatccttgccgaaggcattgaaaaaggcgtggcaaacgcactattggtcaaagtcaaccaaatcggtactttgagtgaaaccctgaaagccgtcgacttagccaaacgcaaccgctacgccagcgtaatgagccaccgctccggcgaaaccgaagacagcaccattgccgacttggcagtcgccaccaactgtatgcagatcaaaaccggttctttgagccgttccgaccgcatggcgaaatacaaccaactgctgcgtatcgaggaagaattggcggaagccgccgactaccccggcaaagccgcattctaccaactgggcaaataa

SEQ ID NO: 39760 - DNA, 561 bp, Neisseria meningitidis
atgaacagactgctactgctgtctgccgccgtcctgctgactgcctgcggcagcggcgaaaccgataaaatcggacgggcaagtaccgttttcaacatgctgggcaaaaacgaccgtatcgaagtggaaggattcgacgatcccgacgttcaaggggttgcctgttatatttcgtatgcaaaaaaaggcggcttgaaggaaatgatcaatttggaagaggatgcgtccgacgcatcggtttcgtgcgttcagacggcatcttcgatttcttttgacgaaaccgccgtgcgcaaaccgaaagaagttttcaaacacggtgcgagcttcgcgttcaagagccggcagattgtccgttattacgaccccaaacgcaaaaccttcgcctatttggtgtacagcgataaaatcatccaaggctcgccgaaaaattccttaagcgcggtttcctgtttcggcggcggcataccgcaaaccgatggggtgcaagccgatacttccggcaacctgcttgccggcgcctgcatgatttccaacccgatagaaaatcccgacaaacgctga

SEQ ID NO: 39761 - DNA, 966 bp, Neisseria meningitidis
atgagctacacgcaactgacccaaggcgaacgataccacatccaatacctgtcccgccactgcaccgtcaccgaaatcgccaaacagctgaaccgccacaaaagcaccatcagccgcgaaatcagacggcaccgcacccaagggcagcaatacagcgccgaaaaagcccagcggcaaagccggactatcaaacagcgtaagcgacaaccctataagctcgattcgcagctgattcagcacatcgacacccttatccgccgcaaactcagtcccgaacaagtatgcgcctacctgtgcaaacaccaccggatcacgctccaccacagcaccatttaccgctaccttcgccaagacaaaagcaacggcagcacgttgtggcaacatctcagaatatgcagcaaaccctaccgcaaacgctacggcagcacatggaccagaggcaaagtccccaaccgtgtcggcatagaaaaccgacccgctatcgtcgaccagaaatcccgtatcggcgattgggaagccgacaccattgtcggcaaaggacagaaaagcgcattattgaccttggtcgaacgcgttacccgctacaccatcatctgcaaattggatagcctcaaagccgaagacactgcccgggcagctgttagggcattaaaggcacataaagacagggtgcacaccattaccatggataacggcaaagagttctaccaacacaccaaaataaccaaagcattgaaagcggagacttatttttgtcgcccttaccattcttgggagaaagggctgaatgagaacaccaacggactcatccggcaatacttccccaaacaaaccgatttccgtaacatcagtgatcgggagatacgcagggttcaagatgagttgaaccaccgaccaagaaaaacacttggctacgaaacgccaagtgttttattcttgaatctgttccaaccactaatacactag

SEQ ID NO: 39762 - DNA, 897 bp, Neisseria meningitidis
atggagtctgaaaacattatttccgccgccgacaaggcgcgtatccttgccgaagcgctgccttacatccgccggttttccggttcggtcgccgtcatcaaatacggcggcaacgcgatgaccgaacctgccttgaaagaagggtttgcccgcgatgtcgtgctgctgaagctggtcggcattcatcccgtcatcgttcacggcggcgggccgcagatcaatgcgatgcttgaaaaagtcggcaaaaagggtgagtttgtccaaggaatgcgcgttaccgacaaagaggcgatggatattgtcgaaatggtgttgggcgggcatgtcaataaagaaatcgtgtcgatgattaacacatatggcggacacgcggtcggcgtgagcggacgcgacgatcatttcattaaggcgaagaaacttttgatcgatacgcccgaacagaatggcgtggacatcggacaggtcggtacggtggaaagcatcgataccggtttggttaaagggctgatagaacgcggctacattcccgtcgtcgcccccgtcggcgtaggtgaaaaaggcgaagcgttcaacatcaacgccgatttggtagcaggcaaattggcggaagaattgaacgctgaaaaactcttgatgatgacgaatatcgccggtgtgatggacaaaatgggcaatctgctgaccaaactcacgccgaaacggattgatgaactgattgccgacggcacgctgtatggcggtatgctgccgaaaatcgcttctgcggtcgaagccgccgtcaacggtgtgaaagccacgcacatcatcgacggcaggttgcccaacgcgcttttgttggaaatctttactgatgccggtatcggttcgatgattttaggcggcggggaagatgcctga

SEQ ID NO: 39763 - DNA, 777 bp, Neisseria meningitidis
atgaattttatccgttccgtcggggcgaaaaccctcggccttattcaatccctcggcagtattacgctgtttctgctgaacattctggcgaagtccggtacggctttcgtccgtccgcgcctgagcgtgcgccaagtgtattttgccggcgtgctgtcggtgctgattgttgccgtttcggggctgtttgtcggtatggtcttgggtttgcagggctatacgcagttgtcgaaattcaaatccgccgatattttgggctatatggttgcggcttcgctgttgcgcgaactgggtccggtgttggcggcgattctgtttgccagcagcgctggcggtgcgatgaccagcgaaatcggtttgatgaaaacgaccgaacagctcgaagcgatgaacgtgatggcggtaaaccctgtcgcccgcgtggttgcgccgcgcttttgggcgggcgtgttttccatgccgcttttggcttcgattttcaacgtggcgggtattttcggcgcgtatttggtcggtgtaagctggctgagcttggacagcggcattttctggtcgcaaatgcagaacaacatcacgatacattacgatgtaatcaacggtctgatcaaatccgccgcgttcggcgtggcggtaacgctgattgccgtgcatcagggcttccactgcgtcccgacctcggaaggcattttgcgcgccagcacgcgcacggtggtttcgtccgccctgacgattttggcggtcgattttatattgaccgcgtggatgtttacagattga

SEQ ID NO: 39764 - DNA, 288 bp, Neisseria meningitidis
atgacgggatttaatgatgccgccggcgtggcatccgcctccgacatcaaaggcaaatatgttgagaaagttgaagtcaaaaacggcgtcgttaccgccgaaatgaaatcaagcggcgtaaacaaagaaatccaaggcaaaaaactctccctgtgggccaagcgtcaagacggttcggtaaaatggttctgcggacagccggttgcgcgcaacgacaaagccgacaccgacaaaatcgacaccaagcacctgccgtcaacctgccgcgacgcagcatctgccgattaa

SEQ ID NO: 39765 - DNA, 351 bp, Neisseria meningitidis
atggaagccttcaaaaccctaatttggattgttaatataatttccgctttggccgtcatcgtgttagtattgctccaacacggcaaaggcgcggatgccggcgcgaccttcggatcgggaagcggcagcgcgcaaggcgtattcggctctgccggcaacgctaacttcctcagccgttcgaccgccgttgcagcaacatttttctttgcaacctgcatggctatggtgtatattcacacccacacgacaaaatacggtttggacttcagcaacgtacaacaaactcagcaagcacccaaacccataagcaataccgaaccttctgcccctgttcctcagcagcagaaataa

SEQ ID NO: 39766 - DNA, 1185 bp, Neisseria meningitidis
atgggcaaacatattcttttaggtgtaacgggcagtattgcggcgtataagtcttgcgagttggttcgtctgctgaaaaaacaggggcattcggttacggtggttatgagccgctcggcaactgaatttgtttctccgctgacttttcaggctttaagcggcaatcctgtcctgaccgacacgcacggcggcaacggttcaaacggtatggaacatatcaacctgacccggaatgcggatgtttttctgattgcgccggcaagtatgaataccgtggcaaaaatctgtaacggcgtggcagataacctactgaccagtctggcagccgcacggaaatgtccgcttgccatcgctcccgcgatgaatgtggaaatgtggctcaaccctgccaaccaacggaatatcgcacaactggtttcagacggcattactgtctatatgccgggcttgggcgaacaggcttgcggagaaaatggcatgggaaggatgccggaacctgccgaattgctggatttgcttccggacttgtggacaccgaaaattttaaggggcaagaaaatcttgattaccgcaggtgcgacatttgaagccattgaccctgtcaggggcatcacaaatacctccagcggaaaaatgggggtagctttggcgcgggcgtgccgtgccgccggtgcggaagtcagcctgattcacggacagcttcaaaccgaactgcctttcggcatatccgatacggttcaagccgtcagcgctgaagatatgcatcgcgcagtgcatcgtttgattgaaaaacaagatgcttttatttctgttgccgccgtctcagactataaggttaaaaacaggagtacgcaaaaattcaaaaaagataaaaatgccaaaccgttatccatcgaattggatgagaaccccgatattttggcttctattgcctcattgccgaacccgccgttctgcatcggttttgccgctgaaacggagaatgtaatggcatatgcacgagaaaaacgtattaagaaaaaaataccggtaatagttgccaatgatgtttcaatcgcgatgggcaaaccgaccaaccggattaccattatcggggacgacggggaactgtcttttcccgaaacaagtaaagatgaagcggcgatgcagattgttgaaaggcttgccggatatttgaacaaataa

SEQ ID NO: 39767 - DNA, 357 bp, Neisseria meningitidis; identical to SEQ ID NO: 39132

SEQ ID NO: 39768 - DNA, 627 bp, Neisseria meningitidis
atgaggaaaatccgcaccaaaatctgcggcatcaccacaccggaagacgcatcggccgccgtagcggcaggtgcagatgccgtcgggctggtctttttccaaggcagcagccgggccgtcgatattgcccgcgccaaaaaaatcaccgccgcactgccgccgtttgtcagcgttgtcgcccttttcgtcaacgaaagcgcgcaaaacatccgccgcatccttgccgaagtgccgatacacatcatccaattccacggcgacgaagacgacacattctgccgccagttcgaccgcccctatatcaaggccattcgtgttcagacggcatcagacatccgaaacgccgccgaccgcttccccgacgctcaggcactgctgttcgatgcctaccacccttcggaatacggcggcaccggacaccgcttcgactggacgctgctggcggaatattcgggcaaaccgtgggtgcttgccggcgggctgacccctgaaaacgtcggcgaagccgtccgcatcaccggagcggaagcggtcgatgtatccggcggcgtggaagcgtctaaaggcaaaaaagacccagccaaagtcgccgcctttatcgcaaccgccaaccgcctatcccgttaa

SEQ ID NO: 39769 - DNA, 402 bp, Neisseria meningitidis
  misc_feature 379, 380, 381, 382, 383: 'n' is a, c, g or t
atgaaaaccgccattttgattgacggtgcattttttattaagcgggtacggtcattaggcctgtctcaaaatccacacgatgcaaaaagaattgctgatttggctttccgatattcgatgctgcatctgaaagataaaatcaacggcacagatcaaatggatgatttatatagaattttcttttacgactgcgtgccgtttgaaaagaaaatgcacaatcccgtatctcatcgtgccatagatttttcaaagactccggaagccatatttcgttgcaatctgcataccgaattgaagaagaagcgtaaattagcgttacgtttaggcaagctgtcggacaatacagcatggatattaaaaccccaagtcatgaaaaatnnnnncacacacttaattaattaa

SEQ ID NO: 39770 - DNA, 2037 bp, Neisseria meningitidis
atgactgacaacgcactgctccatttgggcgaagaaccccgttttgatcaaatcaaaaccgaagacatcaaacccgccctgcaaaccgccatcgccgaagcgcgcgaacaaatcgccgccatcaaagcccaaacgcacaccggctgggcaaacactgtcgaacccctgaccggcatcaccgaacgcgtcggcaggatttggggcgtggtgtcgcacctcaactccgtcgccgacacgcccgaactgcgcgccgtctataacgaactgatgcccgaaatcaccgtcttcttcaccgaaatcggacaagacatcgagctgtacaaccgcttcaaaaccatcaaaaactcccccgagttcgacaccctctcccccgcgcaaaaaaccaaactcaaccacgatctgcgcgatttcgtcctcagcggcgcggaactgccgcccgaacagcaggcagaactggcaaaactgcaaaccgaaggcgcgcaactttccgccaaattctcccaaaacgtcctagacgcgaccgacgcgttcggcatttactttgacgatgctgcaccgcttgccggcattcccgaagacgcgctcgccatgtttgccgctgccgcgcaaagcgaaggcaaaacaggctacaaaatcggtttgcagattccgcactacctcgccgtcatccaatacgccgacaaccgcgaactgcgcgaacaaatctaccgcgcctacgttacccgcgccagcgaactttcagacggcggcaaattcgacaacaccgccaacatcgaccgcacgctcgcaaacgccctgcaaaccgccaaactgctcggcttcaaaaactacgccgaattgtcgctggcaaccaaaatggcggacacgcccgaacaagttttaaacttcctgcacgacctcgcccgccgcgccaaaccctacgccgaaaaagacctcgccgaagtcaaagccttcgcccgcgaaagcctgaacctcgccgatttgcaaccgtgggacttgggctacgccagcgaaaaactgcgcgaagccaaatacgcgttcagcgaaaccgaagtcaaaaaatacttccccgtcggcaaagtattaaacggactgttcgcccaaatcaaaaaactctacggcatcggatttaccgaaaaaaccgtccccgtctggcacaaagacgtgcgctattttgaattgcaacaaaacggcgaaaccataggcggcgtctatatggacctctacgcccgcgaaggcaaacgcggcggcgcgtggatgaacgactacaaaggtcgccgccgtttttcagacggcacgctgcaactgcccaccgcctacctcgtctgcaacttcgccccacccgtcggcggcagggaagcccgcctgagccacgacgaaatcctcatcctcttccacgaaaccggacacgggctgcaccacctgcttacccaagtggacgaactgggcgtgtccggtatcaacggcgtagaatgggacgcggtcgaactgcccagccagtttatggaaaatttcgtttgggaatacaatgtcttggcacaaatgtcagcccacgaagaaaccggcgttcccctgccgaaagaactcttcgacaaaatgctcgccgccaaaaacttccaacgcggcatgttcctcgtccggcaaatggagttcgccctctttgatatgatgatttacagcgaagacgacgaaggccgtctgaaaaactggcaacaggttttagacagcgtgcgcaaaaaagtcgccgtcatccagccgcccgaatacaaccgcttcaccttgagcttcggccacatcttcgcaggcggctattccgcaggctattacagctacgcgtgggcggaagtattgagcgcggacgcatacgccgcctttgaagaaagcgacgatgtcgccgccacaggcaaacgcttttggcaggaaatcctcgccgtcggcggatcgcgcagcgcggcagaatccttcaaagccttccgcggccgcgaaccgagcatagacgcactcttgcgccacagcggtttcgacaacgcggcttga

SEQ ID NO: 39771 - DNA, 666 bp, Neisseria meningitidis
atgactgcattgggtgaagacgtaacgatgcgcgaagccttccgtgccgccgacaatgtattgcgcgatgcggtcgcaggcatttccgaagtggtaacttgcccgagcgaaatcatcaacctcgactttgccgacgtgaaaaccgtgatgagcaaccgcggtatcgctatgatgggttcgggttatgcccaaggtatcgaccgtgcgcgtatggcgaccgaccaggccatttccagtccgctgctggacgatgtaaccttggacggagcgcgcggtgtgctggtcaatattacgactgctccgggttgcttgaaaatgtccgagttgtccgaagtcatgaaaatcgtcaaccaaagcgcgcatcccgatttggaatgcaaattcggtgcggctgaagacgagaccatgagcgaagatgccatccggattaccattatcgctaccggtctgaaagaaaaaggcgcggtcgattttgttccggcaagggaggtagaagcggttgccccgtccaaacaggagcaaagccacaatgtcgaaggtatgatccgcaccaatcgcggtatccgcacgatgaaccttaccgctgcggatttcgacaatcagtccgtacttgacgactttgaaatccctgcgattttgcgtcgtcaacacaattcagacaaataa

SEQ ID NO: 39772 - DNA, 897 bp, Neisseria meningitidis; identical to SEQ ID NO: 38955

SEQ ID NO: 39773 - DNA, 459 bp, Neisseria meningitidis
atgtcccaagtttttaaagattttgatttgtcctccgtatgggaatccgacagttgggcagatgaaaactacaaagaagccccgtttacccctgaaattttggctgccgtagaaagtgaactgggctataaattgccgcaaagttttattgaattgatggcggtacaaaacggcggaatatttgtcaaaaactgttttccgaccacacagagaaattcgtgggcgaaagatcatgtgcaaatttgcgaggtatcgggaatcggttttgaaaaagaagggagtttgtgcggcgcgatggggcaaaaactttggctggaagaatgggaatacccgcctatcggcgtgtattttgccaacgacccgtcaggcggtcatgccatgtttgccttggactatcgggagtgtggaagagacggagagccgaaagtggtgtttgtcgaacaagaatcggatttttaa

SEQ ID NO: 39774 - DNA, 927 bp, Neisseria meningitidis
atgaaacaccccaaactcacccttattgccgcattgctaaccaccgccgcaactgccgcccccctgcccgtcgtaaccagcttcagcattttaggcgacgtagccaaacaaatcggcggagagcgcgtatccatacaaagtttggtcggagccaaccaagatacgcacgcctatcatatgaccagtggcgacattaaaaaaatccgcagtgcaaaactcgtcctgctcaacggcttaggacttgaagctgccgatgtacaacgtgccgtcaaacagagcaaagtatcctatgccgaagcgaccaaaggcatccaacccctcaaagccgaagaagaaggcggacaccatcacgaccacgatcatgaccacgatcatgaccacgaaggacaccaccatgaccacggcgaatatgacccccacgtctggaacgaccccgtcctcatgtccacctatgcccaaaacgtcgccgaagccctgataaaggccgaccccgaaggcaaagtttattatcaacaacgcttgggcaactaccaaatgcagctcaaaaaactgcacagcgacgcacaagccgcatttaacgccgtccctgccgccaaacgcaaagtcctgaccgggcacgatgccttttcctatatgggcaaacgttaccatatcgaattcatcgccccgcaaggcgtgagcagcgaagccgagccttcagccaaacaagtcgccgccatcatccgccaaatcaaacgcgaaggcatcaaagccgtattcaccgaaaatatcaaagacacccgcatggttgaccgtatcgccaaagaaaccggtgtcaacgtcagcggcaaactgtattccgacgcactcggcaacgcgcccgcagacacctacatcggaatgtaccgccacaacatcaaagccttgaccaacgcgatgaagcaataa

SEQ ID NO: 39775 - DNA, 987 bp, Neisseria meningitidis
gtgtccatccccaccgccaccccgctgcccgccggcgaggtaacgttatcagacgatagcgtcaatatcgtaaacatcaacaccgccaacactgaaacacatccgccgcgccgcaccagacgctccctctatgcctccccgcaaaacacatccgccggtatttccattcagcagcgggaagtagaaaaagactatttcggctataaatcaaaagaaacatctttcatcttccaaacacccggcggcgcgcaatacgccctttcatcttattccgaccccatcgtccccagctattcctcccccgatttcaaaattcccgaccgccacgccgggcagcggcttgccgacggcagccgcatctttatctgctgcagcgactccggggctactacgtatgcggaaattaccaaacaagattatatgaaattcggggcgtggataggccccaacggcgaaatcgacctcttcgccggcggcttccccgtcggcaaaacgccgaaaccggcatactcctggggcgacgacacgcccgaaaccgccggcaagggcaaaatcacttatcaggtttggggcatccgcgtcaaagacgggcaatttgttacctcctcttatacgccgcccaaaggcagctcttttaccggctacaccaacacccccgtcctttcctttatcaccgccaatttcaacagtaacaaactggcaggcaaaatcatcggcaacagcgattacgggccggatgtggaaattaaagaagcacagattgacggattatccttttccggcgatgccacctccggcggcaaaaccggcaagttggaaggcaagttttttggcaaattcgacagcagctatgacagagacaccagcataggcggcaaaatcacctttgacggcgaccgctccctcgataccgtattcggcggtgtgagttataaaaaagaacttgaaaacaacactgatatgagtaccacccatctcacaaaataa

SEQ ID NO: 39776 - DNA, 798 bp, Neisseria meningitidis; identical to SEQ ID NO: 38316

SEQ ID NO: 39777 - DNA, 924 bp, Neisseria meningitidis
atgaaaaaacgcaataatcctcttccgctgttgaacggtgtcaaacccagttatttggtgctgccgcatgaaaagcagttttacgggctgccgctgctgcattttctgtgcatccgctttccttttgtgggcgcggacgattggcgcaggcggttgaacagcggttttgtggtcggttcggatggtgcggcgttggacgaacattctttgttcgagccgggtaaggtggtgttttattaccgtgaaaccagccgtgagagcgagccgcgtattccgtttgaagaaaagattttgcatattgatgagcatttgattgtggtggacaaaccgcattttctgcccgtcatccccagcggcaggtttttgcgggaaaccctgctcacgcgcctgcgtttgcggcctgaattgcagcatttgaatgttgaggacattacgccgctgcaccgcttggacaaggatacggcaggcgtgatgctgctgtcgcataatcctgccacgcgcggagcctatcagacgatgtttcaaaacaaaacggtatggaaaacgtatgaggcgcttgcgccgacaaggacggatttgccgtatccgattgatgtggtttcgcgtttggtaaggggtgagaaattttttacgacgcaagaggcggaaggcgaaccaaacgcacatacgacggtcgaactgattgaaaacaggggggaattcagcctttaccgccttacgccgcataccggcaagaaacaccagttgcgcgtgcatatgatgggtttgggtatgccgctgttgaatgacgcgctctatcccgtgccgtctgaagcgggcagcgaggattatcggaaacctttgaagttattggcaaaaaagattgcgtttgcagatcctttgtcgggtcgggaaagggtgttttgcagtaggttttgcctataa

SEQ ID NO: 39778 - DNA, 345 bp, Neisseria meningitidis
atgctgccgaataaagttttgggtaaatatgattggaatgtggacggaaaaacaggaataggcgcagcatgggttgtcgctgcgtttatcctgcccatattggtgtgggcgatatttatgttgtcgcggatgcaaggctggcttgcgccgaccaaggcaaacccgacatgggcgttggtgtggctgctgatctgcatgccctgcctgctgattgcgtccaaatgtttgggttggaaaggctggcggcgggtggtgaatatttttgcctgcctgaccgtctgcgccatattgagcgtacccgcttcgctgctcatcgcctttaccctccgggacctgctgaaatag

SEQ ID NO: 39779 - DNA, 771 bp, Neisseria meningitidis
atgctgaaacaggctgtaacaggtatgaccaagcaagagcgcatcacgacgcaagcctacaatgagatgaccaaatccgtggcaggttcaaacagcatagtccttaacgatgtccaaggcgatacgaccatcaacaaccatcatacgcatacgcacaaccacagcgatgccgacggcaaagcactgtcgatgaggctcacaccacgccccctgttgtcagaccgtcaggcggcggctttcgcccgtacaggcaaactcacaggcagtttcgacttgtttgcttcggtggtcgccccctcgcagtacacgtttgccgttgccatgcccgacacgtccatgtcgccggttatcgaaaaaggggatttggtggtggtcgagccgcgtatgcgccctgcggacgaggacatcgtgctgattgaactgtccgacaagcggctggtcgtcgcgcaccttgttatcgatattgcgggcaggatgctgatttatcagacgggcaggccgtctgaagcctttgacctgcccgaaggcagcacgattttaggtgtggtgctggagtcaaaaaacggtttatgtccgccgcacaggcaagaaggcgtgttgattcggattaccacccctgatgtgtggacggttggtacgatttccgcttccaaaacgtcgtgtacgcgcccgaccgcagcccggaaatcagccgtatgctttcttcgattttggcaggctacgcgtgggataccgaaaacccgttcgtggcgaaatccgaacaacgcctga

SEQ ID NO: 39780 - DNA, 834 bp, Neisseria meningitidis
atggcaatcgttaaaatgaagccgacctctgcaggccgtcgcggcatggttcgcgtggtaacagaaggtttgcacaaaggtgcaccttatgcacccttgcttgaaaagaaaaattctactgccggccgtaacaataatggtcatatcaccacccgtcacaaaggcggcggtcataaacaccattaccgtgttgtagactttaaacgtaacaaagacggcattcctgctaaagtagagcgtatcgaatacgatcctaaccgtactgccttcatcgcactgttgtgctatgcagacggcgagcgtcgttacatcattgctcctcgcggtattcaagccggtgctgtattagtttccggcgctgaagctgccatcaaagtaggcaacaccctgccgatccgcaacattcccgttggtacgactatccactgtatcgaaatgaaacccggtaaaggtgctcaaatcgcacgttctgccggtgcttctgcggtattgctggctaaagaaggcgcgtacgctcaagtccgtctgcgctctggcgaagtccgtaaaatcaacgtaaattgccgtgcgaccatcggtgaagttggtaacgaagagcaaagcctgaaaaaaatcggtaaagccggtgccaaccgttggcgcggtattcgtccgaccgtacgcggtgttgtcatgaatcctgtcgatcacccgcatggtggtggtgaaggccgtacgggcgaggcccgcgaaccggtcagcccatggggtactcctgctaaaggctaccgcactcgtaataacaaacgcacggataacatgattgttcgtcgccgttactcaaataaaggttaa

SEQ ID NO: 39781 - DNA, 288 bp, Neisseria meningitidis; identical to SEQ ID NO: 38241

SEQ ID NO: 39782 - DNA, 1503 bp, Neisseria meningitidis
atggcaaaagtactcatcgtacccgtatctgccggactggacgcctccgccgccgcacaagcctttgcaaaagcactggacgcacaaattttccaagccgttgacgcaaccgccgaaaccctgctcgcgcaaggcaaaagcgacgactggttcgacgcactggtcggcaaagttgccgcactcgatgccgccaacctcgtcatcgaaggcatcgcgcccgatgccgacaaaatctacctcgcaggcaaaaacgtcgaactggcattgtcccttgacgcggcagccgtcttcgccgtccgttccgacaacgccgatgccgacgaactggcaaatcggctgaaccttgccaaacagttcttcgccgccgcgccgggcgtattggaaggttttgtcgtggacggcgcggcagcctccgttgccgaagcggcagccgaaaaaaccggcctgaccttcttcggttcgagcgacgcgctgaaagacgtatccgtattggcaggccgcgaagcaaaacgcctgtcgccggcgcaattccgctacaacctgatcgacttcgcccgccaagccgacaaacgcatcgtcctgcctgaaggcgcagaaccccgcaccgtccaagccgccgccatctgccacgaaaaaggcattgcccgctgcgtcctgcttgccaaacgcgaagaagtcgaagccgttgccaaagaacgcggtatcagcctgcccgactctttggaaatcatcgatcccgcctcattggtcgaacaatacgtcgagccgatgtgcgaactgcgcaaatccaaaggcctgacacccgaagacgcgcgcaagcaactgcaagacaccgtggtactcggtacgatgatgatgtcgcaaaatgatgtggacggtttggtatccggtgcggttcacaccaccgccaacaccatcctccccgctttgcaactgattaaaaccgcaccgggcgcaagcctcgtgtccagcgtattctttatgctgctgcccaaccaagtcctcgtcttcggcgactgcgcggttaatccgaacccgaccgcgcaacagcttgccgacatcgccatccagtctgccgattccgcaaaagccttcggcatcgacccgaaagtggcgatgatttcctactccaccgtcaactccggcagcggccccgatgtcgataccgtcatcgaagcaaccaaacttgcccgggaaaaacgccccgacctcgccatcgacggcccgctgcaatatgatgcggcaaccgtgccgggtgtgggcaaatccaaagctccgggcagcccggtggcaggacaggcaaccgttttggtcttccccgacctgaacaccggcaactgcacctataaagccgtccaacgcagtgccaacgtcttaagcgtcggcccgctgctgcaaggcctgcgtaaaccggtcaacgacctctcccgcggcgcactggtagaagatatcgtgtttaccatcgccctgactgccgttcaggcaaaacaaatggaaggctga

SEQ ID NO: 39783 - DNA, 579 bp, Neisseria meningitidis
atgaaaacttttgccctgatactggccgacggtcaggcgagccgtatgggaggcgaggacaaggggcttgctcttttggggggtaaggcactgatagatcatgtcatcgacagggtcaggccgcaggtcagccatatcgccatcagcaccaaccggaatttggaagaatatgctcgaagaagtccgcatatttttccggacgcacggcagtggcagcatttcggcccgctttcggcattgtgtaccgcagccaacgatttgcagttggcgactgccgactggcttttggttgtgccgtgcgatatgccgtatctgccgggcgatttggtggcgaggtttgaaaccgtgtcgaaacgcacaccgttgtgcaatgcgttttatgtggaaacaccggtaacgatgcactacaacattatgtatatccgcccacagattctgcaaagcgcgattccctatctgttttcgggtatgaaaacattaagaagctggttgcagcagcaaagggcgcggtcggtcagattcgagtttgacgggcattttgccgacttgaacacgcaaaccgatttgcaggagggataa

SEQ ID NO: 39784 - DNA, 435 bp, Neisseria meningitidis
gtgccactgcctgctccctgccgttttgccaaacctgccgcctcttttttaagtatggctttgctttcctgtcagctttcccacgccgccacggcttatatccccccgaacgattttcaaccgaactgcgacatacgccgactcgggctgacccaaagtcagcacaatgagctgcgtaaaatccgcaccgccttcaaaatggcgggcgacagggcgcgtttgaaggttatgcattccgaacacagccgccgccggtctgtcgtcgaaatcatttcttcggatgtttttaatcggaacgaggcgcgcgattatgtcgaaagccgctatttgtccggtatggattttgcggtggacgaattggaaatccaacaccgcttcttccatatcctcacaccgcaacagcagcaaatgtggctttcttcctgcctcaaataa

SEQ ID NO: 39785 - DNA, 1578 bp, Neisseria meningitidis
atgcgcgccaaccccaaaacacaggcaatgccgtctgaaaccatatccctgatgaaaacacgcagcctaatttcccttttatgcctccttctctgttcatgttcttcatggttgcccccactggaagaacggacggaaagccgtcatttcaatacttccaaacccgtccgcctggacaacatcctgcaaatccggcacacccctcataccaacgggctatccgatatctatctgttgaacgacccccacgaagcctttgccgcccgcgccgcccttatcgaatctgccgaacacagcctcgatttgcaatactacatctggcgcaacgacatttccggccgactgctgttcaacctcgtgtaccttgccgcagaacgcggcgtgcgcgtacgcctgctgttggacgacaacaacacgcgcggattggacgacctcctgctcgccctcgacagccatcccaatatcgaagtgcgcctgttcaaccccttcgtcttacgaaaatggcgcgcactcggctacctgaccgacttcccccgcctcaaccgccgcatgcacaacaaatcctttaccgccgacaaccgcgccaccatactcggcggacgcaatatcggcgacgaatacttcaaagtcggtgaggacaccgttttcgccgacctggacatcctcgccaccggcagcgtcgtcggcgaagtatcgcacgacttcgaccgctactgggcaagccattccgcccacaacgccacgcgcatcatccgcagcggcaacatcggcaagggtcttcaagcactcggatacaacgacgaaacgtccagacacgcgctcctgcgctaccgcgaaaccgtcgaacagtcgcccctctaccaaaaaatacaggcaggacgcatcgactggcagagcgtccaaacccgcctcatcagcgacgaccctgcaaaaggactcgaccgcgaccgccgcaaaccgccgattgccgggcggctgcaagacgcgctcaaacagcccgaaaaaagcgtctatctggtttcaccctatttcgtccccacaaaatccggcacagacgcactggcaaaactggtgcaggacggcatagacgttaccgttctgaccaactcgctacaggcgaccgacgttgccgccgtccattccggctatgtcaaataccgaaaaccgctgctcaaagccggcatcaaactctacgagctgcaacccaaccatgccgtccccgccacaaaagacaaaggcctgaccggcagctccgtaaccagcctgcacgccaaaaccttcatcgtggacggcaaacgcatcttcatcggttcgttcaacctcgacccccgttccgcgcgtctcaacaccgaaatgggcgttgttatcgaaagccccaaaatcgcagaacagatggagcgcacccttgccgataccacacccgaatacgcctaccgcgttaccctcgacaggcacaaccgcctgcaatggcatgatcccgccacccgaaaaacctacccgaacgaacccgaagccaaactttggaaacgcatcgccgcaaaaatcctatccctgctgcccatagaaagtttattatag

SEQ ID NO: 39786 - DNA, 1488 bp, Neisseria meningitidis; identical to SEQ ID NO: 39015

SEQ ID NO: 39787 - DNA, 507 bp, Neisseria meningitidis; identical to SEQ ID NO: 38538

SEQ ID NO: 39788 - DNA, 900 bp, Neisseria meningitidis
atgaaaaccaattcagaagaactgaccgtatttgttcaagtggtggaaagcggcagcttcagccgtgcggcggagcagttggcgatggcaaattctgccgtaagccgcatcgtcaaacggctggaggaaaagttgggtgtgaacctgctcaaccgcaccacgcggcaactcagtctgacggaagaaggcgcgcaatatttccgccgcgcgcagagaatcctgcaagaaatggcagcggcggaaaccgaaatgctggcagtgcacgaaataccgcaaggcgtgttgcgcgtggattccgcgatgccgatggtgctgcatctgctggcgccgctggcaacaaaattcaacgaacgctatccgcatatccgactttcgctcgtttcttccgaaggctatatcaatctgattgaacgcaaagtcgatattgccttacgggccggagaattggacgattccgggctgcgtgcacgccatctgtttgacagccgcttccgcgtaatcgccagtcctgaatacctggcaaaacacggcacgccgcaatctacagaagagcttgccggtcaccaatgtttaggcttcaccgaacccggttctctaaatacatgggcggttttagatgcgcagggaaatccctataagatttcaccgcactttaccgccagcagcggtgaaatcttacgctcgttgtgcctttcaggttgcggtattgcttgcttatcagattttttggttgacaacgacatcgctgaaggaaagttaattcccctgctcgccgaacaaacctccgataaaacacacccctttaatgctgtttattacagcgataaagccgtcaacctccgcttgcgcgtatttttggattttttagtggaggaactgggaaacaatctctgtggataa

SEQ ID NO: 39789 - DNA, 1155 bp, Neisseria meningitidis
atggttgataaaaaaagccctttgattgccgtcagtgtcggcgaagcgtcgggcgacctgttgggggcgcacctgatacgcgccatccgcaagcgttgcccgcaggcgcggtttaccggcatcggcggggaactgatgaaggcggaaggtttcgagagcctttatgatcaggagcggctggcggtgcgcggctttgtcgaagtggtcaggcggctgccggaaattttacggatacgcagggggctggtacgggatttgctgtcgttgaaacctgatgtctttgtcggtatcgatgcgcccgatttcaatttgggtgtggcggaaaagctgaaacgggcgggcattccgaccgtgcattatgtcagcccgtcggtgtgggcgtggcggcgggaacgcgtgggcaaaatcgtgcatcaggtcaaccgcgtgctgtgcctgttcccgatggagccgcagctttatctcgatgcgggcggacgtgcggagtttgtcggtcattcgatggcgcagcttatgcccttggaagacgaccgtgaaacggcgcggcaaactttgggcgtggatgccggcatccccgtattcgccctgctgcccggcagccgcgtcagcgaaatcgactatatggcgccggtgttttttcagacggcattattgttgttgaaacgctatcccgccgcacgcttcctgctgcctgccgcaacggaggcgacgaagcggcgtttggcggaaattttgcagcgttcggagtttgccggattaccgctgacggtaaccgacagacagtctgaaacggtgtgcagggcggcggatgcggtgctggtaacgagcggtacggcgactttggaagtggcgctgtgcaagcgtccgatggtcatcagctacaagatttcgccgctgacttatgcttatgtgaaacgcaaaatcaaagtgccgcatgttggcctgccgaatatcctgttgggtaaggaggctgtgccggagctgcttcaacatgatgccgtaccggaaaaactggcggcggcgttggcggactggtacgaacaccccgataaggttgccgcgctgcaacaggatttcagggcgttgcacctgctgttgaaaaaagatacggcggatttggccgcgcgcgcggttttggaagaggcgggatgttga

SEQ ID NO: 39790 - DNA, 546 bp, Neisseria meningitidis
atgacttatgaaaaactttatgagcttcgccaaacactcagaccgactaccaaagacggtctctatacagataatgaaaaaagtcgagaaatcctaacggttagatggagcggcaacacagaaaatcctaaaaatttctcagctgttgctataggaattaatccaagtaaagcaaatgatgaaagaagcgacaaaacccttacccaacttgcacgtttcttggatatgtacggttttaccaacttcaaaatgttaaatattttttccagttactctacacagcaaacaggaattagggcaaacacccaaaccgatttttccaaatttaaaggatgtttggaagatgctgatatgattattcttgcatggggtacagaccgcggtgcttataaggatgaaaaaaacagaatactggaatttctaaaagcagaaaaatttatggaaaaagtattctgtatttctgaaactggtaattccagcgatacaagacatccgtcaagaattagttatagctatcaacttgtacaatttgaagagtcagcatga

SEQ ID NO: 39791 - DNA, 390 bp, Neisseria meningitidis
atgaatgtgaagataaaatataatcttttagaatattgtgaatatttaggtggtatttttggtgtttataaaaattatttaaatatggatatcaaagatccaaatttaaaaattagattttttgattttttggaagaacttttatcagatggtgttattgaattatgcgattatcgtgaaaatcctccaaaaatattaactggttcgccaaaaacacaggtagatgaattaagaagaatttggccggatatggaagagatgttgctatattttccagataatccttggttttatgtagaacatttttggtggggagcaacttgccctattgaactgacacaattgcctaaaatagaaatttacgaagaacaaatgaaacaaggtaagtaa

SEQ ID NO: 39792 - DNA, 360 bp, Neisseria meningitidis
atgaccgaccgtccgagcctgctgtggataaagccaggacaggctgaaatcatggaatattgcgaacctgaagaagcatccgacccgtacgcaacatacaggcgtgccagcctgatggcgatgctgccgctgtttgttgtgattttggttctgctcaatattgtttttccgcttctggcgcatcccttggcttggctggtgcctgcaggtttcatggttttggtcggcggctttcccttatcgctgccgcttgtggcgctgcttgtcctgacctgctgcattctggcgcattgtccgccattatcccgtcttttgtgctgcccttgcccgaatcatccgatgtctaaaaattctgcctga

SEQ ID NO: 39793 - DNA, 600 bp, Neisseria meningitidis
atgagcgagttggataacatccttgcccataaccggcagtttgtcgagtcgggcgaatatgaaaaatactttaccgacaaataccccgaacgcgggctggcagttttgtcctgtatggatgcgcggattatcgggctgctgcccgacgcgttgggtttgaaaaacggcgatgccaagctgattaaaaatgccggcgcgctggttacgcacccgtggggttcggtgatgcggagtcttttggttgccgtgtttgaattgaaggtcagagagattatggtcatcgcccatcacgattgcggtatgcaggggctgaatgccgaagaattcctcgggcgcgtccgggaaagccggattcccgaagaccgtatcgaaaccctgcgttatgcaggtgtcgacctcgacggctggctgaccggtttcgacaacgtcgaagacagcgtgcgccacacggtggaccttatccgtaaccatccgctgatgccgcgccatatcgccgttcacggactggtcatccatcccgttaccggcaaactgacgctggttgtggacggcagtgtttcagacggcatggacttatcggaaggaatggaaacatcatga

SEQ ID NO: 39794 - DNA, 1188 bp, Neisseria meningitidis
atgaataccttactcaagcagctcaaaccctatccctttgcccgactgcacgaggcgatgcagggcatttccgcgcctgaaggcatggaagccgtccccctgcacatcggcgaaccgaaacatccgacaccgaaagtcattacggatgcgctgaccgcctcattgcacgagttggaaaaatatccgctgactgcgggtctgcctgaactgcgtcaggcgtgtgcaaactggttaaaacgccgttacgatggcttgacagtggatgcggataatgaaattctgccggttttaggcagtagggaggcgttgttttcttttgttcaaaccgtgttgaaccctgtttcagacggcatcaaacccgcaattgtcagcccgaatcccttttatcagatttacgaaggtgcgacacttttgggcggcggtgaaatccattttgccaattgccccgcgccgtctttcaaccccgattggcgtagtatttccgaagaggtttggaaacgcaccaaactggtgttcgtctgctcgcccaacaaccccagcggcagcgtgctggatttggacggatggaaagaagtttttgatttgcaggacaaatatggtttcattattgcctcggacgaatgctattccgaaatctatttcgacggcaacaagcctttgggctgcctgcaggccgctgcacagttggggcgaagcaggcaaaaactgcttatgttcaccagtttgtccaagcggtccaatgttccaggcctgcgttccggttttgtcgccggcgatgccgaactgcttaaaaattttctgctttacagaacctatcacggcagcgcaatgagcattcccgtgcagcgcgcaagcattgccgcttgggatgacgaacagcacgttatcgacaaccgccgcctgtatcaggaaaaatttgagcgcgttattcccattttgcaacaggtatttgacgttaaattaccggatgcctcgttttacatctggttgaaagtccccgatggcgacgatttggcatttgcacgcaatttatggcaaaaagccgctatccaagtattgcccggacgctttttggcacgggataccgaacagggcaatcccggggaaggttatgtccgtatcgctttggttgccgatgtcgcaacttgtgtcaaagctgcggaagacatagtttcactgtatcggtaa

SEQ ID NO: 39795 - DNA, 948 bp, Neisseria meningitidis
atggaatttttcattatcttgttggcagccgttgccgttttcggtttcaaatcctttgttgtcatcccacaacaggaagtccacgttgtcgaaaggctcgggcgtttccatcgcgccctgacggccggtttgaatattttgattcccgttatcgaccgcgttgcctaccgccattcgctgaaagaaatccctttagacgtacccagccaggtctgcatcacgcgcgacaatacgcagctgactgttgacggcatcatctatttccaagtaaccgaccccaaactcgcctcatacggttcgagcaactacatcatggcaattacccagcttgcccaaacgacgctgcgttccgttatcgggcgtatggagttggacaaaacgtttgaagaacgcgacgaaatcaacagtactgttgttgcggctttggacgaggcggccggggcttggggtgtgaaggttttgcgttatgagattaaagacttggttccgccgcaagaaatccttcgctcaatgcaggcgcaaattactgccgaacgcgaaaaacgcgcccgtatcgccgaatccgaaggccgtaaaatcgaacaaatcaaccttgccagtggtcagcgcgaagccgaaatccaacaatccgaaggcgaggcccaggccgcggtcaatgcgtcaaatgccgagaaaatcgcccgcatcaaccgcgccaaaggcgaagcggaatccctgcgccttgttgccgaagccaatgccgaagccatccgtcaaattgccgccgcccttcaaacccaaggcggcgcggatgcggtcaatctgaagattgcggaacaatacgtcgctgcgttcaacaatcttgccaaagaaagcaatacgctgattatgcccgccaatgttgccgacatcggcagcctgatttctgccggtatgaaaattatcgacagcagcaaaaccgccaaataa

SEQ ID NO: 39796 - DNA, 669 bp, Neisseria meningitidis
gtgaaccagcttattttcgactttgccgcacacgactatccgagtttcgacaaattcctcggcacggaaaacgcggaactggtctatgtcctccgacacaaacacggacaattcatttatgtttggggcgaagaaggcgcgggcaaaagccatcttttgcaggcgtgggtcgcacaggcgctcgaagccggcaaaaacgccgcctatatcgatgccgcctccatgccgctgaccgatgccgcgttcgaggcggaatacctcgccgtcgatcaagtcgaaaagctgggcaacgaagaacaagccctgcttttttccatcttcaaccgcttccgcaacagcggcaaaggctttttgctgctcggttcggaatacacgccccagcagctcgtcatccgcgaagatttgcggacgcgtatggcttactgcctcgtttacgaagtcaaacccctgaccgaccaagaaaaaatcgacgcgctcgccagtatggcggcggcacgccaagtaaccgttgattccgaaattttcgaatacctgctcaaacactggcggcgcgatatggacagcctgatgatgatgctcgacacgctggacaactacgccgtcacgatgggcaaacgcatcaccctgccgcttttgcgccagcttttgaaacaacaggaaacccaatga

SEQ ID NO: 39797 - DNA, 1419 bp, Neisseria meningitidis
atgtctattaaaaacgccgtaaaattgattgaagaaagcgaagcccgctttgtcgatttgcgctttaccgataccaaaggcaagcagcaccactttaccgtgcctgcgcgcatcgtgttggaagaccccgaagagtggtttgaaaacggtcaggcgtttgacggttcgtctatcggcggctggaaaggcattcaggcttccgatatgcagttgcgccccgatgcgtctacagccttcgtcgatcctttttatgatgatgcgactgttgtgttgacttgcgacgttatcgatcccgccgacggtcagggttacgaccgcgacccgcgctccatcgcccgccgagccgaagcctatttgaaatcttccggcatcggcgacaccgcctatttcggtcccgaacccgagtttttcgtattcgacggcatagaatttgaaaccgatatgcacaaaacccgttacgaaatcacgtccgaaagcggcgcgtgggcaagcggtctgcatatggacggtcaaaacaccggccaccgccctgccgtcaaaggcggttacgcgcccgttgctccgattgacgcgggacaagacctgcgctccgcgatggtaaacattttggaagaactcggcatcgaagtggaagtgcaccactccgaagtcggcaccggcagccaaatggaaatcggcacgcgcttcgccaccttggtcaaacgcgccgaccaaacccaagacatgaaatacgtgattcaaaatgtcgcccacaacttcggcaaaaccgccaccttcatgcccaaaccaatcatgggcgacaacggcagcggtatgcacgttcaccaatccatttggaaagacggtcaaaacctgttcgcaggcgacggctatgccggcttgagcgacaccgcgctctactacatcggcggcatcatcaaacacgccaaagccttgaacgcgattaccaatccgtccaccaactcctacaaacgcctcgtgccgcactttgaagcgccgaccaaactggcatactccgccaaaaaccgttccgcttccatccgcattccgtccgtgaacagcagcaaggcgcgccgtatcgaagcgcgtttccccgatccgaccgccaacccgtatttggcatttgccgccctgttgatggcgggtttggacggcattcaaaacaaaatccatccgggcgaccctgccgataaaaacctgtacgatctgccgccggaagaagatgcattggtgccgaccgtttgcgcttctttggaagaagcactggccgccctcaaagccgaccacgaattcctcctgcgcggcggcgtgttcagcaaagactggatcgacagctacatcgctttcaaagaagaagacgtacgccgcatccgcatggcgccgcacccgctggaatttgaaatgtattacagcctgtaa

SEQ ID NO: 39798 - DNA, 1098 bp, Neisseria meningitidis; identical to SEQ ID NO: 36189

SEQ ID NO: 39799 - DNA, 723 bp, Neisseria meningitidis
gtgtttcccgacaaatacaagttgagtttgaaagaaaatatttttttggcaaagaaagtattggttgcccaaattcacaacctcagccgttttgagaattgtcagacgaccttattgcagactgagcaaattatccatggcaaaaatgtagcctccgtgtcacttgaagacatccaaaccatcttgaacctgaaacgtgcctatcaatatgtgatttcgcatatttcaaatggcgaaccggtcaatatttcactccttaaaaaaatcaacaacattgttgccaaggacgattctttggcacccggtgatttccgtaccggttcggtcggcgtaacgctattggacggttcccgtcatgccccgaatccagtgaaggaaattgaagtggcccgcgtgttacaaaatatcggactgcaaagcggttcgacgacggaggcagccgtccgttttatgctttattgtatgcggcagcaggttttttgggacggcaacaaacgaacggcaaccttatttgccaacggtctgatgatggcggggggctgcggcatcttggaaatctccgaaatgcagatgccgcaattcaatgaaaaactgtccgcattctatcgctccggcgacgataccgatatttccaagtttgtgtatcaaaattgtatatcgggcatagactatttcggcacgcacgaagatatagatttccccgacccaccaaacatgggctaa

SEQ ID NO: 39800 - DNA, 474 bp, Neisseria meningitidis
  misc_feature 8, 9, 10, 11, 12: 'n' is a, c, g or t
gtgtgtgnnnnnattgccgcaacggcggtcgccttggttgccggtgtggttcaggcggcttttctgtattggaaatataaaaagctggatacgatgcagtgggtcggactggtgctgattgtgatattcggtggcgcaaccattgttttgggcgacagccgcttcattatgtggaagccgagcgttttgttttggctgggcgcgctgttcctgtggggcagccacctcgccggtaaaaacggcttgaaggcgagtatcggcagggagattcagcttccggatgccgtatgggcgaaattgacgtatatgtgggtcggtttcctgatttttatgggtatcgccaactggtttgtgtttacccggttcgagtcgcaatgggtcaactataaaatgttcggctcgactgcactgatgcttgttttctttattattcagggtatttatctgagtacctgtctgaaaaaggaggattga

SEQ ID NO: 39801 - DNA, 924 bp, Neisseria meningitidis; identical to SEQ ID NO: 39636

SEQ ID NO: 39802 - DNA, 1644 bp, Neisseria meningitidis
atggacgaaattcaaatacccaaaaaagtggaattacaaaccaaactagaaaatgaaaagattgttttatcgaaaggttctaccacgattattgttggtgctaatggcacagggaaaacaagattagctgtttatattgaagaacaattaaaggaaaaagcacacagaatttcggctcatagagcattaaaattaaaccctaatgtcaataaaataccagaaaagagtgccaaaacatatctatcttatggtcagaactgggatggaatcgatgtatcaaatagaaaaaattatagatgggataataactcatatactcatttactcaacgattttgattggttattacaatatttattcgctcaacaaaataatattgcggtagcaaataatcaaaagctcaaccgtaatgaaaaagtaaccaattcaaaaacaaagctagatattttgcaagaagcatgggaaacattattaccacacagaaaattacatattacagcagatgatattcaagtctctgctgtagataatgaggaattgtattctgcctcaaatatgagtgatggagagcgagcacttttctatattcttggacaagttttgtcagtagatgacggttctgtcttaatttttgatgagcctgaattacatattcataaatcaattatttcaaatctatgggataaaattgaagaattacgacctgattgttcatttctaatcattacacacgatattgaatttgctgcaactcgagtagctaaaaaatatgttatcagaaattattatccgacccctgcttgggatatttctgaagttcctgaaagtaattttgatgaagaaacaataacgatgattttaggtagccgtaagccaatattatttgttgagggcaacaataatagtttagatattgctacttaccgctattgttatcctgattggaccatcatacccaaaggggcatgcaaagatgtcattcaatcagtatcatcgctgaaaaaattaagtaatgaaatgccattactaaacttaaaatgttcaggtattgtcgatttagatagtagggatgaaagagaaattgaacaattaaataatttgggtatttacattttacctgtatccgaaattgaaaatctttttagcttaactgatgtagcaaaagagatattgaaactaaatcaatattcagatgaagaattactcaataaacttaatggatttaaatccgaactaattaaatatatagataatgaattaaaagacgataaattagacgaatttgttgtaaaacaggttcgacgtaaaattgataattatttaaaaaatattgatttatcctccaaaataacaagtactgatatgaaaaaatcattacttaatgaaatttctactttaacagaacagaaaattgaaacatggatttcagaaattaaaaatgaaattcaaagatgtattgaacagcaagatttggataaattacttactatatatgataataaaggactcttggctaaatcagcttgtgttttaaaaggaatgcgtaacaaacatgaatttgaaagctggataatgagaacattaaaaggaaggaataaagattttattgatgcaatcagacagaaacttccaattctggattaa

SEQ ID NO: 39803 - DNA, 2604 bp, Neisseria meningitidis
atgagcaaaaccgtccgttatctgaaagattaccaaacgcctgcctaccgcatccttgaaaccgacctgcattttgatattgccgaaccgcaaactgtcgtgaaatcccgtttgacggtcgagccgcagagggtgggggagccgctggtgttggacggttcgacgaaactcttgtccgtcaaaatcaacggcgtggcggcggattatgtgttggaaggcgagactctgacgattgcagacgtgccgtccgaacgcttcaccgtcgaagtggaaaccgagatcctgccggcggaaaacaaatcgctgatggggctgtatgcttccggtggcaatctgtttacccaatgcgagccggagggcttccgcaaaatcacgttctacatcgaccgtccggatgtgatgtccaaattcacgaccaccatcgttgcggacaaaaaacgctatcccgttttgctctccaacggcaacaaaatcgacggcggcgagtgttcagacggccgccattgggtgaaatgggaagacccgtttgccaaaccgagctatctgtttgctttggtcgcgggcgatttggcggtcacggaagactgtttcaccacgatgggcggcagaaacgtcaaaatcgagttttacactgccgaggcggacaagcctaaggtcggctttgccgtggaatccttgaaaaacgcgatgaagtgggacgaaacgcgcttcggtttggaatacgacttggatattttcatggtcgtcgccgtgggcgatttcaatataggtgcgatggaaaacaaggggctgaacatttttaataccaagttcgtccttgccgacagccgtaccgccaccgataccgattttgaaggcatcgaatccgtggtcggacacgagtatttccacaactggacaggcaaccgcgttacctgccgcgattggttccagctttcgctgaaagaagggttgaccgtgttccgcgaccaagaattttccggcgaccgcgccagccgcgccgtgcgccgcatcgagaacatccgcctgctgcgccagcaccagttccccgaagacgcaggcccgaccgcccatccggtgcgccccgccagctatgaggagatgaacaatttctacaccatgaccgtttatgaaaaaggcgcggaagtggtgcggatgtatcacaccttgctcggcgaagagggcttccaaaaaggcatgaagctctatttccaacgacacgacgggcaggccgtgacctgcgacgatttccgcgcggcgatggcggacgcgaacggcatcaatctcgaccagttcgccttgtggtacagccaggcgggtacgcccgtcttggaagcggaaggtcgtctgaaaaacaatagtttcgagttaaccatcaaacaaaccgtgccgcccacgcccgatatggcggacaagcagccgatgatgattcccgtcaaagtcgggctgctgaaccgcaacggcgaagcggtggcattcgattatcagggcaaacgcgcaaccgaagccgtgttactgctgaccgaagccgaacagaccttccagttcgaaagcgtaaccgaagccgtcgttccctcgctgctgcgcgggttcagcgcgccagtgcatctgaactatccgtacagcaacgacgacctgctgctcctgctcgcccacgacagcgacgccttcacgcgctgggaagccgcccaaacgctctaccgccgcgccgtcgccgccaaccttgccgcgctttcagacggtattgaactgccgaaacacgaaaaactgcttgccgccgtcgaaaaagtcatttcagacgacctcttagacaacgccttcaaagccctgcttttgggcgtgccgtctgaagccgagctgtgggacggcacggaaaacatcgacccgttgcgctaccatcaggcgcacgaagccttgttggatacaatcgccgtccgcttcctgccgaaatggcacgaattgaaccgtcaggcggcgaagcaggaaaaccaaagctacgagtacagccccgaagctgccggctggcgcacgctgcgcaacgtctgccgcgccttcgtcctgtgcgccgaccccgcgcacatcgaaaccgttgccgaaaaatacggcgaaatggcgcaaaacatgacccacgaatggggcatcctgtccgccgttaacggcaacgaaagcgatacgcgcaaccgcctgctggctcagtttgccgacaagttttcagacgacgcgctggtgatggacaaatatttcgccctcgttggatcaagccgccgcagcgacaccctgcaacaggttcaaaccgccttgcagcatccgaagttcagcctcgaaaaccccaacaaagcccgctcgctcatcggcagcttcagccgcaacgtaccgcattttcacgcagaagacggcagcggctaccgcttcatcgccgacaaagtcatcgaaatcgaccgctttaacccgcaggtcgccgcccgcctagtgcaggcgttcaatctctgcaataagctcgaaccgcaccgcaaaaacttggtgaaacaagcattgcagcgcattcgggcgcaggaaggattgtcgaaagacgtgggcgaaatcgtcggcaaaattttggattga

SEQ ID NO: 39804 - DNA, 1509 bp, Neisseria meningitidis
atgcaaaccgattgcgacgtattgattgccggaaacgggctggcggcactgacgctcgccctgtcgctgcctgaatcgttccgcatcgtcattttgtgcaaaaaccggctggacgacaccgccagccgtcatgcacaaggcgggattgcggcggcgtggtcgggagaggacgacatcgaaaaacacgttgccgatactttggaagcgggcgcaggtttgtgcaacgaagccgccgtccgcaccatcctgtcgcagggcaaaccggcaatcgaatggctgctggcgcagggcgtggcgttcgaccaaaataataacggcctgcacctgacgcgcgaaggcgggcacacctgccgccgaatcgcccacgtcgccgactacacgggcgaagccgtcatgcagagcctgattgtccaaatacgccgtcgcccgaacatccgcgtttacgagcggcagatggcgttggacgttcaaaccgaatcgggtgcagcgtgcggactgaccgtcctcgactgccgaacgcaagaaacctacaacatccgtgcccgccataccgtactcgcaggcggcggcttgggacagatttacgcctccaccactacgccgcccgaatgcacgggcgacgccatcgccatggcgatacgcgcaggctgcgcagtcgaaaacctcgaatttatccaattccaccccacaggcttggcaagaccgtctgaaaacggacgcaccttcctcatttccgaagccgtgcgcggcgaaggcggcatcctgaccaaccaatcgggcgaacggtttatgccgcattacgaccgccgcgccgaactcgcgccgcgcgacatcgttgcccgcgccattgccgccgaaatctccaaacaaacgcaagacttcgtctcgctcgacatcagccgccaacccgcagagttcgtccgccggcatttcccgtccatccatcggcactgcctgtcccaatgcggcttggacatcacgcgacaagccatccccgtccgccccgttcaacactacacctgcggcggcatccaaaccgaccccggcggcagaacctccctgccgcagctctacgccttaggcgaaaccgcctgcacagggctgcacggagccaaccgcctcgccagcaactccctgctcgaatgcgtcgtgaccgccaaacttgccgcccaaaccatcgcggacgggcaagcgttccaaaccgcaccgccccaaaggccgtctgaaaacccattctctgaagcaaacatcttttcagacggcatccaaaacacattcagccgccccgccctgcaagcgttcaaccaacgccatctcggcatcctccgcaacgataccggcctgcgccgcgccatcgcccaactgcggctttggaagcaaaaccaaaccgaaccgcacaccgtgtccgaatacgaaaaccgcaacctgctcgaatgcagcctcgccgtcgcccaagccgcatacaggcggagacagaacatcggcgcgcattttaatagtgattgttaa

SEQ ID NO: 39805 - DNA, 1839 bp, Neisseria meningitidis
atgtgcggtatcgtcggcgctatccgcgcccatcacaatgtcgtcgattttctgaccgacggtctcaaacgcctcgaataccggggttatgattcatcaggcattgccgtcaacaccgacggcaacatcaagcgcgtgcgccgtgtcgggcgcgtgcagttaatggaagatgcggcgcgtgaaaagcatttgaacggcagtttgggcatcgggcatacgcgctgggcgacacacggcggcgttaccgagccgaacgcccacccgcacatcagcggcggtatgattgcggtcgtgcacaacggcatcatcgaaaactttgaaagcgaacgcaaacgtttggaagatttgggataccgttttgaatcgcaaacggataccgaagtcatcgcccacagcatcaatcacgaatacgcgcaaaacggcggcaggctgtttgaagccgtgcaggaagcggtcaaacgtttccacggcgcatacgccatcgcggttattgcccaagacaagcctgatgaattagtcgtggcgcgtatgggctgcccgcttttggtcgctttgggcgacgatgaaacctttatcgcttcggacgtatccgccgtcatcgcctttacgcgccgcgtggcgtacctcgaagacggcgacatcgcgctgctggcttcagacggcatcaaaaggctgaccgataaaaacggcctgcctgccgaacgcaaagtcaaggtatccgaactctcgctcgcctctttggaactgggaccgtacagccactttatgcaaaaggaaatccatgagcagccgcgcgcgattgcagacacggcggaggttttcctcgacggcggcttcatccccgaaaacttcggcaaaaacgccaaaagcgtgtttgaaagcatccgcagcgtcaaaatccttgcctgcggcacgtcctattacgccgcgctgaccgccaaatattggttggaatccatcgccaaaatcccggccgatgtcgaaatcgccagcgaataccgataccgcagcgtgattgccgatccggaccaactggtcattaccatttcccaatccggcgaaacgctggacacgatggaggcgttgaaatacgcaaaatccttgggacaccgccacagcctctccatctgcaacgtgatggaatccgccctgccgcgcgaaagcagcctcgtgctttatacccgtgccggtgcggaaatcggcgtcgcctcaaccaaagcatttaccacgcagctggttgcgctgttcggtttggcggtaacgctggcgaaagtgcgcggtttggtttccgaagaagacgaagcacgttacaccgaagaactccgccagcttcccggcagcgtgcagcacgctttaaacctcgaaccgcaaattgccgcctgggcgcaacagtttgccaagaaaaccagcgcgctgtttttggggcgcggcatccattacccgattgccctcgaaggcgcgttaaaactgaaggaaatcacctacatccacgccgaagcctatcctgccggcgaactgaagcacgggccgcttgccttggtggacgaaaacatgcccgtcgtcgtcatcgcacccaacgacagcctgttggacaaagtcaaagccaatatgcaggaagtcggcgcgcgcggcggcgaacttttcgtctttgccgacctcgacagcaattttaatgccaccgaaggtgtgcacgttatccgcgcaccgcgccacgtcggcaaactgtcccccgtcgtgcatactatccccgtgcagctcctttcctaccatgtcgccctcgcacgcggcaccgatgtagacaaaccgcgcaacctggcgaaatccgttacggtcgaataa

SEQ ID NO: 39806 - DNA, 321 bp, Neisseria meningitidis
atggatgatgttcgcggcatcgtccaaggtgcggttaatccttttttaatgggttttcagggattgggagttggggcaattacagacagtgcggtaaacccggtaacctatgcggcagcacggaaaactttacagggtattcacaatttaggaaatttaagtccggaagcacaacttgcggctgcaaccgcattacaagacagtgcttttgcggtaaaagacggtatcaactctgccaaacaatgggctgatgcccatccgaacattacagctactgcccaaaccgcccttgccatagcagaggccgcaactacggtttga

SEQ ID NO: 39807 - DNA, 354 bp, Neisseria meningitidis
atgcctgaaatcaaaattttccacaatccgcgttgcagcaaatcgcgtgccgccttgtccctattggaagaacgcggcattgctgccgaagtggtcaaatatttggatacgccgcccgacttgtccgaattgaaggatattttcaacaaattgggcttggcatcggcgcgcgggatgatgcgcgtgaaagatgatttgtataaggaattgggtttggacaaccccaatttggacaaggacgcgctgctgcgtgccatcgccgatcatcccgccctgttggagcgtccgattgttttggcacacggtaaggcggctgtcggcagaccgctggaaaatatcgaagcggtattgtga

SEQ ID NO: 39808 - DNA, 411 bp, Neisseria meningitidis
atgattgaatttgtccgagccaaaaaacggctgctttgggcatttgtgcttttgcttgtgtggacgtgcggttaccgatacgccgccgacaaggctgaagcggaacaaaccgccctgattgccacctatcggcattcttctatggttgcggcggaacaatatgccttgcagcttaaaaaagcgcaggacgaaaggcagcggtggtacgacttttcccaaaaacaaggaagaaagcccgtgaaaaaacagtatccgccgcaaacgaaaaaagccggctatctgaaaaccaaggaagaactgcttgcggaattggcttgccttacagcggaaatggctgccctaaaaaagcccgatgccttaatccatgggaaagaagtgcggcagaaagaacgcaactcgtcgcagggttaa

SEQ ID NO: 39809 - DNA, 954 bp, Neisseria meningitidis
atgaatcagaagaaagtagtcgtattggatgcggatactttacccggtcggacttttcacttcgatttcccacacgagcttgcggtttacggtacgacagatgctgcggaaacggcaggacgggtgcgcgacgcgcatattatcatcaccaataaagtgatgatttcagcggatatcattgcacacgctccgcaacttgaattgattgccgtcagtgcgaccggtgtgaacaatgtcgatattggggcggcgaaggcggcgggcgttgcggtatgcaatgtccgcgcctacggaaacgaatcggttgcggaacacgcctttatgctgatgattgcgttgatgcggaatttgcctgcctatcagcgtgatgttgcggcaggattatgggagaagtcgccgtttttctgccattacggcgcgccgattcgggatttgaacggtaaaacgctggcggttttcggacgtggcaatatcggacggacgcttgccggatacgcgcaggcattcggtatgggggtggtgtttgccgaacacaaacacgcgcccgacgtgcgcgaaggctatgtttcctttgaagatgcggtacagactgccgacgtgttgtcgctgcactgtccgctaaacgcccaaactgaaaatatgataggcgaaaacgaattgcggcagatgaagcctggcgcggttttaatcaattgtgggcgcggcgggctggtggatgaaaacgcgctgcttgccgcactcaaatacgggcagatcggtggggcgggtgtcgatgttttgacggaggagccgccaaggggcggcaatcccttgctgaatgcacgattacccaatctgattgttacgccgcataccgcgtgggcgagccgcgaggctgtggacaggctgtttgatatattgttggcgaacattcacgcctttgtgaaaggcgaggcacaaaatcgggtggtttga

SEQ ID NO: 39810 - DNA, 531 bp, Neisseria meningitidis
atgaacgcaatccgaactttccaaaaccgcacgcccgaaatccacgaaagctgtatgatagacgaagcgtgcgtcgtcatcggcgaagtgtcgcttgccgaagacgtttccgtgtggccgtgcgccgtgttgcgcggcgatgtgaacagcatcaccgtcggcgcgcgcagcaatatacaggacggcagcgtcctgcacgtttcccacaaaaccgccgccaaacccgaaggatcgccgctggttatcggcgaagacgttaccgtggggcacaaagtgatgctgcacggctgccgaatcggcaaccgcgtcctggtcggcatggggacgacggttctggacgatgccgtgattgaggacgaagtgatgatcggcgcgggcagcctcgtgcctccgcgcaaacgtttggagggcggctatctttatgtcggttcgccggtcagacaagtgcgcgtgttgaccgatgaggaaaaagcctttttgaagtattccgccgcgcattatgtgaagctgtcgaaacagtacgggatgtga

SEQ ID NO: 39811 - DNA, 279 bp, Neisseria meningitidis; identical to SEQ ID NO: 38900

SEQ ID NO: 39812 - DNA, 933 bp, Neisseria meningitidis; identical to SEQ ID NO: 38585

SEQ ID NO: 39813 - DNA, 426 bp, Neisseria meningitidis
atggcgattgaacgtaccatctccatcatcaaacccgatgccgtcggcaaaaatgttatcggcaaaatatacagccgctttgaggagaacggtctgaaaatcgttgccgccaaaatgaagcagcttactctcaaagaggcgcaagaattttatgcggttcataaagaccgccccttctacgccggattggttgaatttatgaccggcggtccggttatgattcaggtattagagggtgaaaacgccgtcctgaaaaaccgcgaactgatgggtgcaactaatccttccgaagccgccgaaggcacgatacgcgcggactttgccacttcggtcagcattaatgccgtacacggttccgacagcgtggaaaatgccgctttggaaattgcctactttttcagccaaaccgaaatctgcccccgttga

SEQ ID NO: 39814 - DNA, 330 bp, Neisseria meningitidis
atgtcccgatgttgtctgaagcggcttcagacggcatcggctgtttcggcgttctccggcggcgttttggaggtggtaagattgtgctgccggcggctatccgtccttttcaatccgagcgtgatgctgtttgtgccggactgtcccgtcggcggcgcggccgggtttttccaatatgaaatgctttgcccgtttttctggcaggggcggttgcagaccggttcgaatcttgcttacgatgtttttatgtctgccggacgtttgaatggcgggcggaaccccccgcacagccgccgttttcttgccctgctttgctccgttgccttataa

SEQ ID NO: 39815 - DNA, 1746 bp, Neisseria meningitidis
atggaacggcagacagatgaatttgcccaagcggcggcaagggcggcaatctggtttttggcacgctatgcgggttcaggcagcgaagtgcttgcaaactgcaccgaacgcctgtttcaggcattgcaaaacggtcattcgtttatccgtttgagcggtggcgaggctgacgcgctgtcggcactcgcacccgtggtcggaacatccgccgcgcctttgattttggaaggcagaaggctgtttttgggcaggatgtggcagttggaatacgatttggctgccgagataaaacgcttggcggcagccgacacgtccgcccccgacgcggcaggcgcgcggcaaaacctcgcaaaatggtttcaaggcacgggcagcgaagggcagcgcgatgccgccgccttggcactgttgcagccttttatggtgattaccggcggacccgggacgggtaaaacgacgacggttgccaaactgctggcgctgatttgcggtgaagacgaaaatcttcccaacatcgcgcttgccgcaccgacgggcaaagcggcggcacatatggcgcgcgcgctgcaccgtgcaatcaacggttttgacgcgccggaggccgtccgccgccatttgctcaaactggaagggcaaaccgtccaccgactgctgaagctgcgcccgcccaaaatgcaggcggcgttcaaccctgtttacccgctgccgtttgacgtattggttatcgatgaagcctctatgctggatacggcattgatgctgcaacttttaaaagcggtcaaaaccggcgcgcgcgtgattctgctgggggatgaaaaccagctcccgtccgtcggaataggggcggtgctgtccgttttgtcacaaaaaaccgttttggacggagaaacgcaccaaaggctggccggcttccttccggaacacggtttcagcgtcagcgcaaatccacccgtgttggcgcaaaacaccgcccatctgtcgttcagccaccgcttcggcgacaacagcggcatcggctgccttgcccgtgccgccgtatcgggcgatgaaggggcgtgggcattgtttgaccggtttccggacgaactggaacattcggaatgcagtccgaacgctcgagtcgaaaggttgtaccgggcacacaaagcctattggcaggcggtaaaagacggcaatatcgaagccgcatacgcgggcatttcggatatcgtggttctggcagcttggcggcaggatgcggaagacttcaacgaagcctattgccgccatgtacgccgcaaaatgaacataccggaacatttggcatattttgccggagagccgattatgatcaggcagaacgactacgcgcttgaactgttcaacggcgacatcggactgattatggaagatgtcggacggcagggcagccttgccgcctattttgccgatgcggacggatttaaaaaggtagcggtaagctgcctgcccgaatttgaacccgcattcgccatgaccgtccacaaaagccaaggttcggaataccgggaagtctggctgctgccgccttccgccgcaccttcggacgaaggggacgatgcattgtccggattgagtaaggagctgttatataccgccattacccgcgcgagagagaagttcgtattcttcggcggggaagaagccttccggcaagctgccgccaccgtcaaaacgcgtcagacggcattgggcagtatgctcgagcgggtattttcacaagaataa

SEQ ID NO: 39816 - DNA, 210 bp, Neisseria meningitidis
atgtatgatgttttcaaaacgcgtgcggcagagttgtcgggcgcgttttgtagtttggatttttggttgtgccataaatttgtgccattgtgccatgctctgtgccattttttaacccgccgcgatattgatacgctgattgaggaaggcttggtggaagagcgttttgagcaaggcgtcagtaaattttatgcaaaagaggccgtctga

SEQ ID NO: 39817 - DNA, 414 bp, Neisseria meningitidis
  misc_feature 395, 396, 397, 398, 399: 'n' is a, c, g or t
atgcaaaccgcaaacaaaaaaaccatcctcgttaccggcggcgcgggctttatcggctctgccgttgtccgccatatcattcaaaacacccaagattccgtcgtcaacctcgacaaactgacctacgcgggcaatctcgaatcgctgaccgacattgccgataatccccgctatgctttcgagcaagtggacatttgcgaccgcgccgaactcgaccgcgtattcgcacaacaccggcccgatgccgtgatgcacttggcggcggaaagccatgtcgaccgctctatcggttcggcaggcgagtttatccaaaccaatatcgtcggcacattcaatctgcttgaagcagcccgcgcctactggcaacaaatgccgtctgaacagcacgaagcctnnnnncacacacttaattaa

SEQ ID NO: 39818 - DNA, 789 bp, Neisseria meningitidis
atgctcaccctatacggagaaactttcccttcacggctgctgctcggcacggctgcctacccgacccctgaaatcctcaaacaatccgtccgtatcgcccaacccgcgatgattaccgtctcgctgcgccgcacgggaagcggcggcgaggcgcacggtcaggggttttggtcgctgcttcaagaaaccggcgttcccgtcctgccgaacacggcaggctgccaaagcgtgcaggaagcggtaacgacggcgcaaatggcgcgcgaagtgtttgaaaccgattggattaaactcgaactcatcggcgacgacgacaccttgcagccggatgtgttccaacttgtcgaagcggcggaaatcctgattaaagacggcttcaaagtgctgccttattgcaccgaagacctgattgcctgccgccgcctgctcgatgtgggctgtcaggcgttaatgccgtgggcggctccgatcggcacgggtttgggcgcggttcacgcctacgcgttgaacgtcctgcgcgaacgcctgcccgacacgccgctgattatcgacgcgggcttgggtttgccctcacaggcggcacaagtgatggaatggggttttgacggcgtgcttttgaatactgccgtttcccgcagcggcgatccggtcaatatggcacgcgccttcgcactcgccgtcgaatccggacggctggcatttgaagccggaccggtcgaagcacgcgacaaagcgcaagccagcacgccgacagtcggacagccgttttggcattcggcggaatattga

SEQ ID NO: 39819 - DNA, 1503 bp, Neisseria meningitidis
atgcaagtaaatattcagattccctatatactgcccagatgcgtgcgtgctgaagacaccccctacgcttgctatttgaaacagctccaagtcaccaaagacgtcaactggaaccaggtacaactggcgtacgacaaatgggactataaacaggagggcttaaccgaagcaggtgcggcgattatcgcactggccgttaccgtggtcacctcaggcgcgggagccggagccgcactgggcttaaacggcgcggccgcagcggcaaccgatgccgcattcgcctcgctggccagccaggcttccgtatcgctcatcaacaataaaggcgatgtcggtaaaaccctgaaggagctgggcagaagccgcacagtgaaaaaactggttgtagcagcggccatcgcaggcgtatccaacaaaatcggtgcttcctcccttgccacttggagcgaaaccccttgggtaaacaacctcaacgtcaacttggctaatgcgggcagtgccgcgctgattaacaccgccgttaacggcggcagtctgaaagacaatctggaagcgaatatccttgcggctttggtgaatactgcgcatggagaggcagcaagtaaaatcaaacaattggatcagcactacattgcccataagattgcccatgccatagcgggctgtgcggctgcggcggcgaataagggcaagtgtcaggacggcgcgattggtgcggtcgtgggggagattgtcggggaggctttggttaagaataccgatttcagcggtatgactgcttctgaaattgaaaaagctaaagcgaatattactgcgtatgcaaaattggtagccggagcgactgtaggtgttacaggaggcaatgttgatgtggcggcaaatgcttccgaaacagctgttaaaaataatgcattagatattatttgggatatcggcaacctcgtatgggacggcggtaaatggatttacgccaaatctattggcgataagcagatggctcgagaagcggcgattgattttggtgtggatgccgccgcagctgccgttccctttgttccggcaggtgcgactaaaatcagccgaggcggggcttatgttctgaaggcgggagacgaagcagttgatacggctaaagccatacaggaaattcagaagcagaccggaatcaagcttacttatgataaggttaataaggtttggacaacaccggcggggttagattatgggttagatgctaagcatggtaataggattaaacatgttttagcccatacaattccaaatccaaacaaacctgttcattctgtttttaatgtgtcccgtaaagaagttttgcctttggttgatgaagcttggagaatgaaaggaaatcctttgccaaatgattcatccgtatatcttgtagatatgaagaaacctattggaacaaaaggagaaacaaaagtgcggattgttgtgcaaaaaggaacaaataaaatcatttctgcatatcctcagaaataa

SEQ ID NO: 39820 - DNA, 4128 bp, Neisseria meningitidis
atgacctaccccatccccaaaccccgtgaaaaatcccgttggcccaatctttcgcaaggctcgctgcccttggctttggtgcgttatctgccgcacaagcggctcaaggtcgtgctgacccaagatgcggaacaggcgttgcgccttcagacggcatggcggtttttccgtccgcacgacacggcggtgttcttgccggactgggaaacgctgccttacgagcgtttttctccgcatcaggatttggtgtcggagcggctctcggcgttgtggcagattaagagcggcgcggcggacgtgttgtttgtaccggttgccacggcgatgcagaagctgccgcccgtgccgtttttggcggggcgcacgttttggctgaaaacaggacagactttggatataggccgtctgaaaaccgatttggtagatgcgggctacaaccatgtttcccatgttgttgcggcgggcgagtttgccgtgcgcggcggcattgtcgatttgttccccatgggcagcgaaatgccctaccgcatcgatttgtttgacgatgaaatcgacagcatcaaaacctttgatacggacacgcagcgcaccatctcccccgtttccgaaatccgcctgctgccggcgcacgaattccccaccgacagcgaggcgcaaaaaatcttccgcagccgcttccgcgaggaagtcgatggtaatccgaacgatgcggctgtatacaaagcagtaagcaacggccacttcggtgcgggcgtggaatattacctgccgctgttttttgaaaacgagctggaaacgctgtttgactatatcggcgaagacgcgctgtttgtctctttgggcgatgttcacgccgaggcaaaccgcttttggagcgacgtcaaatcgcgttacgccatggcgcagggcgacgaaacctatccgcctttgcttccacagcatttgtatctctctgccgatgtttttgcaggccgtctgaaaaactacggacaggtgctgcccgatgtttccggcaaggaacacgccctccccgaccttgccgtcaaccgacaatccgacgagcctttgcaggcattgaaggattttcagacggcgtttgaaggacggattttgctgtgcgccgaaagtttgggacggcgcgaaaccatgctcggcttcttgcagcaaaacggtttaaaagccaaaagcgtgtctgattggcaaggcttcttgtcggcacatgagccgctgatgattacagtggcaccgttggcttacggattcaaactgggcggattgcaatccccgaaccagcagcaaactacttccgcctccgaaggagaaggcgatgcggttaccgaccaaaccgaattttccgcatccgcaacaaaccctctccctagccctctcccacaggagagggaacaaagtgcagccgccgtttcagacagtctgaaagcagccgccgtttcaaccgaaagcagcctgcccctcggtacaagtaatctgcacgggcaaatccgacagcaacctgccccttcccccgtgggggagggttggggagagggcaaagcagttgccgctcaaactgaattttccgcagccgcaacaaaccctctccctaaccctctcccgcaggagagggaacaaagtgcagccgccgtttcagacgacctgaaaaccaaaagcagcctgcatcccgtcgcaaataatctgcacgggcaaatccgacagcaacctactccctcccccgtgggggagggttggggagagggcaaagcagttgccgctcaaaccgaattttccgcagccgcaacaaaccctctccctagccctctcccacaggagagggaacaaagtgcagccgtcgtttcagacagtctgaaagcagccgccgtttcaaccgaaagcagcctgccccccggtaaaagtaatctgcacgggcaaatccaacagcaacctgccccctcccccgtgggggagggttggggagagggcaaagcagttgccgctcaaagtgccatcgccgtcatcaccgaatccgatctctaccaatacgtcgcccgttcgcgcgtccacaaccgccgcaagaaacacgccgccgtttcagacggtctgttgcgcgaccttgccgaaatcaacatcggcgaccccgtcgttcacgaagaacacggcatcgggcggtatatgggcttgatcacaatggatttgggcggcgaaaccaacgaaatgatgttgcttgaatatgcaggcgaagcgcagctttatgtgcctgtttcgcaactgcatttaatcagccgctactccggtcaggcgcatgaaaacgtcgccctgcacaagctcggcagcggcgcgtggaacaaagcgaaacgcaaagccgccgaaaaagcgcgcgataccgccgccgagttgctcaacctctacgcccaacgcgctgcccaatcgggacacaagtttgaaatcaacgagttggactatcaggcgtttgccgacggtttcggctacgaggaaaccgaagaccaggccgccgccatcgccgccgtgattaaagacctgacacaggcgaagccgatggaccgactcgtgtgcggcgatgtcggctttggcaaaaccgaagtcgccctgcgcgccgcgtttgtggcggtgatgggcggcaaacaggtcgccgtactcgccccaaccacgcttctagtcgagcagcacgcgcaaaactttgccgaccgtttcgccgatttccccgtgaaagtcgccagcctttcgcgtttcaacaacagcaaagccaccaaagccgcactggaaggcttggcggacggcacggtcgacatcgttatcggcacgcacaaattggtgcaggacaacatcagattcaaaagcttaggtttagtgattatcgatgaagaacaccgcttcggcgtgcgccagaaagaacagctcaaacgcctgcgcgccaatgtcgatatccttaccatgaccgccacgccgattccgcgcaccctcagcatggcactcgaaggcctgcgcgacttctcgctgattaccactgcaccgagccgccgcctcgccgtcaaaacctttgtcaaacccttcagcgaaggcagcgtgcgcgaagccgtattgcgcgaactcaaacgcggcggacaagtgtttttcctgcacaatgaagtggatacgattgagaatatgcgcgagcggttggaaaccctgctgcccgaagcccgcatcggcgtggcgcacggacaactgcgcgagcgcgagctggaacaagtgatgcgcgactttttgcagcaacgatttaacgtgttgctctgttccaccatcatcgaaaccggcatcgacatccccaacgccaacaccatcatcatcaaccgcgccgacaaattcggactggcgcaactgcaccagcttcgcgggcgtgtcggccgcagccatcaccaagcctacgcctacctgctcacgcccgaatacatcaccaaagacgcagaaaaacgcctcgacgccatcgcggcagcagacgaactcggcgcaggtttcaccctcgccatgcaggatttggaaatccgcggcgcaggcgaaatcctcggcgaagggcagtccggcgaaatgatacaggtcggcttcacgctctacaccgaaatgctcaaacaagccgtgcgcgatctcaaaaaaggccgccaacccgacctcgacgcgccgctgggcatcaccaccgaaatcaaactgcacagccccgccctactgcccgaaagctactgccccgacatccacgagcgtctcgtcctctacaaacgcctcgccgtctgcgaaaccgtgcagcaaatcaacgccatacacgaagaactcgtcgaccgcttcggcctgcccgaacaacccgtcaaaacccttatcgaaagccaccacctgcggcttatggcaaaagaattgggtatcgatgccattgatgcggccggcgaagcggtaacggtaaccttcggtaaaaacaataatgtcgatccaaccgaaatcatcctgctgattcagaacgacaaaaaataccgccttgccggcgccgataagctgcggtttaccgcagagatggaaaatatcgaggtcagaatcaacaccgtaaaaaacgttttaaaaaccttgcaaaacagatgcctgcccaaataa

SEQ ID NO: 39821 - DNA, 606 bp, Neisseria meningitidis
atgaataccgacttccaaaacatcctcaaacaactgggcaaacaagcccaaaaagaagcggcagaaaaacaggcagccgaaaaaaacaagcaaaaacaagaacaggatttcgatttttcacaagcagtcggacaactctccccattaaaaaaccggcagcaatattatgcgccgcccgacaaaacccccatcaaagtccgtcccaaagacaaccgcgccgacgaagaaaactacttctacatcggcagcacatacaacgacccgcccgccagcttcagcaaaaacggacagggaaaaaacgacatccaacgcctgaaaaacggatactatcccgtcgttaccgatgtcgacctgcacggctacacacaggaagaagcccaaaaagtcctcaacgaattcatcgcattcacccaaaaacgcggcgtatgcggcgaaatcatccacggcagcggattaggttccaaaggctacaaacccgttctgaaaaatatgacccgaaactggctgatgcaacaccccgacgtactcgcctacgccgaaccccgggaaggcaacgacggctgcgtccgcatcctgctcaaacgcaaattaaggcagcaagactga

SEQ ID NO: 39822 - DNA, 1911 bp, Neisseria meningitidis
atgaatatattatctgtagaaaacgcttcttttgccatcggccacgttgccttgctcgacaaaacttcttttcaactcgacagcggcgaaaaagtcggcttgatcggacgcaacggcgcaggtaagtcttcgtttctgaaaatcctcgccggcgtgcaaaagctcgacgacgggcagattatcattcaaaacaacctcaaaatcgtttatgtaccgcaggaatccttttttgataaggacgcaaccgtatttgataccgttgccgaaggtttgggtgaaattcgcgatttattgcgccgttaccaccgcgtcggccatgagttggaaaacggttcgggtgaggctttgttgaaagaactcaacgaattacaacttgaaatcgaagcgaaggacggctggaagctggatgcggcagtcaagcagactttgggggaactcggtttgccggaaaacgaaaaaatcggcaacctttccggcggtcagaaaaagcgtgtcgccttggcgcaggcttgggtgcagaagcccgacgtattgctgctggacgaaccgaccaaccatttggatatcgacgcgattatttggctggaaaatctgctcaaagcgtttgaaggcagcttggttgtgattacccacgaccgccgttttttggacaatatcgccacgcggattgtcgaactcgatcgcggtattttgcgttcctatcccggctcgttctccaaatacagcgaaaaaaaagtgcaggaattggcggttgaagcggaacacaaccgcctgtttgacaaattccacgcgcaggaagaagcgtggatacgcaaaggcatcgaagcgcgccgcacccgcaacgaaggccgcgtgcgccgtttggaagagctgcgccgccaacgcgccgaacgccgcaatgtgcagggacaggtcaacttcaagctcgacagcggcgagaaaagcggcaaaatcatcgccgaattggaacatgcctcgtttgcctatggcgacaaagtcattatggacaaattctccgcgattttgcagcgcggcgataaaatcggtctaatcggccccaacggcatcggcaaaaccacatttttaaaactgattttaggcgaactcaacccgacttacggcagaatccgtatcggcagtaagcaggaagttgcctatttcgaccaattccgcagcacgttgaacgaaaacgacaccgtgttttacacgctcggtcaaggcaacgattacgtcgaagtcggcggcaagaaaaaacacgtaatgagctatctggaagatttcttattccatccagcccgcgcacaaagtcccgtttcatcgctctccggcggcgaacgcaaccgccttttgctggcaaaactctttacccgtcctgctaatattttgattttggacgaaccgaccaacgacttggatatcgatacccaagagctgcttgaagatttgctgcgcgattatcaaggcacggtattccttgtctcacacgaccgtatgttcctcgataacgtgattacccaaagcattatttttgaaggaaatggaaggttaaaagaatatatcggcggctatcaggactacatcgacgcaaaatcacgcgaagcgaagattcagacggaatccgcacccaaaacagccgatgccgaaccggtgaaagaaaaacccaaagccaaccgcacggtcaaactgtcctacaaagaacagcgcgaactcgacgccctgcccgacgaaatcgccgccttggaagccgaacaggcagaaatcaacgcgcagctttccgatcccgaaatcttcaaagattacgaaaaagccggcgcactgcaaagccgcgccgaagaaatcgaaatgctgcttttggaaaagctggaacgctgggagctgctggaaaccaaacagaacggcaatgccgtctga

SEQ ID NO: 39823 - DNA, 1542 bp, Neisseria meningitidis
atgaaaatcggtatcccacgcgagtcattatccggcgaaacccgcgtcgcctgcacgcccgccaccgtcgccctgctgggcaaactgggctttgaaaccgttgtcgaaagcggtgcaggtttggcggcaagtttggacgatgccgcttaccaaacagcaggcgcaaccgttgccgacaaagcggcggtttgggcctgccctttgatttataaggttaacgcgccgtccgaaggcgagctgccgcttttgaacgaaggtcaaaccatcgtcagcttcctgtggccgcgccaaaacgaggctttggtcgaagccttgcgcgccaagaaagtcaatgcgctggcgatggacatggtgccccgtatttcccgcgcgcaggctttggacgctttgtcttcgatggcaaacatcagcggctaccgcgccgtgattgaagccgccaacgccttcggccgtttcttcaccggtcaaattactgccgccggcaaagtgccgcctgcgcaggttttggtgattggtgcaggtgtggcaggtttggcggcaatcggtacggcaaattcactaggcgcagtggtacgcgcgttcgatacccgcttggaagtggcggaacaaatcgaatcgatgggcggcaagttcctgaaactcgacttcccacaagaatcgggcggcagcggagacggctacgccaaagtgatgagcgacgaatttatcgccgccgagatgaagctctttgccgagcaggcgaaagaagtggacatcatcatcaccaccgccgccattccgggcaaacccgcgcccaagctgattaccaaagaaatggtggaaagcatgaaatccggctccgtcatcgtcgatttggcggcggcgacgggcggcaactgcgaactcacccgcccgggcgaattgtccgtaaccggcaacggcgtgaaaatcatcggctacaccgacatggcaaaccgccttgccggacagtcttcccagctttacgccaccaacttggtcaacctgaccaagctgttaagcccgaacaaagacggcgaaatcacgttggacttcgaagacgtgattatccgcaacatgaccgttacccacgacggcgaaatcaccttcccgcctccgccgattcaagtttccgcccagccgcagcaaacgccgtctgaaaaagccgcgcctgccgccaagcccgagccgaaacctgtttccctgtggaaaaaactcgcgcccgccgtcatcgccgccgtattggtgctgtgggtcggcgcggtcgcacccgcagcattcctgaaccactttatcgtgttcgtccttgcctgcgtcatcgggtactacgtcgtttggaatgtcagccactcgctgcatacgccgctgatgtccgtgaccaacgccatctccggcatcatcgtcgtcggcgcgctgctgcaaatcggtcagggcaacggctttgtttcgctgctgtcgtttgttgccatcctgattgccggcatcaacatcttcggcggctttgcggttacacggcgtatgctgaatatgtttaagaaagggtaa

SEQ ID NO: 39824 - DNA, 1041 bp, Neisseria meningitidis
atgcaacccatccgataccgaaccgaccttaccccctacaacactttcggcctgcgcgcccaagcccgagcctttatcgcgctcgaacatgccgacgagttgtgcgacatcgtccgactgcccgagttcgaccgcgatactgttttatggctgggcggcggcagcaacatccttttgatgcaggattacgccggactggtcgtacacatggaaaacaaaggcatacgcgagattgcgcgttcagacggcatggttctgattgaagcgcaggcgggcgaaatctggcacgattttgtcctgcacgccgtcgcgctgggtttgaacggtttggaaaacctgagcctgattccgggtacggtcggcgcgtcgcccgtgcagaacatcggcgcatacggcgtagaggcgaaagatgtgattcacagcgtgcgctgctttgatttggatacggagacctttgtcgagcttgccaatgccgactgccgcttcgcctaccgcgaaagcctgttcaagcaggaaggcaaagggcgttatgtgattgtttcggtcgtatttgcattaaaaacgcattttgtgccgaacttgggctacggagatttggcggcgaaggttgccgaattgagtgcaggcagggaggcgacggcaaaagacgtttccgatgcagtgtgtgcaatccgcaacagtaaacttcctaatcctaacgtgcttggtaatgtcggcagtttctttaaaaatcccgtcatcggcgcggaaaaagctgccgccctgttggagcagcatcccgatatgccgcattatccgcagcccgacggttcggtcaaactcgccgccggctggctgatcgaccaatgtcgtctgaaaggctttcaaatcggcggcgcggcggtacatggcaggcaggctttggtcttagtgaacaaaaacaacgcctcggcaaacgatgtccggcaattggcgcaacacatcaaatttacagtatttgctcggtttcaggtagaattgcacgccgaacccaattggctgcctgcttcgttcagcctgtaa

SEQ ID NO: 39825 - DNA, 666 bp, Neisseria meningitidis
atggcagtattaagcaaagagcaggttctatccgcatttaaaaaccgcaaatcatgccggcattacgatgaggcacgtaaaatcagtgccgaggattttcagtttattttagaactcgggcgtttgtcgcccagttcggtcggttcggagccttggcagtttgttgtggttcaaaaccccgaaatccgacaggcaatcaagccgttttcttggggtatggcggatgctttggataccgccagtcatttggtggtgtttttggcaaagaaaaatgcccgcttcgacagcccgtttatgttggaaagcctcaaacggcgcggcgttaccgaaccggatgccatggcaaaatctttggcgaggtatcaggcgtttcaagccgacgacatcaagattttggacgattcgcgcgccttgtttgactggtgttgccgccagacctatatcgcgttgggcaacatgatgacgggtgcggcgatggcaggtatcgattcctgcccggtggaaggtttcaactatgccgagatggaacgcgtattgtccgggcagttcggtttgttcgatgcggcagaatggggcgtgtccgttgccgcgacattcggctaccgcgttcaggaaatcgccacgaaagcgcgcaggcccttggaagaaaccgttatttgggcataa

SEQ ID NO: 39826 - DNA, 624 bp, Neisseria meningitidis; identical to SEQ ID NO: 37310

SEQ ID NO: 39827 - DNA, 600 bp, Neisseria meningitidis
atggcttttattacgcgcttattcaaaagcattaaacaatggcttgtgctgctgccgatgctttccgttttgccggacgcggcggcggaggggatagatgtgagccgcgccgaagcgaggataaccgacggcgggcagctttccatcagcagccgcttccaaaccgagctgcccgaccagctccaacaggcgttgcgccggggcgtgccgctcaactttaccttaagctggcagctttccgccccgataatcgcttcttatcggtttaaattggggcaactgattggcgatgacgacaatattgactacaaactgagtttccatccgctgaccaaccgctaccgcgttaccgtcggcgcgttttcgacagactacgacaccttggatgcggcattgcgcgcgaccggcgcggttgccaactggaaagtcctgaacaaaggcgcgctgtccggtgcggaagcaggggaaaccaaggcggaaatccgcctgacgctgtccacttcaaaactgcccaagccatttcaaatcaatgcattgacttctcaaaactggcatttggattcgggttggaaacctctaaacatcatcgggaacaaataa

SEQ ID NO: 39828 - DNA, 999 bp, Neisseria meningitidis
atgagcagacccgtacccgccgtattcggcagcgtttttcacagtcaaatgcccgtcctcgcctaccgcgaaggcaaatggcagccgaccgaatggcaatcttcccaagacctctccctcgcaccgggcgcgcacgccctgcactacggcagcgaatgtttcgagggactgaaagccttccgtcaggcagacggcaaaatcgtgctgttccgtccgactgccaatatcgcgcgtatgcggcaaagtgcggacattttgcacctgccccgccccgaaacccaagcctatctcgatgctttggtcgaactggtcaaacgtgccgccgatgaaattcccgacgcgcctgccgccctgtacctgcgcccgaccttaatcggtaccgatcccgtcatcggcaaggcaggctcgccgtccgaaaccgccctgctgtatattttggcttcccccgtcggcgactatttcaaagtcggctcgcccgttaaaatcttggtggaaaccgaacatatccgctgcgccccgcacatgggccgcgtcaaatgcggcggcaactacgcttctgccatgcactgggtgctgaaggcgaaagccgaatacggcgcaaaccaagtgctgttctgcccgaacggcgacgtgcaggaaaccggcgcgtccaactttatcctgattaacggcgatgaaatcattaccaaaccgctgaccgacgaatttttgcacggcgtaacccgcgattccgtactgacggttgccaaagatttgggctataccgtcagcgaacgcaatttcacggttgacgaactcaaagctgcggtggaaaacggtgcggaggcgattctgaccggtacggcagccgtcatctcgcccgttacttccttcgtcatcggcggcaaagaaatcgaagtgaaaagccaagaacgcggctatgccatccgtaaggcgattaccgacatccagtatggtttggcggaagacaaatacggctggctggttgaagtgtgctga

SEQ ID NO: 39829 - DNA, 2121 bp, Neisseria meningitidis
atgttcaataaacacgttaagaccttccaatacggtaatcaaaccgttactttggaaaccggcgaaatcgcccgccaagccgccgctgccgttaaagtctctatgggcgacaccgtggttttggttgccgttaccaccaacaaagaagtgaaagaaggccaagacttcttccctctgactgtcgattacctcgagcgcacttacgccgcaggcaaaattcccggcggtttcttcaaacgcgaaggcaaacaaagcgaaaaagaaatcctgaccagccgtctgatcgaccgtccgattcgtccgctgttccctgaaggtttctaccacgacatccaaatcgtagcgatggtcgtgtccgtcgatcccgaaatcgattccgacattcctgcaatgttgggcgcgtctgccgcgctggtgttgagcggcgtaccgtttgccggtccgattggtgcggcacgcgtgggttatataaacggcgtgtacgttttgaacccgactaaagccgaattggcgaaatcgcaattggacttggtggtcgccggtacttcaaaagccgtgttgatggtggaatccgaagccaaaatcctgcccgaagacgtgatgctgggcgcggtggtttacggccacgatcaaatgcaggttgccatcaatgcaatcaatgaatttgccgacgaagtcaatccggaactttgggattggaaagcacctgaaaccaatgaggaactggttgccaaagtccgcgggattgccggcgaaaccattaaagaagcgttcaaaatccgtcaaaaacaagcgcgttctgccaaattggacgaagcttggagtgcggtaaaagaagccttgattaccgaagaaaccgacacgctggcagccaacgaaatcaaaggcattttcaaacacttggaagccgatgtcgtccgcagccaaattttggacggccaaccgcgcatcgacggccgcgacacccgcaccgtccgtccgctgaacatccaaaccggcgtattgccgcgcacgcacggttccgcattgtttacccgtggcgaaacccaagcccttgccgtagcgactttgggtacttcgcgcgacgagcaaatcatcgacgcgctgtccggcgaatacaccgaccgctttatgctgcactacaactttccgccgtactctaccggcgaagtgggccgcatgggcgcgccgaaacgccgtgaaatcggtcacggtcgtttggctaaacgtgcattgttggccgtattgccgaaacctgaagatttcagctacaccatgcgcgtggtctccgaaattaccgaatccaacggctcttcctctatggcttccgtctgcggcggctgcttgagcctgctgtccgccggcgtgcctttgaaagcacacgttgccggtatcgcgatgggtctgattctggaaggcaataagtttgccgtcctgaccgacattttgggcgacgaagaccacttgggcgatatggactttaaagtggctggtacgaccgaaggcgttaccgcgctgcaaatggacatcaaaatccaaggcattaccaaagagattatgcaaatcgctttggcgcaggccaaagaagcgcgtctgcacatcttggatcagatgaaagccgccgttgcgggcccgcaagagctgtccgcacacgcgccacgcttgttcacgatgaaaatcaaccaagacaaaatccgcgaagttatcggtaagggcggtgaaaccatccgtgcgattaccgctgaaaccggtacggaaatcaatattgccgaagacggtacgattaccattgccgcaaccactcaagaagccggcgatgcggcgaaaaaacgcatcgagcagattactgccgaagtggaagtgggcaaagtgtacgaaggcactgtggtgaaaatcctcgacaacaatgtcggcgcgattgtcagtgtgatgccgggcaaagacggtttggtacacatcagccaaatcgcccacgagcgcgtacgcaatgtcggcgactacctgaaagtcggtcaggtggtgaacgtgaaagcattggaagtggacgacagaggccgtgtccgtctgtccatcaaagccctgctggacgcgcctgcccgtgaggaaaatgccgccgagtaa

SEQ ID NO: 39830 - DNA, 2793 bp, Neisseria meningitidis
atgtccaacagacctacactcctcctcgttgacggctcttcctatctctaccgcgcgtatcacgcgatggggcaaaacctgaccgcacccgacggtgcaccgacgggcgcgctgtatggcgtattgaatatgttgcgccgtttgcggtcggaatatccgcacgattattgcgcggtggtttttgatgcgaaaggcaaaaatttccgccatcaaatgtttgaagaatacaaggcgacgcgcccgccgatgcccgacgatttgcgcccgcaggcggaagcactgccggatttagtgcgcctgacaggctggccggtattggtgattgggcaggtggaggcggacgatgtgatcggcacgctggcgaaacagggggcggaacatggtttgcgagtcattgtttcgaccggcgataaggacatggcgcagttggtggatgagcgcgttacgctggtgaacacgatgagcagcgaaacgctggacattgaaggcgtgaaggcaaaattcggcgtgcgccccgaccaaatccgcgattatctcgcgctgatgggcgacaaggtggacaacgtgccgggcgtggaaaaatgcggcccgaaaacggcggtgaaatggctggaagcctacggttcgctggctggtgtgatggaacacgcttcggaaatcaagggcaaagtgggcgaaaacctgcaagccgcgctgccccaactgccgctgtcatatgatttggtcacgattaaaaccgatgtggacttgcacgccgagctttcagacggcatcgaaagcctgcgccgtactacgccgaaatgggcgcagctggttgtcgatttcaaacgctggggcttccgcacctggctgaaagaagcggaatcaaacatgaataccggctcgaccgatgatttgttcggcagcgacagcatcggcgagcaggcggctttgaatgcggaaatgccgtttgaaaaacaagccgaaaaagccaccgcccccgaaaaactggattatcaagccgttaccaccgaagcgcagtttgccgctttgttggacaaactgtcgcgggcggacacaatcggcatcgatacggaaaccacgtcattagacgcgatgaacgcctcgctggtcggcatcagcatcgctttccaagcaggcgaagcggtttacatccccgtaggacacagcctgaccgccgcgcctgaacagcttgatttacaagacgtattaggccgtctgaaaccgcatttgggaaaccccgccctaaaaaaaatcgggcaaaacctcaaatacgaccaacacgttttcgccaactacggcatcgccctgaacggcattgccggcgacgccatgctcgcttcctacatcatcgagagccatctcggacacggcttggacgaattgtccgaacgctggctcggcttggaaaccattacctacgaatcgctgtgcggcaaaggcgcgaagcaaatcggttttgccgatgtcgccatcgggcaggcgaccgaatacgccgcccaagacgccgatttcgccctgcgcctcgaagcgcacctgcgcgcgcaaatggacgaaaaacagcttgaaatgtatgaaaaaatggagctgcccgtcgcgcaggtattgtttgaaatggaacgcaacggcgtgcaaatcgaccgcgccgaactcgcccgccaaagcgcggaactcggcgccgagctgatgaagctcgaacaagaagcctacgccgccgcagggcagccgttcaacctcaactcgcccaaacagctgcaagaaatcctgttcgacaaaatgggcatcccgacaaaagggctgaaaaaaaccgccaagggcggcatttccaccaacgaggccgtgctcgaacagctcgcgcccgactaccccttgcccaaaatcatcctgcaaaaccgcagcctggcgaaactcaaatccacctacaccgacaaactgcccgacatgatttctccccaggataaccgcgtgcataccacctacgcccaagccgtcgccattacaggacgcttggcaagcaacaaccccaacctgcaaaacatccccatccgcaccgccgaaggccgccgcgtgcgccgcgcctttaccgcgccaccgggcagcgtcatcgtttccgccgactattcccaaatcgaactgcgcatcatggcgcacctctctggagacaaaaccctcattgccgcattccaaaacggcgaagacgtacaccgccgcaccgccgccgaagtgttcggcactgcgcccgaaaacgtctcgcctgagcaacgccgctacgccaaaaccatcaacttcggcttaatctacggtatggggcaatacggtttggcaaaatcattgggcatcgacaacctttccgcaaaaaactttatcgaccgctattttgcccgctaccccggcgtcgccgaatacatgcagcgcgccaaagaacaagccgccgcccaaggctacgtcgaaaccctgttcggccgccgcctctacctgcccgacatccgcaacaaaaacgccaacgcccgtgccggagccgaacgcgccgccatcaacgctcccatgcaaggcaccgcgtccgacctcatcaaacgtgccatgatagacgtgcgaaactggctttcagacggcatcgacagcaaactggtcatgcaggtgcatgacgaactggtgctggaagtcgttgaaaccgaactggattttgtcaaagaaaaactgccgcagattatggcgaaagtggacggcggattattggatgtaccgctggtggctgaggttggcgtaggggagaattgggaagaggcacattga

SEQ ID NO: 39831 - DNA, 627 bp, Neisseria meningitidis
atgaacgttaatgttatcaaccatccgctcgtccgccacaaattaaccctgatgagggaggcggattgcagcacctacaaattccggacgcttgccatcgagctggcgcgcctgatggcatacgaggcaagccgtgattttgaaatcgaaaaataccttatcgacggatggtgcggtcagattgaaggcgatcgcatcaagggcaaaacattgaccgtcgttcccatcctgcgtgcaggtttgggtatgcttgacggcgtactcgacctgattccgactgccaaaatcagcgtagtcggactgcagcgcgacgaggaaacgctgaaacccgtttcctacttcgagaaattcgtggacagcatggacgaacgtcctgccctgattatcgacccgatgctggcgacgggcggttcgatggttgccaccatcgaccttttgaaagccaagggctgcaaaaacatcaaggcactggtgctggttgccgcgcccgagggtgtgaaggcggtcaacgacgcgcatcccgacgttacgatttacaccgccgcgctcgacagccacttgaacgagaacggctacatcatccccggcttgggcgatgcgggcgacaagattttcggcacgcgctaa

SEQ ID NO: 39832 - DNA, 519 bp, Neisseria meningitidis; identical to SEQ ID NO: 36779

SEQ ID NO: 39833 - DNA, 783 bp, Neisseria meningitidis
atgaaaaccaagttaatcaaaatcttgaccccctttaccgtcctcccgctgctggcttgcgggcaaacgcccgtttccaatgccaacgccgaacccgccgccaaagccgagtccgccggcaaatccgttgccgcctctttgaaagcgcgtttggaaaaaacctattccgcccaagatttgaaagtgttgagcgttagcgaaacaccggtcaaaggcatttacgaagtcgtcgtcagcggcagacagattatctacaccgatgccgaaggcggctatatgttcgtcggcgaactcatcaacatcgacacgcgcaaaaacctgaccgaagaacgcgccgccgatttgaacaaaatcgacttcgcctccctgcctttggacaaagccatcaaagaagtgcgcggcaacggcaagctgaaagtcgccgtcttttccgaccccgattgtccgttctgcaaacgcttggaacacgagtttgaaaaaatgaccgacgtgacggtttacagctttatgatgcccattgccggcctgcaccctgatgccgcgcgcaaggcgcaaatcttatggtgtcagcccgaccgcgccaaagcgtggacggattggatgcgtaaaggcaaattcccggtcggcggcagcatctgcgacaatcccgtcgcggaaaccacttccttgggcgaacaattcggcttcaacggcacgccgaccctcgtcttccccaacgggcgcagccaaagcggctacagcccgatgccccaactggaggaaatcatccgcaaaaatcaataa

SEQ ID NO: 39834 - DNA, 594 bp, Neisseria meningitidis; identical to SEQ ID NO: 38213

SEQ ID NO: 39835 - DNA, 852 bp, Neisseria meningitidis
atgcacatcctgttgaccgccctgctcaaatgcctctccctgctgccactttcctgtctgcacacgctgggaaaccggctcggacatctggcgttttaccttttaaaggaagaccgcgcgcgcatcgtcgccaatatgcgtcaggcaggcatgaatcccgaccccaaaacagtcaaagccgtttttgcggaaacggcaaaaggcggtttggaacttgcccccgcgtttttcagaaaaccggaagacatagaaacaatgttcaaagcggtacacggctgggaacatgtgcagcaggctttggacaaacacgaagggctgctattcatcacgccgcacatcggcagctacgatttgggcggacgctacatcagccagcagcttccgttcccgctgaccgccatgtacaaaccgccgaaaatcaaagcgatagacaaaatcatgcaggcgggcagggttcgcggcaaaggaaaaaccgcgcctaccagcatacaaggggtcaaacaaatcatcaaagccctgcgttcgagcgaagcaaccatcgtcctgcccgaccacgtcccctcccctcaagaaggcggggaaggcgtatgggtggatttcttcggcaaacctgcctataccatgacgctggcggcaaaattggcacacgtcaaaggcgtgaaaaccctgtttttctgctgcgaacgcctgcctggcggacaaggtttcgatttgcacatccgccccgtccaaggggaattgaacggcgacaaagcccacgatgccgccgtgttcaaccgcaatgccgaatattggatacgccgttttccgacgcagtatctgtttatgtacaaccgctacaaaatgccgtaa

SEQ ID NO: 39836 - DNA, 1578 bp, Neisseria meningitidis
atgatgaaaaaatctttccttacgcttgttctgtattcgtctttacttaccgccagcgaaattgcctatcgctttgtatttgggattgaaaccttaccggcggcaaaaattgcggaaacgtttgcgctgacatttgtgattgctgcgctgtatctgtttgcgcgttataaggtgacgcgtttgttgattgcggtgttttttgcgttcagcattattgccaacaatgtgcattacgcggtttatcaaagctggatgacgggcatcaattattggctgatgctgaaagaggttaccgaagtcggcagcgcgggtgcgtcgatgttggataagttgtggctgcctgtgttgtggggcgtgttggaagtcatgttgttttgcagccttgccaagttccgccgtaagacgcatttttctgccgatatactgtttgccttcctaatgctgatgattttcgtgcgttcgttcgacacgaaacaagagcacggtatttcgcccaaaccgacatacagccgcatcaaagccaattatttcagcttcggttattttgtcggacgcgtgttgccgtatcagttgtttgatttaagcaggattcccgcctttaagcagcctgctccaagcaaaatcgggcagggcagtgttcaaaatatcgtcctgattatgggcgaaagcgaaagcgcggcgcatttgaagctgtttggctacggacgcgaaacttcgccgtttttaacccagctgtcgcaagccgattttaagccgattgtgaaacaaagttattccgcaggctttatgacggcagtatccctgcccagtttctttaacgtcataccgcatgccaacggcttggaacaaatcagcggcggcgataccaatatgttccgcctcgccaaagagcagggctatgagacgtatttttacagtgctcaggctgaaaaccaaatggcaattttgaacttaatcggtaagaaatggatagaccatctgattcaaccgacgcagcttggctacggcaacggcgacaatatgcccgatgagaagctgctgccgctgttcgacaaaatcaatttgcagcagggcaggcattttatcgtgttgcaccaacgcggttcgcacgccccatacggcgcattgttgcagcctcaagataaagtattcggcgaagccgatattgtggataagtacgacaacaccatccacaaaaccgaccaaatgattcaaacagtattcgagcagctgcaaaagcagcctgacggcaactggctgtttgcctatacctccgatcatggccagtatgttcgccaagatatctacaatcaaggcacggtgcagcccgacagctatattgtgccgctggtgttgtacagcccgaataaggccgtgcaacaggctgccaaccaggcttttgcaccttgcgagattgccttccatcagcagctttcaacgttcctgattcacacgttgggctacgatatgccggtttcaggttgtcgcgaaagctcggtaacgggcaacctgattacgggtgatgcaggcagcttgaacattcgcgacggcaaggcggaatatgtttatccgcaatga

SEQ ID NO: 39837 - DNA, 651 bp, Neisseria meningitidis
atgcccgtgacccgccccgccaaaatcaatacttacacacgcatcatcgacgccagccttgcgctcttcaacgaggaaggcgagcgcaacatcagcaccaaccatattgccgcccacttgggcatcagtccgggcaatctctattaccacttccgcaacaaagacgaaatcatcgtccaactgttcaaacgttacagcgaagccctgctggcatacctgaatgaagccgtgctgccgtctgatgtggaagactctatcaactatatggcgggcatttacgacgtcatgtgggaataccgcttcctctttagcgacgtaaacaccctgcttgcacgcagtgccgaattgttgggcgaacacaacaccttcacccaagccaaagtctccccgctcttggtcaacctgctcacccagctcaacggactaaacgtcatcaacgccgaccaaaccgctatgaacgacctcgccgtcaatatgtggatggtcacgaaatactggttcgacttcgacagctccctgcgcggtcgcaccaagctgaccgaagactccaaagcacgcggcatccgccgcaccttaagcctccttcgtccttatcttttgcccgaacaccgcgagaaatacgaccggaaaatcggcaacggcaacccgtaa

SEQ ID NO: 39838 - DNA, 285 bp, Neisseria meningitidis
atgccgtctgaagcccaaaaaccggtttcattcgtactttattcgaatgattgaataaaagtaactgccaagaaaaacgtattttttggttatttcgccagtctaaatagagcaaccgggacgattgatatccgtgtgcatgacacagacagcaccaaagggaaaaacggcattttccaaagtatcggtatcaaaaccgccctttcactccaaaaataccaaatcgacaaaccgggcaaagaaatcagaccgtgccgcctgaaaaaacgcccacccgtccgttaa

SEQ ID NO: 39839 - DNA, 285 bp, Neisseria meningitidis
atgcagcctgcggtttatattttagcaagccaacgtaatggcacgttatacattggcgttacatctgatttggtgcaacgtatttaccaacatagggaacatttgattgagggatttacatcacggtacaacgttactatgctggtttggtatgaactgcatcctacgatggagagcgcaattactcgggaaaaacagttgaagaaatggaacagggcttggaaattgcaactgattgaagaaaataatgtttcttggcaggatttatggtttgatattatttag

SEQ ID NO: 39840 - DNA, 666 bp, Neisseria meningitidis
atgatgatgcacgcttctgtccaaagccgtttcgcaccgatactttatgttttgattttctttgccggttttttgaccgcgcaaatctggttcaatcagaaagcctatactgaagagctgcctccgcttctgtccgcattgtccgctgtcgcgctggtgtggctggcgtgggcgttcgtgtcggcgcgttcaaaggctaaggcggaaaagttctaccgcgaaaaaatgatacagaacgaaagcatacatcccgtcctgcacgcttctttgcaacacttggaacacaagccgcaaatgctcgccctgctggtcaaaaaccacggcaaagggatggcggaacaggtcaggttcaaggcggaagtgctgcccgacgacgaagacgcgcgcacgattgccgccgagttggcaaaaatggatatgtttgcattggggacggacgcggtcgcctcgggcgaaacctatggacgcgtgttcgccgatattttcgagttgtcggcggctttggaagggcgcgcgttcaaaggaatgttgaaactgacggcggaatataaaaacatcttcggcgatgcctgccgttcggaaacggcgttggagttgggcgcgctcaatcaggcgttgcaggagatttcaaaaacatcggaaaagtccaaacggatattttattga

SEQ ID NO: 39841 - DNA, 534 bp, Neisseria meningitidis
atgggtatttacgattttcaaatgaaagatgcggaaggcaatgcggttgatttgtcaggctatcgcggcaaggttctgctgattgtcaacacggcaacgcgttgcggtctgaccccgcaatacgaggctttgcagaagctgtatgcacaatataccgcagaaggcttggagattttggattttccgtgcaaccagttccgcgaacaggctcccgaaagcagcggagaaattgcccaagtgtgtatgatgaagtttggcacgaagtttaagattttcgacaaaatcgaagtcaatggagcaaataccgcgcccttgtatgcctacctgaaatccgtcaaaccgcaagataaaggcaatcatctgtttaaagatttcgtgttgaagctcgcagctttgggagagaagcgcgacgaaggcgacatcaaatggaactttaccaaattcctcgtcaaccgcgacggcgaagtggtcgagcgttttgcgcctagtgttacgcccgaagaaatcgaagccgatattcgggcattgctgtaa

SEQ ID NO: 39842 - DNA, 525 bp, Neisseria meningitidis
atggaaatgaaacaaatgcttttgaccgtcgggggggcggcggtgttggcaggctgcggcaaggaggcgggcggttacgggggttattggcgagaaaagtcggacaaaaaaggggggagggttgccgtcaaaaaagaaaaaggcaattacttccttaataaaatcaaggtggttacaggtaaggaagaagctaggcttttgtctggaaaagagggcgcgcgttcgataaacacggggataggggaaatccggattaaactttcggacgacgggaaagaggtgtatgtcgaacgcaggcagtatgtgaaaaccgatgcggcgatgaaggacaaaatcatcgcccatcagaaaaagtgcggacaaacggcacaggcatacctcgacgcacgaaaggcgttgccgtcaaaccagacgtatcagcagcatcaggcggcgatcgagcagttgaaacggcggtttgaagccgagtttgacgaattggaaaaagaaatcaaatgcaacggcaaaccgacattgttgttttag

SEQ ID NO: 39843 - DNA, 1128 bp, Neisseria meningitidis
atgtacactttccgcccgtttcccaaactgcacacagaaacacacattatgaacatacaaaacatccgcaccctcctcgacaccgtcgccgttccgaatacggcacgcacgcttggcggcgaaaaggccgtccgttcggtcgaacagcgttcagacggcatccatatcgccctgcatttcggcttccccgtcgcgcacattgcctcagaaacagccgaccgcatacaggaaatcctgatgccgctgacaggcgacacacacatccatctgtccatggacactgaaatcggcacacacaaagtccagcccggcgttaccactattaaaggcgtgaaaaacatcatcgccgtcgcctctggcaaaggcggcgtgggcaaatcaaccaccaccgccaaccttgccgccgcaatggcgcgcatgggcgcgcgcgtcggcgtactcgatgccgacctttacggcccgagccaaccgaccatgttgggtgtggacgaccgcaaacccgatcagaaaaaccaaaaactcattcccgtcgaatcttcagacggcatacaggtcatgtctatcggctttctcgtcgataccggccaagccgtcgtctggcgcgggccgatggtcagccaagccttgcagcaactgatgtttcaaagcgagtgggacgaagtggactacctgtttatcgacctgccccccggcacgggcgacatccaactcacgctgtcccaacgcatccccgtaaccggatcggtcatcgtaaccacgccgcaggacatcgccctgatagacgcgcgcaaagccgtggatatgttccgaaaagtcaacattcccattttaggtgtattggaaaatatgtccgtccacatctgctccaactgcggacacagcgaagcactgttcggcacagacggcggcaaagatttagccgcacgcctcaacgtccccctgctcggacagcttcccctaagcctgcccgtgcgcgaagccatggacggcggcacaccggcgcaactgttcgacgaacaccccgccatcgcccgaatctacaccgatgccgcattccaaatcgccctgggcattgccgacaaaggcaaagacttcagcagccggttccctaaaatcgtcgtcgaataa

SEQ ID NO: 39844 - DNA, 1545 bp, Neisseria meningitidis
atgaatatgttttccaaactggacaaatactggcagcaccccgccctctactggcctttgctcatcctttttgccgccgccaccccctttaccttcgcaccctactaccacttttggctgatgcccttgattttcggtgccttcgtccgcctcatcgaactgcgtccgcgttttgctgtctcttccgcctacctgttcagcctgaccgcatacacgacacagttctactggatacacaccgccctgcacgacgtttccggcctgcccgacctctatgccgtaccgctgactttcctactccccgcctaccttgccctttatccggcactgtgtttctggctgtggaaaaaatttaccctgcctcggggcataaaaatcggtttggtactgcccatcctgtggacactgaccgagtttgcccgcgaacgtttcctgaccggattcggctggggcgcaatcggctactcccaaatcaccccggacagcccgctcgccggctttgccccattgggcggcatccacatggttacactggcaaccgcctttctcggtgtctggctggttttggcgagtgataacaccgcacgttcgggcaaacgcctgcttccaattatcctgattgccgccctgcttgccgcaggctacaccgcccgacaaaccgacttcacccgccccgacggcagccgcagcaccgtcgccctgcttcaaggcaacatcgaccaaaccctcaaatggcgtgaagaccaagtcatcccgaccatacagaaatattacgaacaggtcggcaaaaccactgccgacatcgtcatcctgcccgaaaccgccatccccgttatgcgccaaaacctgccggaaaacatactggcaaaatttgccgaacaggcgcaaaacaacggcagcgcgctcgccgtcggcatcagccaatacacttcggacggcaacggttacgaaaacgccgtcatcaacctgaccggttatcaggaaaacaatcaggacggcatcccctactacgccaaaaaccacctcgtccccttcggcgaatacaaaccgctgcccttcctgaccacgccgctttacaaaatgatgaatatgcccctttccgacttccgcaaaggcggcggtaagcaatccgccctgctgatgaaaaaccaaaaaatcgccttcaacatctgttacgaagacggattcggcgacgaactgattgccgccgccaaagatgccaccctgcttgccaatgccagcaatatggcgtggtacggaaaatccaacgccatgtaccagcacctccaacaatcgcaggcgcgggctatggaactcggacgctatatggtccgtgccaccaacaccggcgcaaccgccatcatctcccccaaaggcaacatcatcgcccaagcccaacccgatacggaaaccgtattggaaggacacatcaaaggctatgtcggcgaaacgccctatatgaaaaccggcagttcatggtggttgatgggcatattgaccctagccgcactgattcttttcatcttccgaaacaaagaacactga

SEQ ID NO: 39845 - DNA, 1437 bp, Neisseria meningitidis
ttggaaaactcattaattatcggtttggcactggcggtattgctgatgcttttggttatgcgtgcgaagcagggtaagaaaacaccgaagcgcaaatcccaaggtgtcggcaatacgcaggggcagacacccggaagcaatgattcggactgggtcgatcagattggacaatcggtttcagacggcacgcaacccgactggtcttggaacgaaagtgccgagaccgcatccgccgccgtatccgcgcaagaagtcgatccgcttacggagtatcaggtttataagcaattcggttatcagggcaaggctgccgaatctttggctgcctatctggacggcattccggatggtgaagcgaaacctgaaaaccttatccgcgagctgctcgatatcaatctcgaagtgggggatgtcgatgttttggcagacaatctgcaaaaatacggcaaactgattccttccgaacttttggcaaaatatatcgaacaggcattacagcgcgattcaaaccatttgcgtatccgcgtcttggcggaagaaggtttgggatggggtactcaggagattgaaaaacgtgcggaaggcggtcctgcgacggcagcttccgcatcgcccccgccggatgccggcggtaaggcttatgaagccgaagaaatcaagcgcatcccgattgtgcggggcaaaaaagacgtgtccggaatcagtcaagaggaaatcggtgcgattgccggtttggtccgtgccgatcaaggtgcgaaaatccttaaagacaaagtcagctatgaaacggcatcgaaacaatacgaccgtgccatccaaacttccgaaaaacctgcaaacctgattatcgatgcgttgaaactcgattaccaacacgcggacatagaccgttttgccggacatttgtggaaactttaccaaacgttgggcaactacggcaggcaggttaaagagcggatgctggggtgggggtacagcttgggttaccatgaagttttcgatgatttggaaaaagggccgaacgaccggcaaatcaaagacatcggtatggggcacgggtatctgccgaaaaatatacagaaattcaaatcgcaacatcgggatttggtgcttcaagattcttcgttgatcaacaccggttcgtctccggcagacgatgcggttaaagaagtagagtcgttgctgatgtatggtcagattgaagcggcaatggatgtgttggagcaggcggtattgaaatatcccgacgagtcccagctttatattacgttgatcgatatttatgaacgtactgaagattgggataggttggggcagtttttaagggtattgagggaacgtgcggacaggcttcctgaagaggtcgttatgctgatgagccggctgctgcagcgtatgaatcaaaatattaaaaaaataaaacggtacggaaaataa

SEQ ID NO: 39846 - DNA, 3210 bp, Neisseria meningitidis
atgttttatctgtatcaatccaaccgtcttgaaacgctggcggcactgtttgcccacattcaaaaagtcaaaccgctgaaatcggctttacagcccgaacagattattgtgcagagtcaggggatgcgccgctacctcaatacctgcctcgcccgcgatttgggcgtggcggcgaatttgtcgttcagcctgcccgccggtctgacgtggaagctgatgaaaaaactgattcccggcattccggaactcagcccgtttgcgcctgaagtgatgcgctggcggctgttggatttgttccgcagcgaggcatttcggaatacggcagaatttgaagatgtgaggaatgtgctgcaagactatctgggcagcggcgaatcggcagattatcagcttgcgggacagcttgcggacatattcgaccaataccttgtctatcgtccgcagtggatagacgcgtggcagcagggcaggcggctcggtttgggcgacgatgaaatctggcagtccaaactgtggcgttacctcgacgatggcaggcagagcgcgccgcaccgtgtcgcgttgtgggaaaagctgttggaatctttaagcagtgataagctgcccgagcgttatttcgtgttcggcatttccacgatggcgccgatgtatttgcaacttttgcacaagctgtccgaacattgcgacgtgttcgtgttcgcactcaatccgagcgggatgtattggggcaatgtcatcgaagcggcgcaaatcctcaaaggcggcggcgatcccgatttaactcaggcagggcatccgctgctcgcctcattgggcaagcaggggcgggactttttcgactttttgaacgaaatggaaatagaagaagaaacgccggtgtttgaagaaggcagccgcgatacgcttttgcacgccctgcaaaccgatatccaaaacttggatatgccgtctgaaaaagcgggaaatattaatacggacgacggatcgatacgcatcgtctccgcacacagccctttgcgcgaattgcagatactcaaagacaaactgttgaaaattctgcatgaacatcccgattggcagccgcatgatatcgccgtattaaccccgaatatcgaatcctatacgccttttatcgaagccgtgttcggacaggcgcagcccggtgcgcaggcattgccgtattccgtttcagacgtgaaaatcagccgccgacaaccgctgtttcatgctttgtcatgcctgttcgacttgttggaaagccgatttgaagtcgataaagtgcttgtgcttttagaaaccgcacccgtgttgcgccgtttcggactgactgaggacgatttgccgcttttgcacgatatggttgccgatttgaacgttcactggggtttggacggagaaatgcgcggcggcacggatcagctgtttacctggaagcaggcggtagaacgcatgatattgggctggatgctgcccgaaggcggcaacccgatgtggcaggatgtcagcgcgtggtatgccgacgtgaatcaaaccgccctgttcggacgttttgccgccctcctcgaaaccctgtcggatattgtacggatatggcggcagcccgcaacgatcggcgaatgggtggcgcgttgccgggatttgcttgaaacattgttccaagctgaagccgatgaccaaaagtcagtccaaaaccttgaaaacgaatgggtcaaatggcaggcggaaacagaattggcgcaattttccggacagttgccgcaacaaaccgtcatccgccacatccgccgctttctcgacagcgaaagcgaggcaggctttttacgcggcggcatcaccttttgcagtatggtgccgatgcggagcctgccctttaaagtcatctgtctgttgggtttgaacgacggagattttccccgcaataccaaagccgccgtattcgacctgattgccaaacatcccgccaaaggcgaccgcgcccgccgcgacgacgaccgctacctcttcctcgaagccctcatcagcgcgcgtgaaatcctgtacctgtcctacatcgggcgcgacatccgcaaagacgaagaactggctccgtcttctttgttgggcgaactcatcgacacagttgccgccatgaccggcacaaacagccgccaacttgcacaaaactggatagaacagcatccgctgcaagccttctcgcgccgatattttcaagaaggcggacgttcagacggcatattcggcacgcgtaccgactacgccgccgcgctcggacaaacgcccgaaccgccgcaaccctttttcgatcaacccgtagaaaacgccgaacctgttgccgaaattggacaggacgaatttatccgcttctggcgcaaccctgtcaaagtatggcttcagcagcagcttgcgtggagcgaaccccatatcggcgaagcctgggagcctgccgaacccttcgagccgcaacacgccgatcaaatcgccaaaacctacatcgaagcacgccgcgaaggacgggatttttcccaaaccgccgcccgcatcggggcggaaagcctgctgccgtcgggagagttgggcagactttggcagcaagacttccaaaccgctgccaaacaaatcgacacggcggttttaaacagccccaaactgccaccgctttcatatgccataccgtcggacgggcaaatcctgaaaggcagcttgggcaatctgtaccgctgcggacaagtgttttacgcctacggcaaacccaacgcgccgcaacgtatcgcttttctgctggaacacctgatattttgcgccgttatgccgtctgaaaccgaaacgcggcaaacctttatcgtccaatccggagaaaccgaaatattggcggaaatcgcgcaagacagggcattgcagctattgtcggaatggatggcgtttttcaatatcgggcaaaaccgcccgctgccgttttttgccaaaacctcgcttgccgccgccgaagcgtttgcccaaaaacaagattgggaagccgccctgaaaaaagcccaaaccgcctaccacggcaacaaagtcagcaaagggcagaaagactataccgaagtcgccctcgtgttcggcaacgcaagccaaaacccgctcgaacagcccctgtttgaaaacctcgtccgcctgcttgccgacacgtttgccgcagcggaaaaaaaggaagaggccggagaagcctga

SEQ ID NO: 39847 - DNA, 390 bp, Neisseria meningitidis; identical to SEQ ID NO: 37209

SEQ ID NO: 39848 - DNA, 219 bp, Neisseria meningitidis; identical to SEQ ID NO: 36291

SEQ ID NO: 39849 - DNA, 174 bp, Neisseria meningitidis; identical to SEQ ID NO: 36913

SEQ ID NO: 39850 - DNA, 492 bp, Neisseria meningitidis
atgttttggcaactgaccgttgtttcagtaaccgccgtcattgcactggggacaatattcatcaataagaaaacttcaaagcaaaaggcgacattagatgttattttgaatgattaccaagatgcacaatttgtagaagccgacaatcatatttcgccttatattcgcggcacggcagttgacgacaacaacgcgcggatcgacctgtatgaaatttatcaaaataagggcggacaatgggaaaaagagagagggcatttacttaccgtaatcaatcggcacgagttttatgcgtgcgcaatcaactcgggagtattggatgaggatttgtttaaacggctgcattgcaccaacttcataaaattgtggaatgcagtttcgcctcttgttatgaaaatacgcgaagaagaacgcaaagacacaatatttagagagttggaaattttggttgcattatggaaagcaaaccccctaaaggcatctgatttgtga

SEQ ID NO: 39851 - DNA, 2133 bp, Neisseria meningitidis
atgtctatcgtatccgcaccgctccccgccctttccgccctcatcatcctcgcccattaccacggcattgccgccaatcctgccgatatacagcatgaattttgtacttccgcacagagcgatttaaatgaaacgcaatggctgttagccgccaaatctttgggattgaaggcaaaggtagtccgccagcctattaaacgtttggctatggcgactttacccgcattggtatggtgtgatgacggcaaccatttcattttggccaaaacagacggtgagggtgagcatgcccaatttttgatacaggatttggttacgaataagtctgcggtattgtcttttgccgaattttctaacagatattcgggcaaactgatattggttgcttcccgcgcttcggtattgggcagtttggcaaagtttgactttacctggtttattccggcggtaatcaaataccgccggttgttttttgaagtattggtggtgtcggtggtgttgcagctgtttgcgctgattacgcctctgtttttccaagtggtgatggacaaggtgctggtacatcggggattctctactttggatgtggtgtcggtggctttgttggtggtgtcgctgtttgagattgtgttgggcggtttgcggacgtatctgtttgcacatacgacttcacgtattgatgtggaattgggcgcgcgtttgttccggcatctgctttccctgcctttatcctatttcgagcacagacgagtgggtgatacggtggctcgggtgcgggaattggagcagattcgcaatttcttgaccggtcaggcgctgacttcggtgttggatttggcgttttcgtttatctttctggcggtgatgtggtattacagctccactctgacttggttggtattggcttcgttgcctgcctatgcgttttggtcggcatttatcagtccgatactgcggacgcgtctgaacgataagttcgcgcgcaatgcagacaaccagtcgtttttagtagaaagcatcactgcggtgggtacggtaaaggcgatggcggtggagccgcagatgacgcagcgttgggacaatcagttggcggcttatgtggcttcgggatttcgggtaacgaagttggcggtggtcggccagcagggggtgcagctgattcagaagctggtgacggtggcgacgttgtggattggcgcacggctggtaattgagggcaagctgacggtggggcagctgattgcgtttaatatgctctcgggacaggtggcggcgcctgttatccgtttggcgcagttgtggcaggatttccagcaggtggggatttcggtggcgcgtttgggggatattctgaatgcgccgaccgagaatgcgtcttcgcatttggctttgcccgatatccggggggagattacgttcgaacatgtcgatttccgctataaggcggacggcaggctgattttgcaggatttgaacctgcggattcgggcgggggaagtgctggggattgtgggacgttcggggtcgggcaaatccacactcaccaaattggtgcagcgtctgtatgtaccggagcagggacgggtgttggtggacggcaacgatttggctttggccgctcctgcctggctgcggcggcaggtcggcgtggtcttgcaggagaatgtgctgctcaaccgcagcatacgcgacaatatcgcgctgacggatacgggtatgccgctggaacgcattatcgaagcagccaaactggcgggcgcacacgagtttattatggagctgccggaaggctacggcaccgtggtgggcgaacaaggggccggcttgtcgggcggacagcggcagcgtattgcgattgcccgcgcgttaatcaccaatccgcgcattctgatttttgatgaagccaccagcgcgctggattatgaaagtgaacgagcgattatgcagaacatgcaggccatttgcgccaaccggacggtgctgattatcgcccaccgtctgtccactgttaaaacggcacaccggatcattgccatggataaaggcaggattgtggaagcgggaacacagcaggaattgctggcgaagccgaacggatattaccgctatctgtatgatttacagaacgggtag

SEQ ID NO: 39852 - DNA, 1311 bp, Neisseria meningitidis
atgaacacgccgcatccgcgcccgaaaatcgccgtcatcggcgcaggctgggcaggactgtccgccgccgtcaccttggcgcggcacgccgacgttaccctgtttgaagccggccggcaggcgggcggcagggcgcgcgcactggccggaaataccgacggtttcggttttttggacaacgggcagcacattttgctcggcgcataccggggcgtgttgcgcctgatgaaaaccatcggttcagacccccgtgccgcctttttgcgcgtaccgctgcactggcatatgcacggcggtttgcagttccgcaccctccccctgcccgcgccgctgcatattttgggcggcgtgctgcttgcccggcgcgtaccgtccgcattcaaagccaaactgcttgccgatatgtccgatttgcagaagtccgcacgcctcggacagcccgacacgacagttgcacaatggctgaaacagcggaacgtgccgcgtgccgccgtgatgcagttttggcagccgctggtgtggggtgcgctcaacacgcctttggaaaccgcaagcctgcgcgtgttgtgcaacgttttgtccgacggcgtgctgacgaaaaaatccggcagcgactatcttctacccaagcaggatttgggcgcaatcgtcgccgaacccgccttggcggagcttcaacggctcggcgcggacatccgcctcgaaacgcgcgtatgccgtctgaacaccctcccggacgggaaagtgctcgtcaacggcgaagctttcgatgccgccgtccccgccaccgcgccctaccacgccgccgcgctcctgcccgaaggcacgcccgaacacgttcagacggcatatcaaaaccttcgctaccacgccatcaccaccgtctatctgcgctacgccgaacccgtccgcctgcccgccccgctgaccggccttgccgacggcacggtgcaatggctgctttgccggggcaggctcggactgcctgaaaacgaagtgtccgccgtcatcagcgtttccgaccgcgtcggcgcgtttgcaaaccgggcgtgggcggacaaagcccacgccgacctcaaacgcatccttccgcatttgggcgaacccgaagccgtgcgcgtcatcaccgaaaaacgcgccacaaccgcagccgatgccccgccgccggacttgtcgtggttgcaccggcaccgcatcttccccgccggcgactacctccacccggactaccccgccacgctcgaagccgccgtacaatcaggtttcgcgtcggcggaagcctgcctgcaaagcctgagcgatgccgtctga

SEQ ID NO: 39853 - DNA, 558 bp, Neisseria meningitidis
atgaaacccaaattcaaaaccgttttaaccgcgctgcttttggcggtttccctgccgtctatggcggcaacccatgttttgatggaaaccgatatgggcaatatccgtttggttttggacgagtccaaagcccccaaaaccgttgctaatttcgtgcgctatgcccgaaaaggcttttacgacgacaccgtttttcaccgcgttatcgacggtttcgttatccagggcggcggatttaccgaagacttggtacaaaaggcaaccgataaggccgttgccaacgaatccggtaacggcttgaaaaacactgccggtaccatcgccatggcgcggacggccgatccggattccgccaccagccaattctttatcaatctggcggacaatgattcactcaactacaaaaacggacaatacggctataccgttttcggcagggtcgaaagcggcatgaacaccgtttccaaaatcgcccgcgtcaaaaccgccacgcacggcctttatcaaaacgtacccgtacagcccgtcaaaatccgtcgcattgttgtcggacagtaa

SEQ ID NO: 39854 - DNA, 258 bp, Neisseria meningitidis
atgatattgttattaattgtaaataaatattggaaggtaaatgatatgaaaaatgaaattcaaaaaatcatggacaaatataatccatggcatgaagatgattttgagtcgtatgaagacattgccaaagatgtatcgctgatgacagataaaacgttcattgaacattatttgttagaagtttattcagaagaaaacggacattttgaccaagagaatatccatgcgatgataggggaaattaaaaatgcaatttag

SEQ ID NO: 39855 - DNA, 1311 bp, Neisseria meningitidis
gtggctaatcaacaaacgtcatcaggttcatccaaatttggagatcttaagaaacgtcttttgtttctatttggagcattgattgtttttcgaattggtgcccatatacccgtacctggagttgatgctgttgctttagctaaattatacgaaagcgctggaaacggcatcctgggaatattgaatatgttttccggtgggtcgttagagcgctttagtatatttgcaataggaattatgccatatatttcagcttctattattgtacagctcgcttctgaaattttgccatcattgaaggctttaaaaaaagaaggggaggctggtagaaaggtaattacgaaatatactaggtatggtactgttttgttagcaattcttcaaagtctaggtgttgcatctttcgtatttcagcaaggaattgttgtaacaagttcatttgagtttcatgtttccacggtagtttctttggtaacgggaaccatgtttcttatgtggcttggggagcaaattactgaaaggggtatcgggaacggtatttctttaatcattacggcaggtattgcttcaggtattccttcgggtattgcaaagctggttacactgacgaaccaaggttctatgagcatgcttacggcgttgtttattgtatttggtgccttattattaatttatttggttgtatactttgaaagtgcacagcggaagattcctattcattatgcaaaacgccagtttaatggtagggcgggtagtcaaaatacgcatatgcctttcaagttgaatatggctggtgttattcccccaatttttgcttccagtattattctatttccatctactcttttaggttggtttggttcggctgatacaaatagtgttttgcacaaaatagctggattgttacaacacggtcaattgctgtatatggctttatttgcagcgacagttattttcttttgttatttttatacggctttggtttttagccctaaagaaatggcagagaatttaaaaaagagtggtgcttttgttcctgggattagacctggtgagcagacctctaggtatttagaaaaagttgtattacgtttgacattgtttggagctctttatattacaactatttgtttaattccagagttcttaactacggttttaaatgtacctttttatttgggtggcacgtctttgttgattctagttgttgtaacgatggattttagtacacaaataaattcgtataggcttactcaacagtatgataagttaatgactcgttcagaaatgaaatcattttctcggaaatag

SEQ ID NO: 39856 - DNA, 114 bp, Neisseria meningitidis
ttgcaaaattccccaaaattcccaccaagacatttaggggattttggggaattttgcaaaggtctcggacagtattttgaacgcagtgcgcgtaaatccgtatggaaaccatga

SEQ ID NO: 39857 - DNA, 1077 bp, Neisseria meningitidis
atgcaagaatggttccaaaacctctttgccgcaacgctcggtctgggcgatttgggcatcaccgtaggcttggtggtatccgtcatcgtcaaaatcgtgattatcctgattccgctgattctgaccgttgcctacctgacgtatttcgaacgtaaagtcatcggcttcatgcagcttcgcgtcggtccgaacgtaaccggcccatggggtctgattcagccgtttgccgacgtgttcaaactcttgtttaaagaggtaacccgtccgaagctgtcaaacaaagccctgttctacatcggcccgattatgtcgcttgcaccgtcttttgcggcatgggcagtgattccgttcaacgaagaatgggtgctgaccaatatcaatatcggccttttgtacattctgatgattacctcgctgtcggtttacggcgtgatcatcgcgggctgggcttccaactccaaatattcgttcttgggtgcaatgcgtgcttccgcacaaagcatttcctacgagattgccatgagtgccgcgctggtgtgcgtcgtgatggtgtcgggcagcatgaacttctccgacatcgttgccgcgcaggcaaaaggtatcgcgggcggttccgtattctcgtggaactggctgccgcttttccccatcttcatcgtctatctgatttccgccgttgccgaaaccaaccgcgcgccgtttgacgtggcagagggtgagtctgaaatcgttgccggccaccacgtcgaatactccggcttcgcattcgcgctgttcttccttgccgaatacattttcatgattctgattgccgcgctgacatcgctgatgttcctcggcggctggttgtctccgttcccgcaaagctggggcattgtcggtacgccttccgcattctggatgtttgtgaaaatggcggcagtgttgtactggtacctgtggatccgtgcaaccttcccgcgctaccgttacgaccaaatcatgcgtttgggctggaaagtgctgattccgatcggcttcgcctacatcgtggttttgggcgtgtggatgatttcaccgctgaatttgtggaaataa

SEQ ID NO: 39858 - DNA, 1911 bp, Neisseria meningitidis
atgactctggaaaccctgatcgccctgccgcgcaacatcaagaaaatctgtttcctcatacacgattttctgatgattttcattgccttttggttcacccaaagcctaaaggccgaatactcggacgaatggttcgattttgccaactggcagtcttttttgctgactgccttgctgaccatcacattatttatccgaatggggctttaccgcgccgttacacgcttcgtcagcttccgcatcctctccaccgcgctggcaggcagcattgtttccgccgtcctgttcttcctcaacacattgatttttgaagaaaggctgcgcctcgccctgccgattgtctatttcttactgctgtttgtttccgtgaccggctcgcgtatggttttgcgcggactgttgtccgaacaccccaaaaaacagatgatccctgtcatcatttacggcgcgggacggtcgggcagacaactgcttgaggccgtcaaacaaatgcgcgaatattccgccgccgcctttgtagacgacgaccccaaactgtggcacaccgtcatctacgaccttgccgtttaccagcccgatgccatcgccttcctcatcgaacgctacggcgtggaaaaaatcctgctcgccatccccggcgcgacccaggaacaacgccgccgaatcatcaacaaactggaagcctatccgtgcgaagtgttgaccattcccggaatgaaagacctgatggacggaaaaatcagcatcggcacgctcaaaaaaatctctgtgtccgacctgctcgggcgtgattccgtcgcgcccgacgaccgcctgatgagtgccgacatcgaaggcaaaaccgtcatggtaaccggcgcgggcggctccatcggttcggaactctgccgccagattatccgccgccgccccgaaaagctgctgctgttcgagttatccgaattcgccctgtacgccatcgaaaaagaattgcgcgaaacctgcatccaaaaacgcctcgacaccgaaatcctgccctttctcggttcggtgcaaaaccgcacgctgctcgaacacgtcatgaccgccttttccgttgcgaccgtctatcacgccgctgcctacaaacacgtccccatggtcgagttcaacaccgtcgaaggcatacgcaacaacatcttcggcacactcgagtgcgcgcttgccgccacgacatcgggcgtaagaactttcgtcctcatctccaccgacaaagccgtccgccccaccaacaccatgggtgccagcaaacgcatggcggaactctgccttcaggcactcgccgccgaacccggacaaaaaacccgcttcagcatggtacgtttcggcaatgttttaggttcgtccggctccgttgtcccgctgtttgaaaaacagattgcagaaggcggcccgcttaccctgacccaccccgaaatcacacgttatttcatgaccatacccgaagccgcccaactcgtcatacaggcaggcgcgatgggtacgggcggcgacgtattcgtcctcgacatgggtgaatccgtcaaaatcatcgaccttgcccgccaaatgattaccctaagcggcctcaaacccaacacacccgaacaacccgacggcgacatcgaaatcctcattaccggactgcgtcccggcgaaaaactctacgaagagctgctcatcggcgacaacgtccgcaaaaccgcccatccgcgcattatgacggctgacgaggcgatgctgccgtggcacgagctctccgccctgctcgaccgcatccgtgcggcctgcgaccgttacgaccagcaggcaatccgcaccctgctcatcaacgccccgaccggctttgccccgagcgacggcatctgcgacctgctttgggtacgagaaacacacagaaaaaatgccgtctga

SEQ ID NO: 39859 - DNA, 843 bp, Neisseria meningitidis
atgtgtcaactgctgggcatgaactgcaatacgccgaccgatattatgttttcctttgaaggcttccgccggcgcggcggcattaccgaccatcatgccgacggtttcggcatcggctttttcgaaggcaaaggcgtgcgcctgttccacgacgacaagccgagcgcaaattcccccgtcgccgacctcgtgcgtgcctaccaaatcaaatcggaaaacgtcatcgcacatatccgcaaagcatcgcaaggacaaacctcgctggcgaacacccatccctttatgcgcgaaatgtggggcggctactggctgtttgcccacaacggacatttgattgattttttccccgaacagggcgaatttttccaccccgtcggcacaaccgattccgaacgcgcgttctgccacatcctcaaccgcctgcgcacccgctttgccgcccgtcccgacgacgacacgctgtttgacgcgattgcggggctgacgcacgaaatccgcaagttcgggctgtttaactttatgctttcagacggcattgccctgtttgcccacgccagcacgctgctgcactacatcgtccgccaagccccgttcggcaaggcgcgcctgctcgacgacgacgtgatggtcgattttgccgaagtaaccacgccctccgaccgcgtcgccgttatcgccaccctgccactgacccgcgacgaatcatggtcccaacttgccgtggacgaactggtcatgttccgcgaaggcaacatcgtccgacacgaccgtcccgaaaaccccgtctatatgagtgccgaagaaggtctggaaatcgcccgcgccgccggcgtcgccgtctga

SEQ ID NO: 39860 - DNA, 411 bp, Neisseria meningitidis
atgacaacttataccattccaaaaaaagattatcaatttctgtatatatatgagggcactctattaaactatactttgaaaaacgatgaattccatatcatcgtccagaatgtggattatccggactttcctcaagagattcctacaccaaattatacagactgggtaaaaattaaattcaagcagttcagctatctgaaatttatctatggatacgccacgaagaaccaagataaaaatatcaaaaatgtattggaacttggagaattaaagcaggatgatgaaatcttggattatggaggtgcgctggaagtgataggcagtaggtatgatcttccgaccggttttagtatagatatagtttgccgggaaatagagttagaatttttagatcaggagagtttcaattaa

SEQ ID NO: 39861 - DNA, 2379 bp, Neisseria meningitidis
atgaaaccattacaaatgctccctattgccgcgctggtcggcagtattttcggcaatccggttttggcagcggatgaagctgcatctgaaaccacgcccgttaaggcagagataaaagcagtgcgcgttaaaggccagcgcaatgtgcctgcggctgtggaacgcgtcaaccttaaccgtatcaaacaagaaatgatacgcgacaataaagacttggtgcgctattccaccgatgtcggcttgagcgacagcggccgtcatcaaaaaggctttgccattcgcggcgtggaaggcaaccgtgtcggcgttagtattgacggcgtaaacctgcctgattccgaagaaaactcgctgtacgcccgttatggcaacttcaacagctcgcgtctgtctatcgaccccgaactcgtgcgcaacatcgacatcgtaaaaggggcggactctttcaataccggcagcggcgccttgggcggcggtgtgaattaccaaaccctgcaaggacgtgacttactgttgcctgaacggcagttcggcgtgatgatgaaaaacggttacagcacgcgtaaccgtgaatggacaaataccctcggtttcggcgtgagcaacgaccgcgtggatgccgctttgctgtattcgcaacggcgcggccatgaaaccgaaagcgcgggcaaccgcggctatccggtagaaggtgcgggtaaagaaacgaatatccgcggttccgcccgcggcatccccgatccgtccaaacacaaataccacagcttcttgggtaagattgcttatcaaatcaacgacaaccaccgcatcggcgcatcgctcaacggtcagcaggggcataattacacgattgaagagtcttacaacctgcttgcttcttattggcgtgaagctgacgatgtcaacagacggcgtaacaccaacctcttttacgaatggacgccggaatccgaccggttgtctatggtaaaagcggatgtcgattatcaaaaaaccaaagtatctgcggtcaactacaaaggttcgttcccgatagaggattcttccaccttgacacgtaactacaatcaaaaggacttggatgaaatctacaaccgcagtatggatacccgcttcaaacgcattaccctgcgtttggacagccatccgttgcaactcgggggggggcgacaccgcctgtcgtttaaaactttcgccagccgccgtgattttgaaaacctaaaccgcgacgattattacttcagcggacagatatcccgtaccaccagctcgattcaacaccctgtgaaaaccaccaactacggtttctcgctgtctgaccaaatccaatggaacgacgtgttcagcagccgcgcaggtatccgttacgaccacaccaaaatgacgcctcaggaattgaatgccgactgtcatgcctgcgacaaaaccccgcccgcaccgaatacttacagcggctggagcggtttcgccggtttggcggctcaactgaatcaggcttggcgtgtcggttacgacattacttccggctatcgcgtccccaatgcgtccgaagtgtatttcacttacaaccacggtgcgggcacatggctgcctagtcctaatctgaaagccgagcgcagcaccacccacaccctgtctttgcagggacgcggtgaaaaaggtacgctggatgccaatctgtatcaaagcaactaccgcaatttcctgtctgaagagcagaagctgaccaccagcggcactcccggctgtactgaggaaaatgcttactacggtatatgtagcgacccctacaaagaaaaactggattggcagatgaaaaatatcgacaaggccagaatccgcggtatcgagctgacaggccgtctgaatgtggacaaagtagcgtcttttgttcctgagggttggaaactgttcggctcgctgggttatgcgaaaagcaaactgtcgggcgacaacagcctgctgtccacacagccgctgaaagtgattgccggtatcgactatgaaagtccgagcgaaaaatggggcgtattctcccgcctgacctatctaggcgcgaaaaaggtcaaagacgcgcaatacaccgtttatgaaaacaagggctggggtacgcctttgcagaaaaaggtaaaagattacccgtggctgaacaagtcggcttatgtgtttgatatgtacggcttctacaaaccggctaaaaacctgactttgcgtgcaggcgtgtacaacctgttcaaccgcaaatacaccacttgggattccctgcgcggtttgtatagctacagcaccaccaatgcggtcgaccgcgatggcaaaggcttagaccgctaccgcgccccaggccgcaattacgccgtatcgctggaatggaagttttaa

SEQ ID NO: 39862 - DNA, 438 bp, Neisseria meningitidis
atggtggaagctaaaatttttattctatacggtgcagccaacaaaggtaagagtacgacactcaatacgctttttaatcagatttgtcggaaattttctaaatttctagtcttttttgaaagacatggaaacggcttagattttgttgcagtatttgatcatgaaggtcagaggattggtttttattcatctggtgataatgaatacgaggttaggagaaatttatacaaactttattcgcataattgtgattttatttttggcacgtcaaggacacggggtggtagttgcgatgcagtaggatgttatgcagagttattgcatggcgatgtaaatataattaattggtgtgaaaagtttgagcctacagatgaagacaatgagcgtgctgttaaagagttatttaagtcatttaaaaatataataaataagttatag

SEQ ID NO: 39863 - DNA, 369 bp, Neisseria meningitidis; identical to SEQ ID NO: 37026

SEQ ID NO: 39864 - DNA, 549 bp, Neisseria meningitidis
gtgtctcaaaacactccaatcaaaccttggtacaaacacgtctggccgtggatcttgatggcggggccgatttttgtcgtcatcgccagcgtcgctatgttttttgtcgcgcagcagcacgcgacagatttggttacggacgattattataaagacggcaaacatatcgacatccagcttcatcgggatgaagaagccgtcagacggcatatcggggtgcaggttctcatttcccccgatatgaatgcggcaaaagtgtttgtcggcggcgagtttgacggcaaacagcctttgaacctgctgctgatgcacccgacccgcaaggcggacgatcaaaccgtcgccctcaagcccgtcggcagtgcgcagaacggcagggcggaatatgaggcggtgttcaaaaccctttcgccgaccaaccactggtatgtgcgcgtggaggacgcggcaggcgtgtggcgcgtcgagaacaaatggattaccagccaaggcaatgcggtcgatttgaccccgatggacaagcttttcaataatactgaaagcaaataa

SEQ ID NO: 39865 - DNA, 1911 bp, Neisseria meningitidis; identical to SEQ ID NO: 39858

SEQ ID NO: 39866 - DNA, 300 bp, Neisseria meningitidis
atgcattatttcagtattcatgaccaatcgggacggcatataggctttttcatcctgcttgccgacgacgaatcggaagcacggccgcaaagcgggcgttttgccgtcaaacttgaaggcggaatggaaaatcatgtcctgtcgccgttcggtcagacggaaatcccccaatattggcgcgtggtcaaagaccgtatcgagctgttttttgacgaagctcccgtcggaactttgcgtaacgaatatctgaccgtgtcggggcagacttttgttttgaacgatttgacagggaatatgtga

SEQ ID NO: 39867 - DNA, 1929 bp, Neisseria meningitidis
atggcaaaagtaatcggtatcgacttaggtacaaccaactcttgtttggccatttccgaaaacggtcaaaccaaagtgatcgaaaacgcagaaggcgcacgcaccacgccgtccgttatcgcttatttggacggcggcgaaatcctcgtcggtgcgcctgccaaacgccaagccgtaaccaacgctaaaaacaccatttacgccgccaaacgcctgatcggccacaaatttgaagacaaagaagtccaacgcgacatcgaatctatgcctttcgaaatcatcaaagccaacaacggcgacgcatgggtaaaagcacaaggcaaagagctgtctcctcctcaaatttccgcagaagtcctgcgtaaaatgaaagaagccgccgaagcttacttgggcgaaaaagtaaccgaagccgtgattaccgtccctgcctacttcaacgacagccaacgtcaagctaccaaagacgcaggccgtatcgccggtttggacgtgaaacgcatcatcaacgagccgaccgcagccgctttggcattcggtatggacaaaggcgacaacaaagaccgcaaagtagccgtatatgacttgggcggcggtactttcgatatttccatcatcgaaatcgccaacctcgacggcgacaaacaatttgaagtattggctaccaacggcgatactttcttgggcggtgaagacttcgaccaacgcctcatcgaccacatcatcgccgagttcaaaaaagaacaaggcattgatttgaaacaagacgtcatggctctgcaacgtctgaaagaagctgccgaaaaagccaaaatcgaattgtccagcggccagcaaaccgaaatcaacctgccgtacatcaccatggacgcaaccggcccgaaacacttggcgatgaaaattacccgcgccaaattcgaaagcctggttgaagacctgattgcccgctctatcgagccttgccgcaccgcattgaaagatgccggtctgagcactggcgacatcgacgacgtgattttggtcggtggtcaaagccgtatgccgaaagtacaagaagccgttaaagacttcttcggcaaagagccgcgcaaagacgtgaaccctgacgaagctgtcgccgtaggcgcagcgattcaaggcgaagtgttaagcggcggccgcagcgacgtattgctgctggacgtaacccctctgtccttgggtatcgaaaccatgggcggcgtgatgaccaagctgattcaaaagaacaccaccatcccgaccaaagcgtcgcaagtgttctctaccgccgaagacaaccaaagcgcagtaaccatccacgtactgcaaggcgaacgcgaacgcgcttctgccaacaaatctttgggtcagttcaacttgggcgacatcgcacccgcaccgcgcggtatgccgcaaattgaagttactttcgacatcgacgccaacggtatcctgcacgtttccgccaaagacaaaggcactggcaaagcagccaacatcaccatccaaggttcttcaggtttgagcgaagaagaaatcgaacgcatggtgaaagatgccgaagccaatgccgaggaagataaaaaactgactgaattggtcgcttcccgcaaccaagccgaagccctgattcactctgtgaaaaaatctttggccgactacggcgacaaactcgacgcagccgagaaagaaaaaatcgaagccgcgctgaaagaagccgaagaagcagttaaaggcgacgacaaagccgctatcgatgccaaaaccgaggcgctgggcgcagccagccaaaaactgggggaaatggtttacgctcaagcacaagctgaagcccaagcaggcgaaagcgaacaagccaatgcttctgcaaagaaagacgatgatgtcgtagatgccgactttgaagaagtaaaagacgacaaaaaataa

SEQ ID NO: 39868 - DNA, 1035 bp, Neisseria meningitidis
atgagtacttcattgagttaccgcgatgcaggtgtcgatatcgacgcaggcgaccaactggtcgaaaacatcaaaccgtttgccaaacgcaccatgcgtccggaagtattgggggatttgggcggttttggcgcattggtcgaaatcggcaagaaatataaaaatcccgtattggtcagcggtacggacggcgtgggtaccaagctcaaacttgccttcgattgggataaacacgatacggtgggcatcgaccttgttgcaatgagtgtcaacgatattttggttcaaggagcagaacctctgtttttcttggattatttcgcctgcggcaaattggatgttccgcgcgcaaccgatgtcatcaaaggcattgcacaaggttgcgaagaatccggctgcgccctgattggcggggaaactgccgaaatgccgggtatgtatcccgtcggagaatacgatttggcgggttttgccgtcggcgtagtggaaaaagagaatgtcattaccggccgcagcatcggcgcgggcgatgtggtattgggtttggcttccaacggcgcacattcaaacggctattcccttatccgtaaaatcatcgaacgcgacaatcccgatttggatgccgagtttgataatggcaaaaccttgcgtgaggctgttattgcgccgacccgtctgtatgtgaaaccgattcttgccgctttggaaaaatttaccattaaaggtatggcacacattaccggcggcggcattaccgaaaacgtgccgcgcgtgttgcctgaaaacacggttgcacaaatcgatgctaaatcgtgggaattgcccaagctcttccaatggcttcaaaaggcgggcaatgtggaaacccaagaaatgtaccgaacctttaactgcggcatcggcatggtcgttattgttgctgccgaagatgccgatgcggttcagggtctcttgggtgaacaaggtgaaacagtttaccgtttaggtttgatccgtgagcgtcagggagacgagcatcaaacccaggttgcctga

SEQ ID NO: 39869 - DNA, 1722 bp, Neisseria meningitidis
atgccgtctgaagccatctgttcaaagaaaactatgctcaataaagaccaatttgcggacaaccattttatccgcaccttcatcgaagaagacctcaaaagcggcaaacacgaaaccatccaaacccgttttccgccggagcccaacggctacctgcacatcggacacgccaaatccatctgcctgaacttcggtttggcgtatatttacgacggcttgtgcaacctgcgttttgacgataccaaccccgaaaaagaaaacgacgaatacgtcaacgccatcaaagaagacgttgagtggctcggtttccattgggcgggcgagccgcgtttcgcttccaactatttcgaccagctttatgactacgccgtcggtttggttaaagacggcaaagcgtatgtcgatgatttgacgccagaagaaatgcgcgaataccgcggtacgctgaccgaagcaggcaaaaacagcccttatcgcgaccgcagtatcgaagaaaacctcgacctgttcacgcgcatgaaaaacggtgagttccccgacggcagcaaaaccctgcgcctgaaaatcgacatggcatccggcaacatcaatatgcgcgatccggtcatctaccgcatccgccgcgcccatcaccacaacaccggcgacaaatggtgcatctatccgatgtacgactacacgcattgtatttccgatgccatcgaaggcatcacgcattccttgtgtacgctcgaatttgaagcccatcgtccgctgtatgactgggtgttggacaacatccccgcgccgcacgccacacgtccgcgccaatacgagttttcacgcttggagcttttgtacaccattacctccaaacggaaattgaatcagttggttgtggaaaaacacgtttccggctgggacgatccgcgtatgccgaccatttccggtatgcgccgacgcggctacacgcccgaagggctgcgcctgtttgccaaacgcgccggtatttccaaatctgaaaacatcgtcgatatgagcgtgttggaaggcgcgattcgcgaagagttggaaaattccgccccacgcctgatggcggtgttgaacccgctcaaagtgaccctgaccaactttgaaaccggcagaacccaaagccgccgtgccgcgttccatccgaaccacgaggaaatgggcgagcgcgaagtacctatttcacaaaccatctatattgaagccgacgactttgccgaaaatccgcccaaaggcttcaaacgcctgattcccggcggcgaagtacgcttgcgccacggctatgtcatcaagtgcgatgaagtcgtcaaagacgaagcaggcaatgtggttgaactcaaatgcagcatcgaccacgacaccttgggcaaaaatccagaaggccgtaaagttaaaggcgtgattcattgggtttccgccgaacacgccgccgaaatcaaagtccgtctgtacgaccgcctctttaccgtcgagcgtcccgatgccgtgcgcggcgaagacggcgaatacctgccgttcaccgatttcctcaatccggaatccgtcaaggaaatcaccgcctacgccgaacctgccgccaaagatttgccggcagaaagccgttggcagttcgagcgtatcggctacttcgtaaccgaccgtaaagaccacggcaaagacacgccggtgtttaaccgcacggtcacgctgaaagattcttggcagcctaagtaa

SEQ ID NO: 39870 - DNA, 291 bp, Neisseria meningitidis
atggatgatctaatactatattttttatcaggtatattcggaaatcaagttgctgaatatattataaaaaacaaccgtgagataaaagttccctttattgtgctttacgcaatattttttacgttgatttatactgtggctttgttgtttctcagtctaatctattgggtcaatggtgcggagattgcatggaaggggataggtattttcagtatgtcggtcagtttttgtatagtcttctgtctttatttgattgacaaggcaggaagatgtaaggataagaaacaatag

SEQ ID NO: 39871 - DNA, 171 bp, Neisseria meningitidis
ttgggtctaggctcaacctgcgtttgctgcatctttggaagaaatagtggattcgaaaaaataggaagaattctgattaatggtatgcgaggtgtagcagtggggactgttgctggtggcataactggttatgcaggttctacgggtaagaacactgacattcgccgttaa

SEQ ID NO: 39872 - DNA, 919 bp, Neisseria meningitidis
ttggcagccgatcgaacagtacctgaaccgtcaaaaaacccgttaccttcgagaccaccgcggccgtcccgcctacccgctgttgtccatgttcaaagccgtcctgctcggacaatggcacagcctctccgatcccgaactcgaacacagcctcattacccgcatcgatttcaacctgttttgtcgttttgacgaactgagcatccccgattacagcaccttatgccgctaccgcaactggctggcgcaagacgacaccctgtccgaactgttggaactgatcaaccgccaactgaccgaaaaaggtttaaaaatagagaaagcatccgctgccgttgttgacgccaccattattcagaccgccggcagcaaacagcgtcagaccatagaagttgacgaagaaggacaaatcagcggccaaaccacaccgagcaaagacaaagatgcccgttggatcaagaaaaacggcctctacaaactcggttacaaacaacatacccgcaccgatgcggaaggctatatcgagaaactgcacattacccccgccaatgcccatgagtgcaaacacctgccgcctttgctggaagggatagctgaaggtacgaccgtctatgccgacaaaggctatgacagtgcggaaaaccggcaacatctggaagaacatcagttgctggacggcattatgcgcaaagcctgccgcaaccgtccgctgtcggaagcgcaaaccaaacgcaaccgatatttgtcgaagacccgttatgtggtcgaacaaagcttcggtacgctgcaccgtaaattccgctatgcgcggtcaacctatttcggactgattaaagtgagtgcgcaaagccacctgaaggcgatgtgtttgaacctgttgaaagccgccaacaggctaagtgcgcccgctgccgcctaa

SEQ ID NO: 39873 - DNA, 1467 bp, Neisseria meningitidis
atgatgaaattgggtttcaaaccgatacccctcgccattgccgcagtattgtgcgccctggttttggcactgcccgtacccgacggggtcaagcctcaggcttggacgctgctggccatgtttgtcggtgtgattgccgccattatcggcaaggccatgccgttgggcgcgctgtcgattattgccgtcgggttggtcgcagtaaccggcgtaaccgccgacaaaccgggcgcggcgatgagcgatgcgttgagtgcgttcgccaatccgttgatttggctgattgccatcgcagttatgatttcgcgcggtttgctcaaaacagggctggggatgcgtatcggatatttgtttatcgccgtttttggaagaaaaacgctgggcatcggttacagtctcgctctttccgaactgctgctggctcccgttaccccttccaataccgcgcgcggcggcggcattatacatccgattatgcagtcgattgccggcagttacggctccaatcccgcaaaaggcacagaaggcaagatgggtaaatatttggctttggtcaactatcattccaatcccatttcgtcggctatgtttattactgcaactgcccccaaccctttaatcgtcaacttgattgccgaaaatttaggcagtagtttccgtctttcttggggggcgtgggcgtgggcaatggctgttcccggcgttatcgcctttttcgttatgcctttgattttatattttttgtatccgcctgaaattaaagaaacgcccaatgccgttcaatttgccaaagaccgtctgagggagatgggtaaaatgtcggcagacgaaatcattatggcggtcattttcggtatcttgctgctgttgtgggcagatgttcccgcccttattaccggcaatcacgcttttagtatcaacgccaccgccaccgcatttatcggattaagcctgcttttgctttccggtgtattgacttgggacgatgttttgaaagaaaaaagtgcgtgggatacgattatttggtttggcgcattgattatgatggccgcatttttaaataaactcggactgattaaatggttctccggagtgttggcggaaagtgtcggcggtttgggcgttagcggcacggctgcgggcgtaatcctcgtgcttgcttatatgtatgcgcattatatgtttgccagtactactgcacatattaccgctatgttcggcgcatttttcgctgctgccgtttcactgaatgccccggcgatgccgaccgcgctgatgatggcggccgcatctaacattatgatgaccctcactcattatgcgaccggtacttcgcctgtgattttcggttcgggctacaccacaatgggagaatggtggaaggcgggttttatcatgagcgtagtcaattttctgatttttttcgttatcggcagcatttggtggaaagttctggggtattggtaa

SEQ ID NO: 39874 - DNA, 918 bp, Neisseria meningitidis
atgaaaaaaaccaaagtccacctgatttcaggttttctgggaacaggcaaaaccactgcgctcaaaagcctgatggcgcaaaaagacccgaacgaaaaatgggtcatcatcgtcaacgagttcggcgaaatcggcattgacggcgcggtattgagcgacaacggtatccctgtggcagaaatcgccggcggctgtttgtgttgcaccgccggcccgcaaatgggcgtaaccgtgcagaaaatgctgcgcgacgccaagcccgaccgcctgatgattgaagcaagcggactggctcacgcagccagcgtcatcgacgaactcaaagccaaaccgctggacagccttttggaaatcggcgccgtctttaccgtcgtcaatccgcgccagttcatcaaccccgattacgcgcaacaggcgttgtataaagaccaaatcggcatctgcgacgtattggtcgccagcaaaaccgatttatgcacccccgaacagcttgccgaatttcacgacaaagcggcaaaactgttcccgcccaaagccaaagtggttgaagtccaaaacgcacaactcgacatccggtggctcgatattcccgtcatcgaaaaatcacgctaccgcctcaaagccctgccggataataccatgggcttccagtcgcaaggtttcacattccccgccggacgcgatttcgacggcgaaaagctgaccaactttttcaacgacctgcccaaaatgaccgaaggactcgtccgcgccaaaggcgtgtttcaagtattgggaacgtgggtgtggctcaactgggtagacggacagtggggcgcgaaccaagtctcatggcggcgcgattcgcgttttgaattgattgccaaatcgtttgatgcggatttaatcgaacaaaagctcaaagacgcattggaatag

SEQ ID NO: 39875 - DNA, 2277 bp, Neisseria meningitidis
atggcacaaactacactcaaacccattgttttatcaattcttttaatcagcacccccatcctcgcccaagcgcatgaaaccgagcagtctgttgacttggacgaggttaccgtcgtcggcaaaagccgtccgcgcgccacatccgggctgttgcacacttcgaccgcttccgacaaaatcctctccggcgataccttgcgccaaaaagccgtcaacttgggcgatgctttggacggcgtgccgggcattcacgcctcgcaatacggcggcggcgcgtccgctcccgttattcgcggtcaaacaggcaggcggattaaagtgttgaaccatcacggcgaaacgggcgatatggcggatttttcgcccgatcacgccattatggtagataccgccttgtcgcaacaggtcgaaatcctgcgcgggccggttacgctcttgtacagctcgggcaatgtggcggggctggtcgatgttgccgatggcaaaatccccgaaaaaatgcctgaaaacggcgtatcgggcgaactcggattgcgtttgagcagcggcaatctggaaaaactcacgtccggcggcatcaatatcggtttgggcaaaaactttgtattgcacacggaagggctgtaccgcaaatcgggggattacgccgtaccgcgttaccgcaatctgaaacgcctgcccgacagccacgccgattcgcaaacgggcagcatcgagctgtcttgggttggcgaaaaaggctttatcggcgcagcatacagcgaccgtcgcgaccaatatggtctgcctgcccacagccacgaatacgatgattgccacgccgacatcatctggcaaaagagtttgattaacaaacgctatttgcagctttatccgcacctgttgaccgaagaagacatcgattacgacaatccgggcttgagctgcggctttcacgacgacgatgatgcacacgcccatgcccacaacggcaaaccttggatagacctgcgcaacaaacgctacgaactccgcgccgaatggaagcaaccgttccccggttttgaagccctgcgcgtacacctgaaccgcaacgactaccgccacgacgaaaaagcaggcgatgcagtagaaaacttttttaacaaccaaacgcaaaacgcccgtatcgagttgcgccaccaacccataggccgtctgaaaggcagctggggcgtgcaatatttgggacaaaaatccagtgctttatctgccacatccgaagcggtcaaacaaccgatgctgcttgacaataaagtgcaacattacagctttttcggtgtagaacaggcaaactgggacaacttcacgcttgaaggcggcgtacgcgtggaaaaacaaaaagcctccatccgctacgacaaagcattgattgatcgggaaaactactacaaccatcccctgcccgacctcggcgcgcaccgccaaaccgcccgctcattcgcactttcgggcaactggtatttcacgccacaacacaaactcagcctgaccgcctcccatcaggaacgcctgccgtcaacgcaagagctgtacgcacacggcaaacacgtcgccaccaacacctttgaagtcggcaacaaacacctcaacaaagagcgttccaacaatatcgaactcgcgctgggctacgaaggcgaccgctggcaatacaatctggcactctaccgcaaccgcttcggcaactacatttacgcccaaaccttaaacgacggacgcggccccaaatccatcgaagacgacagcgaaatgaagctcgtgcgctacaaccaatccggtgcggacttctacggcgcggaaggcgaaatctacttcaaaccgacaccgcgctaccgcatcggcgtttccggcgactatgtacgaggccgtctgaaaaacctgccttccctacccggcagggaagacgcctacggcaaccgcccactcattgcccaagccgaccaaaacgcccctcgcgttccggctgcgcgcctcggcgtccacctgaaagcctcgctgaccgaccgcatcgatgccaatttggactactaccgcgtgttcgcccaaaacaaactcgcccgctacgaaacgcgcacgcccggacaccatatgctcaacctcggcgcaaactaccgccgcaatacgcgctatggcgagtggaattggtacgtcaaagccgacaacctgctcaaccaatccgtttacgcccacagcagcttcctctctgatacgccgcaaatgggccgcagctttaccggcggcgtgaacgtgaagttttaa

SEQ ID NO: 39876 - DNA, 1029 bp, Neisseria meningitidis
atggaggcacgcccgccccgggtaaatgaagcccaagccccccgcgcggatgaaatgaaaaaagaaagccgccccgcgtttgacgcggcagccgtaccggtatccgacagcgggtttgccgccaatgcaaatgtccgccgttttgtggacgatgaagtcgggaaaggggatttttcccgggcggaatggcaggatttttttgacaaagcggcttacaaggcggacatcgtcaagattatgcaccgaccctccacatcgcgtccgtggtatgtgttccgcacgggaaattcgggcaaggcgaaatttcgcggcgcgcgccggttttatgcggaaaaccgcgcgcttatcgatgatgtggcgcaaaaatacggcgtgcctgccgaacttatcgtggcggttatcgggattgaaacgaattacggcaaaaatacgggcagtttccgtgtggcggacgcattggcgaccttaggctttgattacccccgccgcgccgggtttttccaaaaagaattggtcgagcttttaaagctggcaaaagaagaaggcggcgatgttttcgcctttaaaggcagctatgcgggcgcaatggggatgccgcaatttatgccttcgagctaccggaaatgggcggtggattatgacggggacggacatcgggacatatggggcaacatcggcgatgtcgcggcatcggttgccaattatatgaagcagcacggttggcgcacgggcgggaaaatactggtgtctgcaacattggcgccgggtgcggatgttcaggcaatcattggcgaaaaaaccgccctgacgcggacggtggcggatttgaaggcgtacggcatcatccccggcgaagagcttgccgatgatgaaaaggcggttttgttcaaactggaaaccgcacccggcgtgtttgaatattatttgggcttgaacaatttttatacggtatggcagtacaatcacagtcggatgtatgtaacggcggtcagggacattgccaattcgcttggcggcccgggattgtaa

SEQ ID NO: 39877 - DNA, 1443 bp, Neisseria meningitidis
atgaaacaattggccatgtacatcaacggacgctttgaaaacgatttcaacggcgaatggcgcgacgtattgaacccgtccaccgaagaggccatcgcccgcgaacccaaaggcggcagggcggacgttgaccgcgccgtagcggcggcgcgtgcggcgcaaccggcttgggagcgtctgcctgcggtcgaacgcggcgcgtatttgcgcaaaatcgcccaaggcatacgcgaacgcgccgacgagctgaccgacaccatcgttgccgaaggcggcaaaaccaaagacttggcgcgcgtggaagtgatgttcaccgccgactatctcgattaccaagccgaatgggcgcgccgttacgaaggcgaaatcatccaaagcgaccgcccgcgcgaaaacattttattgttcaaacgtccgctgggcgtaattgccggcattttgccgtggaacttccctttcttcctgattgcccgcaaaatgggtcccgccttagtaacgggcaacaccatcgttgtcaaacccagcagcgtaaccccgatcaactgccacatcttcgccgaaatcgtcgatgcggtcggattgcccgcaggcgtgttcaacgtggtgaacggtccgggtgcggaaatcggcaatgccttgtctgcccatccgcaagtcgatatggtcagcctgaccggctccgtcgaagcaggccgccaagtgatggaagccgcttccgccaacatcaccaaagtttcgctggaactcggcggcaaagcccccgccatcgttttgaaagacgcggatttggatttggcggtgaaatccatcttggcttcgcgcgtcggcaacaccggtcaaatctgcaactgcgccgagcgcgtctatgtccacagcagcctgaaagacgcgttcattgaaaaaatgaccgccgccatgaaaggcgtgcgctacggcaaccctgccgaagccgaagcaggcgcgctggaaatgggtccgctgattgaagagcgcgccgtcaaagccgttgccgaaaaagtggaacgggcagtcaaacaaggtgcgaaactggtctgcggcggcaaacgcgccgaagggcgcggctatttcttcgagccgaccctgctgaccgacaccgacaacagtatggacattatgaaagaagaaaccttcggccccgtgctgcccgtttccgctttcgacacgctcgaccaagtcatcgcactggctaacgattgcgagtttggtctgaccagttctgtttatacgactaatttaaacgaagccttctacgttacccgccgcctgcaattcggcgaaacctacatcaaccgcgaaaacttcgaagccatgcagggtttccacgcgggctggaaaaaatccggcatcggcggcgcggacggcaaacacggtttggaagaatatctgcaaacccaagtcgtttatctggaaaccgacatttaa

SEQ ID NO: 39878 - DNA, 534 bp, Neisseria meningitidis; identical to SEQ ID NO: 37791

SEQ ID NO: 39879 - DNA, 552 bp, Neisseria meningitidis
ttgagcggcatcaacatcaaactcaaaagcggcgattccctgctgatacgcggcccgagcggttgcggcaaaacttcgttgctgtgcgcgctggctgggctttggccgttcggcagcagcggcaaagtcagccgtccgccgcatcaagacatcctcttcctgccgcaacgcccgtacacggcgcaaggcagcctacgcgacgcggtttgttatccggacatcgacaaacagcatcccgagttagccgaagccatgaacacctgccgcttgggttatctgattgacaaattggacaaaacagccgactggcagcacaaactctcccctggcgaactgcaacgcgtcgccttcgtccgcgccctgctttccaagcccaaaatcgtcctgctcgacgaagccaccgccgccttggacgaaccggccgaagccgcactctaccgcgccttaaagcaaaaactgcccgacagcatcatcatcagcatcggacaccgaagcacgctcaacacgttccacaatatgcacctcaatgtcggcaacgttgcctgcgactga

SEQ ID NO: 39880 - DNA, 714 bp, Neisseria meningitidis; identical to SEQ ID NO: 37885

SEQ ID NO: 39881 - DNA, 606 bp, Neisseria meningitidis
atgacaataatgaatatcaatacttccgaaaataaagatgctgttgccgaacacaccggacaatggttggaaaaagccgtcatcggtctgaacctgtgtccctttgccaaagccccccacgttaaaaaccttgtccgcatcgcaatcagcgaagccaaacaccttgacagttttttggaagacttggacgaagaactgcagcgactgggcaatacacccgccaccgaactggaaaccaccctgctggttcacccgaccctattccccgatttcgacgtattcaacgatatgctcgatattgccgatgccgccgttatcgaaaacggcttggaaggcatcgtccaaatcgcaccgttccatccccaattccgctttcagaataccgaacccgacgacatcggcaactacaccaaccgttctccctatccgacgctgcacctcatccgcgaagacagcattgccaaagccgcacaagcctttcccgacgcttcggcaatattcgaacgcaatatcgccctgctggaaaaaatgggacatgaaggctgggcaaaactcggtatcacatcctgcccttatccgcacaataagaaaaatatttcaaaatga

SEQ ID NO: 39882 - DNA, 1467 bp, Neisseria meningitidis
atggttattttttatttttgtgggaagacatttatgcctgcacgaaacagatggatgctgctgctgcctttattggcaagtgcggcatatgccgaagaaacaccgcgcgaaccggatttgagaagccgtcccgagttcaggcttcatgaagcggaggtcaaaccaatcgacagggagaaggtaccggggcaggtgcgggaaaaaggaaaagttttgcagattgacggagaaaccctgctgaaaagtcccgaattgttgtcccgcgcgatgtattccgcagtggtctcaaacaatattgccggtatccgcgttattttgccgatttacctacaacaggcgcagcaggataagatgttggcactttatgcacaagggattttggcgcaggcagacggtagggtgaaggaggcgatttcccattaccgggaattgattgccgcccaacccgacgcgcccgccgtccgtatgcgtttggcggcagcattgtttgaagacaggcagaacgaggcggcggcagaccagttcgaccgcctgaaggcggaaaacctgccgccgcagctgatggagcaggtcgagctgtaccgcaaggcattgcgcgaacgcgatgcgtggaaggtaaacggcggcttcagcgttacccgcgaacacaatatcaaccaagccccgaaacggcagcagtacggcaaatggactttcccgaaacaggtggacggcacggcggtcaattaccggctcggcgcggagaaaaaatggtcgctgaaaaacggctggtacacgacggcgggcggcgacgtgtccggcagggtttatccggggaataagaaattcaacgatatgacggcaggcgtttccggcggcatcggttttgccgaccggcgcaaagatgccgggctggcagtgttccacgaacgccgcacctacggcaacgacgcttattcttacaccaacggcgcacgcctttatttcaaccgttggcaaaccccgaaatggcaaacgttgtcttcggcggagtgggggcgtttgaagaatacgcgccgggcgcgttccgacaatacccatttgcaaatttccaattcgctggtgttttaccggaatgcgcgccaatattggatgggcggtttggatttttaccgcgagcgcaaccccgccgaccggggcgacaatttcaaccgttacggcctgcgctttgcctgggggcaggaatggggcggcagcggcctgtcttcgctgttgcgcctcggcgcggcgaaacggcattatgaaaaacccggctttttcagcggttttaaaggggaaaggcgcagggataaagaattgaacacatccttgagcctttggcaccgggcattgcatttcaaaggcatcacgccgcgcctgacgctgtcgcaccgcgaaacgtggagtaacgatgtgttcaacgaatatgagaaaaatcgggcgtttgtcgagtttaataaaacgttctga

SEQ ID NO: 39883 - DNA, 363 bp, Neisseria meningitidis; identical to SEQ ID NO: 37674

SEQ ID NO: 39884 - DNA, 3153 bp, Neisseria meningitidis
atgaataaaacttggaaacggcaggttttccgccataccgcgctttataccgccatattgatgttttcccataccggcgggggggggcaggcgcaagcgcaaacgcaaacgcataaatacgctattgtaatgaacaatcaaaagctgcctgaggtaaagtgggggaacgactatagctcattgacggacaaaagcaatgaacgcgaagttacccatacgagtaaatttgttgtagcaaaaaagcacattagtttctcattcaataataccgatgaagttgttgctgaaaaaaaagatgctgtcgttttcggcgcggcgacttatctgccgccctacggcaaggtttccggttttgataccgctaagctggccgagcgcaaaaatgcccttgatcagattggtacgacccaccctgggttgataggctacaactaccaagatgtcacttgcgccagcggaaactgtcctgaacttagctatagaacccaatttaccttcaataacgggttgaaaagaaatggaaacggcggcaggctggatatatacgaagacaaaagccgcgacagttcgcccatttacaaattgaaggattatccttggttgggcgtgtctttcaatttgggcggcgagagctccttcaaaccaaagagacaaggttctttggtatcttcttttagcgaggatgtgacgcagcaaaatggtacacaagaccaatacaaaagcaaaaacctcgtttatacgacagacgattacaatagtaagggtaataaaaaccatcaggacaaacaccacgccgtcgccttttatctgaacgccaagctgcatttgctggataaaaaacaaatcaaaaatatcgcgcaaggcgtaacagttgatttgggtaccttgaaaacacgcatcgagccgacggacgcgtggaaaaacaggcaggggagctattttaataatggtacttggacgtatgaagagaaaggatcagtcagcgtcaaactcaaattgccggaagtcaaagcaggccgctgcatcaataaaccgaaccccaatcccaacaaaaaagccctttcgccggcactgactgcccccgcgctgtggttcggagctgggcaagatggtaaggcggagatgtattccgcttcggtttccacctaccccgacagttcgagcagccgcattttccttcaaaatctgaaaagaaaagacgaccccaacaaacccggccgccattccctcgaacccttgaatgatacgcagattaaaagtaaagagccgactttcacagggcggcaaacaatcatccgattggatggcggcgtacagcagatcaaacttcaagacaatgaggtcactagttttaatgtaaacaacggcaacaacactttcggcattgttaaggacttgggcgtcgatcctgatgccagcgagtggaaaaaagtgctgctgccttggacggttcgggattctgctgatgacagtaaatttaaagcattcaacaaagaagaaaacaacgacaacaagccaaaatacagtcaaaaataccgcagccgcgacaacaacaatcgcgatttgggcgacatcgtcaacagccccatcgtggcggtcggcgggtatttggcaaccgccgcgaacgacgggatggtgcatatcttcaaaaaaaacggcggcagtgatgaacgcagctacaatctgaagctcagctacatccccggcacgatgccgcgccaatattttgataacgacacttccgctctcaaagactccaccctcgccaaagagctgcgcgcctttgccgaaaaaggctatgtgggcgaccgctacggcgtggacggcggctttgtcttgcgcgaagtcgaacgggacgggaaaacccgcgtgtttatgttcggcgcgatgggttttggcggcagaggcgcgtatgccttggatttgaccaaagccgacggcagtgacccgaccgccgtttccctgtttgatgtcaaaaatgacgataaaaacaataatggcgtgaaattaggctacaccgtcggcacgccgcaaatcggcaaaacccacaacgacaaatacgccgccttcctcgcctccggttatgcgactaaagaaattaccagcggcgagaataaaaccgcgctgtatgtgtatgatttggaaagcagcggtacgctgattaaaaaaatcgatgtacccggcggcaagggcgggctttcgtcccccacgctggtggataaagatttggacggcacgatcgatatcgcctatgccggcgatcgcggcgggaaaatgtaccgctttgatttgagcggtcaagatcctaatcaatggtctgtacgcgccatttttgaaggcacaaaaccgattacttccgcgcccgccatttcccaactgaaagacaaacgcgtggttatcttcggcacgggcagtgatttgagtgaggaggatgtactcagtacggatgaacaacatatttacggtatttttgacaatgacacaaacacaggtgtggcgaaagacgggcagggcaacgggctgctcgagcaagtgctggaaaaagacaaagacggcaaaacgctgttcttaagcgactacaaaaggtctaacggctcgggcgacaagggctgggtagtgaagctgaaggaaggacagcgcgttaccgtcaaaccgaccgtggtattgcgtaccgcctttgtaaccatccgcaaatataacgacggcggctgcggcgcggaaaccgccattttgggtatcaataccgccgacggcggcaagctgaccaagaaaagcgcgcgcccgattgtgccggacgccaataaggatgtcgcgcaatattccggtcataagaaaggcaccaacggcaaatccatccctataggttgtatggaaaaaggcaatgaaatcgtctgcccgaacggatatgtttacgacaaaccggttaatgtgcgttatctggatgaaaagaaaacagacggattttcaacaacggcagacggtgatgcgggcggcagcggtatagaccccgacggcaagcgtgccggcaaaaacaaccgctgcttctcccaaaaaggggtgcgcaccctgctgatgaacgatttggacagcttggacattaccggcccgacgtgcggtatgaaacgaatcagctggcgtgaaatcttctactga

SEQ ID NO: 39885 - DNA, 1869 bp, Neisseria meningitidis
atgcaagctgtccgatacaggcctgaaattgacggattgcgggccgttgccgtgctatccgtcattattttccacctgaataaccgctggctgcccggaggattcctgggggtggacattttctttgtcatctcgggattcctcattactaacatcattctttctgaaatacagaacggttctttttctttccgggatttttatacccgcaggattaagcggatttaccctgcttttattgcggccgtgtccctggcttcggtgattgcctctcaaatcttcctttatgaagatttcaaccaaatgaggaaaaccatagagctttctacggtttttttgtccaatatttatttggggttccgattggggtatttcgatttgagtgccaacgagaaccccgtactgcatatttggtctttggcagtagaggaacagtattacctcctgtatcctcttttgctgatattctgctacaaaaaaacaaaatcgctacgggtgctgcgtaacatcagcatcatcctgtttctgattttgactgccacatcgtttttaccaagcaggttttataccgatattctcaaccaacccaatacttattacctttcgacactgaggtttcccgagctgttggcaggttcgctgctggcggtttacgggcaaacgcaaaacggcagacggcaaacagcaagcggaaaacggcagttgctttcattactctgcttcggcgcattgcttgcctgcctgttcgtgattgacaaacacaatccgtttatcccgggaatgaccctgctccttccctgcctgctgacggcactgcttatccggagtatgcaatacgggacacttccgacccgcatcctgtcggcaagccccatcgtatttgtcggcaaaatctcttattccctatacctgtaccattggatttttattgccttcgcccattacattacaggcgacaaacagctcggactgcctgccgtatcggcggttgccgcattgacggccggattttccctgttgagctattatttgattgaacagccgcttagaaaacggaagatgaccttcaaaaaggcatttttctgcctctatctcgccccgtccctgatacttgtcggttacaacctgtacgcaagggggatattgaaacaggaacacctccgcccgttgcccggcgcgccccttgctgcggaaaatcattttccggaaaccgtcctgaccctcggcgactcgcacgccggacacctgcggggttttctggattatgtcggcagccgggaagggtggaaagccaaaatcctgtccctcgattcggagtgtttggtttgggtggatacgacactggcagacaacccgttatgtcgaaaataccgggatgaagttgaaaaagccgaagccgttttcattgcccaattctatgatttgaggatgggcggccagcccgtgccgagatttgaagcgcaatccttcctaatacccgggttccaagcccgattcagggaaaccgtcaaaaggatagccgccgtcaaacccgtctatgtttttgcaaacaacacatcaatcagccgttcgcccctgagggaggaaaaattgaaaagatttgccgcaaaccaatatctccgccccattcaggctatgggcgacatcggcaagagcaatcaggcggtctttgatttggttaaagatatccccaatgtgcattgggtggacgcacagaaatacctgcctaaaaacacggtcgaaatacacggacgctatctttacggcgaccaagaccacctgacctatttcggttcttattatatggggcgggaatttcacaaacacgaacgcctgcttaaatcttcccgcggcggcgcattgcagtag

SEQ ID NO: 39886 - DNA, 696 bp, Neisseria meningitidis
atggctaaagtatctaaacgcttgaaagctcttcgctcttctgtggaagccaataaattatatgcaattgatgaagcaattgctttggtaaaaaaagcagcgactgctaaatttgacgagtctgttgacgtatctttcaacttgggcgttgatccgcgtaaatctgaccaagttatccgtggttcggtcgttctgcctaaaggcaccggtaagataacccgtgtggctgtatttactcaaggtgcaaatgcagaagctgctaaagaagctggtgcagatatcgtcggtttcgaagatttggctgctgaaatcaaagcaggcaatctgaactttgacgttgttattgcttctcccgatgcaatgcgtattgttggtcaattgggtactattttgggtcctcgaggcttgatgccaaaccctaaagtaggtactgttactcctaacgttgctgaagcagtaaaaaatgcaaaagcaggtcaagtgcagtaccgtaccgacaaggcaggtattgttcatgcaacgattggtcgtgcttcattcgctgaagctgatttgaaagagaactttgatgcgttgctggatgctatcgttaaagccaagcctgctgccgctaaaggtcagtatctgaaaaaagttgctgtgtctagcaccatgggtttgggtattcgcgttgatacatcaagcgtaaataactaa

SEQ ID NO: 39887 - DNA, 1551 bp, Neisseria meningitidis
atgaaaaaacctttgatttcggttgcggcagcattgctcggcgttgctttgggtacaccttattatttgggtgtcaaagccgaagaaagcctgacgcagcagcaaaaaatattgcaggaaacgggcttcttgaccgtcgaatcgcaccaatatgagcgcggctggtttacctctatggaaacgacggtcatccgtctgaaacccgagttgctgaataatgcccgaaaatacctgccggataacctgaaaacagtgttggaacagccggttacgctggttaaccatatcacgcacggcccttttgccggcggatttggcacgcaggcgcacattgaaaccgagttcaaatacgcgcctgaaacggaaaaagttttggaacgcttttttgggaaacaagctccggtttcccttgccaataccgtttattttaacggcagcggtaaaatggaagtcagtgttcccgccttcgattatgaagagctgtcgggcatcaggctgcattgggaaggattgacgggaaaaacggtttatcaaaaaggtttcaaaagctaccgcaacagctatgatgcgcccttgttcaaaatcaagctggcagacaaaggcgatgccgcgtttgaaaaagcgcatttcgattcggaaacttcagacggtatcaatccgcttgctttgggcagcagcaatctgaccttggaaaaattctccctagaatggaaagagggtgtcgattacaacgtcaagttaaacgaactggtcaatcttgttaccgatttgcagattggcgcgtttatcaatcccaacggcagcatcgcaccttccaaaatcgaagtcggcaaactggctttttcaaccaagaccggggaatcaggctcatttatcaacagtgaagggcagttccgttttgacacgctggtgtacggcaatgaaaaatacggcccgctggacatccatatcgccgccgaacatctcgatgcttctgccttaaccgtattgaaacgtaagtttgcacaaatttccgccaaaaaaatgaccgaggaacaaatccgcaatgatttgattgccgccgtcaaaggcgaggcttccggactgttcaccaacaatcccgtattggacattaaaacttttcgtttcacacagccgtcgggaaaaatcgatgtgggtggaaaaatcatgtttaaagacatgaagaaggaagatttgaaccaattgggtttgatgctgaagaaaaccgaggcagacatcagaatgagtattcctcaaaaaatgttggaagacttggcggtcagtcaggcaggcaatattttcagcgtcaatgccgaagatgaggcggaaggcagggcaagtcttgacgacatcaacgagaccttgcgcctgatggtggacagtacggttcagagtatggcaagggaaaaatatctgactttgaacggcgaccagattgatactgccatttctctgaaaaacaatcagttgaaattgaacggtaaaacgttgcaaaacgaaccggagccggattttgatgaaggcggtatggtttcagagccgcagcagtaa

SEQ ID NO: 39888 - DNA, 417 bp, Neisseria meningitidis
atgctgcagccaactagactgaaataccgtaagcaacaaaagggtcgcaatactggcatcgctactcgcggtaataaggtaagtttcggtgagttcggcttgaaagccgtaggtcgtggtcgtttgactgcccgtcaaatcgaagctgctcgtcgtgcaatgacccgtcatatcaaacgtggtggtcgtatttggattcgtgtattccctgataaaccgattactgaaaagcctattcaagttcgtatgggtggcggtaaaggtaacgtggaatattacattgccgaaattaaaccaggtaaagtgttgtatgaaatggatggcgttccagaggaactggctcgtgaagcattcgagttggctgctgccaaattgcctattcctacaacctttgtagtaagacaggtgggtcaataa

SEQ ID NO: 39889 - DNA, 354 bp, Neisseria meningitidis
atggataaacatacaacccgactccgtcgtgcacgcaaaacccgtgctcgtattgcggacttgaaaatggtaagattatgtgtgttccgaagcaataatcatatttatgctcaagtaattagtgctgaaggtgataaagtattggctcaagcctctacattggaagctgaggtgcgcggtagtctgaaatctggaagcaatgttgaagcagctgcaatagttggtaaacgtatcgctgagaaggctaaagcagcaggtgtagaaaaggttgcttttgatcgttcaggtttccaatatcacggtcgtgtgaaggctttggctgaagctgctcgtgaaaatggtttaagcttctaa

SEQ ID NO: 39890 - DNA, 1404 bp, Neisseria meningitidis
atgacattgctcaatctaatgataatgcaagattacggtatttccgtttgcctgacactgacgccctatttgcaacatgaactattttcggctatgaaatcctatttttccaaatatatcctacccgtttcactttttaccttgccactatccctttccccatccgtttcggcttttacgctgcctgaagcatggcgggcggcgcagcaacattcggctgattttcaagcgtcccattaccagcgtgatgcagtgcgcgcacggcaacaacaagccaaggccgcattccttccccatgtatccgccaatgccagctaccagcgccagccgccatcgatttcttccacccgcgaaacacagggatggagcgtgcaggtgggacaaaccttatttgacgctgccaaatttgcacaataccgccaaagcaggttcgatacgcaggctgcagaacagcgtttcgatgcggcacgcgaagaattgctgttgaaagttgccgaaagttatttcaacgttttactcagccgagacaccgttgccgcccatgcggcggaaaaagaggcttatgcccagcaggtaaggcaggcgcaggctttattcaataaaggtgctgccaccgcgctggatattcacgaagccaaagccggttacgacaatgccctggcccaagaaatcgccgtattggctgagaaacaaacctatgaaaaccagttgaacgactacaccgacctggatagcaaacaaatcgaggccatagataccgccaacctgttggcacgctatctgcccaagctggaacgttacagtctggatgaatggcagcgcattgccttatccaacaatcatgaataccggatgcagcagcttgccctgcaaagcagcggacaggcgcttcgggcagcacagaacagccgctatcccaccgtttctgcccatgtcggctatcagaataacctctacacttcatctgcgcagaataatgactaccactatcggggcaaagggatgagcgtcggcgtacagttgaatttgccgctttataccggcggagaattgtcgggcaaaatccatgaagccgaagcgcaatacggggccgccgaagcacagctgaccgcaaccgagcggcacatcaaactcgccgtacgccaggcttataccgaaagcggtgcggcgcgttaccaaatcatggcgcaagaacgggttttggaaagcagccgtttgaaactgaaatcgaccgaaaccggccaacaatacggcatccgcaaccggctggaagtaatacgggcgcggcaggaagtcgcccaagcagaacagaaactggctcaagcacggtataaattcatgctggcttatttgcgcttggtgaaagagagcgggttagggttggaaacggtatttgcggaataa

SEQ ID NO: 39891 - DNA, 843 bp, Neisseria meningitidis; identical to SEQ ID NO: 39859

SEQ ID NO: 39892 - DNA, 882 bp, Neisseria meningitidis
atgtgtatcgagatgaaatttatattttttgtactgtatgttttgcagtttctgccgtttgcgctgctgcacaaacttgccgacctgacgggtttgctcgcctaccttttggtcaaaccccgccgccgtatcggcgaaatcaatttggcaaaatgctttcccgagtgggacggaaaaaagcgcgaaaccgtattgaagcagcatttcaaacatatggcgaaactgatgcttgaatacggcttatattggtacgcgcctgccgggcgtttgaaatcgctggtgcgttaccgcaataagcattatttggacgacgcgctggcggcgggggaaaaagtcatcatcctgtatccgcactttaccgcgttcgagatggcggtgtacgcgcttaatcaggatgtcccgctgatcagtatgtattcccaccaaaaaaacaagatattggacgaacagattttgaaaggccgcaaccgttatcacaacgttttccttatcgggcgcaccgaagggctgcgcgctctagtcaaacagttccgcaaaagcagcgcgccgttcctgtatctgcccgatcaggatttcggacgcaacgattcggtttttgtggattttttcggtattcagacggcaacgattaccggcttgagccgcattgccgcgcttgcaaatgccaaagtgattcccgccatccccgtcagggaggcggacaatacggttacactgcatttctacccggcttggaaatcctttccgggtgaagacgcgcaggccgacgcgcagcgtatgaaccgctttatcgaagagcgggtgcgcgaacatccggaacaatatttttggctgcacaagcgttttaaaacccgtccggaaggcagccccgatttttactga

SEQ ID NO: 39893 - DNA, 879 bp, Neisseria meningitidis
atgatgagtcaacactctgccggagcacgtttccgccaagccgtgaaagaatcgaatccgcttgccgtcgccggttgcgtcaatgcttattttgcacgattggccacccaaagcggtttcaaagccatctatctgtctggcggcggcgtggcagcctgttcttgcggtatccctgatttgggcattaccacaatggaagatgtgctgatcgacgcacgacgcattacggacaacgtggatacgcctctgctggtggacatcgatgtgggttggggcggtgcattcaatattgcccgtaccattcgcaactttgaacgcgccggtgttgcagcggttcacatcgaagatcaggtagcgcaaaaacgctgcggtcaccgtccgaacaaagccattgtatctaaagatgaaatggtcgaccgtatcaaagctgccgtagatgcgcgcgttgatgagaacttcgtgattatggcgcgtaccgatgcgctggcggtagaaggtttggatgccgctatcgaacgcgcccaagcttgtgtcgaagccggtgcggacatgattttccctgaagccatgaccgatttgaacatgtaccgccaatttgcagatgcggtgaaagtgcccgtgttggcgaacattaccgagtttggttccactccgctttatacccaaagcgagctggctgaaaacggcgtgtcgctggtgctgtatccgctgtcatcgttccgtgcagcaagcaaagccgctctgaatgtttacgaagcgattatgcgcgatggcactcaggcggcggtggtggacagtatgcaaacccgtgccgagctgtacgagcatctgaactatcatgccttcgagcaaaaactggataaattgtttcaaaaatga

SEQ ID NO: 39894 - DNA, 285 bp, Neisseria meningitidis; identical to SEQ ID NO: 39838

SEQ ID NO: 39895 - DNA, 396 bp, Neisseria meningitidis
atggctaaagcaaacacagcttcacgtgtacgtaaaaaagtacgtaaaaccgtgagtgagggtattgtgcacgttcatgcatctttcaacaataccatcattacaatcactgaccgtcaaggcaatgcgttgtcttgggctacctctggcggcgctggttttaaaggttctcgtaaaagtacaccatttgcagcacaagttgcagcagaagcagctggtaaagttgcccaagagtatggcgttaaaaatttagaggttcgtattaaaggtccaggtccaggtcgcgaatcctctgtacgtgctttgaatgctcttggtttcaagattaccagcattactgacgttaccccgttgcctcataacggttgccgtccgcctaaaaaacgtcgtatttaa

SEQ ID NO: 39896 - DNA, 279 bp, Neisseria meningitidis; identical to SEQ ID NO: 36930

SEQ ID NO: 39897 - DNA, 2463 bp, Neisseria meningitidis
atgacacaaaaagaaaagcattttgaggaatatgccgccttggcaacccttcctttgcgggatgtcgtcgtttacccgcatatggttctgccgctgtttgtcggcaggccgaaatccatcgccgcactggaaaacgccattacccgcgaggagccggttttcctgttggcgcaaaccgatgcggcggtagaagaaccggttgccgccgacctgtatcagaccggtacggtcgcacaagtcctgcaagtgttgaaactgcccgacggcacggtaaaagtattggtcgaagggctgtatcgcggacgtgttctgaccattgaagacacgggcggtctgttcgtttcccatatagaggcggtcgtggaagaagacacgggcggcaataccgacctcgaagccgtgcgccgcaccctgttggcgcagtttgaacaatacgccaaactcaataaaaaaatccccgccgaaattatcggcagcattaacggcattgccgaaaacagccggctaaccgatacagtcgcagcgcatttgcagttgaaactgacgcaacgccaacagattttggagatttccgaaatcggcaaacggatggaattcctgctggcacagctggaatccgaactcgacattatgcaggccgaaaaacgcatacgcggacgcgtcaaacgccaaatggaaaaatcccagcgcgaatattatctgaacgaacagattaaagcgatacacaaagaattgggcgaagaagacgaaaacggcgaactggatgccttggaagcaggcatcaaaaaggcgggtatgagtaaagaagcggaagaaaaatgcctgtccgaactgaaaaaactcaaaatgatgccgccgatgtctgccgaatccaccgtcgtacgcaactacatcgacaccctgctcgaactgccgtggaagaaaaaatcccgcgtcagcaaagacatcgccaaagccggactggtgctggatgccgaccactacggcctggaaaaagtcaaagaacggattttggaatacctcgccgtccaaaaacgtatggacaaactcaaaggcccgattctgtgcctggtcggccctccaggcgtgggcaaaacctctttgggcgaatccatcgccaaagcaacggggcggaaatatgtccgcatggctttgggcggcgtgcgcgacgaaagcgaaatccggggacaccgccgcacctatatcggctccatgcctggtaagattctgcagaatatggcaaaagccggcgtaaaaaacccattgttcctgctcgacgaaatcgacaaattgggtagcgacttccggggcgatcccgccagcgcgttgctcgaagtgcttgatcccgagcaaaacaacaagttcgccgatcattatgccgaagtggattacgatttgagcgatgtgatgtttattgcgacttcaaacagcctgaatatcccgaccccgctgctcgaccgtatggaaatcatccgtctgtccggctacaccgaagacgaaaaaatcaatatcgcgatgcagtacctcgtgccgaagcaaatgaagcgcaacggcgtgaaagaaggggaattggcaatcgaagaaagcgcggtgcgcgatattatccgttactacacccgcgaggcgggcgtgcgttcgctcgaccgcgagattgccaaaatctgccgcaaggtggtgatgcagattaccttggacgaagataagaagaggttgtctgaaaccaagaaaaccagcaaagccaaacctaaagcggttaaagtaaatgagaaaaatctgcacgactatttgggtgtgcgccgcttcgattacggcgttgccgaaagcgaaaaccgtatcggacaagtaaccggtctggcgtggacagaagtcggcggtgaactgctgaccgtcgaagccgcagcattgccgggtaagggcgtgattcagtgcaccggccagttgggcgatgtgatgaaggaatccgtgtctgcagcgtggtcggttgtccgctcccgcgcggaatcagtgggcttggctcctgatttttacgagaaaaaagacatccatgtccatgttcccgaaggtgcgacgccgaaagacggtccgagtgcgggcattgccatgactttggcgatggtgtctgcattcaccaaaatcccggtgcgcgccgatgttgccatgacgggcgaaattaccctgcgcggcgaagtcctgccgattggcggtctgaaggaaaaactgttggctgcgcttcgcggcggcatcaaacacgttttaattccaaaagacaacctcaaagacttggaagaaatccctgaaaacgtgaaaaccggcctgaccatccatccggtcaaatggatagacgaggtattggctctgggtttggaaagccagcctgagccttgggcagaaccttctggtgcggaagcggcggcggaatccgcttcaaaaccaaaaccccgcagcagggcaaccaaacattga

SEQ ID NO: 39898 - DNA, 915 bp, Neisseria meningitidis
atgcagaattttggcaaagtggccgtattgatgggcggtttttccagcgaacgagaaatctcgctggacagcggcaccgccattttgaatgctttaaaaagcaaaggcatagacgcatacgccttcgatcctaaagaaaccccattgtctgaattgaaggcacaaggttttcagacggcattcaacatccttcacggtacttacggcgaagacggggcggttcagggtgcattggaactgttgggcattccctataccggcagcggtgtcgccgcatccgccatcggcatggacaaataccgctgcaaactgatttggcaggcattgggattgcccgttcccgagttcgccgtcctgcacgacgacactgatttcgatgccgtcgaagaaaaattgggcctgccgatgtttgtgaaaccggcggccgaaggcagcagcgtaggcgtggtaaaagtcaaaggaaaaggccgtctgaaaagcgtttacgaagaattgaaacaccttcagggcgaaatcattgccgaacgttttatcggcggcggcgaatattcctgccccgtcctgaacggcaaagggctgcccggcatacacatcattcccgcaaccgagttttacgactacgaagccaagtacaaccgagacgacaccatttatcaatgtccttcggaagatttgaccgaagccgaagaaagcctgatgcgcgaactggcggttcgcggcgcgcaggcaatcggtgcggaaggctgcgtgcgcgtcgatttcctcaaagataccgacggcaaactctatctgttggaaatcaacaccctgcccggtatgacgagccatagtttagtaccgaaatccgctgccgttacgggcgtgggttttgccgatttatgtattgaaattttgaagaccgcacatgtgggataa

SEQ ID NO: 39899 - DNA, 1359 bp, Neisseria meningitidis
atgaaaccactggacctaaatttcatctgccaagccctcaagcttccgatgccgtctgaaagcaaacccgtgtcgcgcatcgtaaccgacagccgcgacatccgcgcgggcgatgtgtttttcgcattggcgggcgggcggtttgatgcgcatgattttgttgaagacgtattggctgctggtgcggcggcggttgtggtttcgcgcgaagattgcgttgcaatggatggcgcgttgaaagtcgatgacacgcttaccgcgttgcaaatgttggcgaaggcgtggcgcgagaatgtgaacccgtttgtgttcggtattaccggctcgggcggcaagacgacggtgaaggaaatgttggctgcggtattgcgccgccgtttcggcgataatgccgttttggcgacggcaggcaacttcaacaaccacatcggattgccgttgactttgttgaaattaaacgaaaaacaccgctatgccgtgattgaaatgggtatgaaccattttggcgaactggcggttttgacacaaatcgccaaacccgatgccgcattggtcaacaacgccatgcgcgcccatgtcggctgcggtttcgacggagtgggcgatattgccaaagcgaaaagcgagatttatcaaggcttatgttcagacggcatggcgctgattcctcaagaagatgccaatatggctgtcttcaaaacggcaacgcttaatttgaatacgcgcactttcggcatcgatagcggcgatgtccacgcggaaaatatcgtgctgaaaccgttgtcgtgcgaatttgatttggtgtgcggcaacgagtgcgcagccgtggttctgcccgttcccggccgccacaatgtccacaacgccgccgccgccgccgcgctgtctttggctgcaggtttgagtttgaacgatgtggcggaaggtttgaaaggcttcagcaatatcaaaggccgtctgaacgtcaaatccggaatcaagggcgcaaccctgattgacgatacttataatgcgaaccctgacagcatgaaagctgcggttgacgtgttggcgcgtatgcctgcgccgcgtattttcgtgatgggcgatatgggcgaactgggtgaggacgaagccgccgccatgcacgccgaagtcggcgcgtacgcccgcgaccaaggcatcgaagcggcttattttgtcggcgacaacagcgtcgaagcggcggaaaaatttggcgcggacggtttgtggttcgccgccaaagacccgttgattcaagtgttgcgccacgatttgcccgaacgcgccaccgtgttggtgaaaggttcgcgctttatggagatggaagaagtggtcgaggcattggaggataagtga

SEQ ID NO: 39900 - DNA, 387 bp, Neisseria meningitidis
gtgagaaagattctgcttgatacccatgcgttgctgtggtggttgttggatgacaagaaactggggatatctgcacgcaaactgatagaaaatccgagaaatgcgatctttgtcagtgcagcaagtatttgggaaatttccatcaagcagaacaaggggttgttgaaattaccggaagagttttttgatgtgcttcaagaagaggattttgaaatgttgcctataggtctgtttcatgcaaaacaggctggaagccttctggagatacacaaagaccctttcgataggatgttgattgcacaaacccaagcggaaggctttgaactgatgactgtcgatgaatatattccgcaatatggaattagagttgtcaacgcatcaagctga

SEQ ID NO: 39901 - DNA, 426 bp, Neisseria meningitidis
atgaatttccttggcgtacaaggagagttgaaggttcacgagctgcatcacagaacagcaaccctgtgctttgagtggcttggcgaagtatctgcgccgcgcagaaaagagaactacaaagacctcaagccaaatgtattgtatgactttgatggttccggtaagcattttgccaaccctgacgcaaggtatctattgcccgtcggttcaagcggcttaatcttaaaacatatccaaatcgatgacgaagacactctgttgcggctatggtgcgcacgaaatatcccaatgccacaccggctatctaaaatcccgatgcttcggcagtattatctaagcaaggcatggcacgaaatttatgctatcaaccaacacctaaggaaaacgaagctgatagttgatgtggcatacggccccacagattaa

SEQ ID NO: 39902 - DNA, 768 bp, Neisseria meningitidis
atgcaagaaataatgcaatctatcgtttttgttgctgccgcaatactgcacggaattacaggcatgggatttccgatgctcggtacaaccgcattggcttttaacatgccattgtctaaggttgttgccttggtggcattaccaagcctgttaatgagcttgttggttctatgcagcaataacaaaaaaggtttttggcaagagattgtttattatttaaaaacctataaattgcttgctatcggcagcgtcgttggcagcatttttggggtgaagttgcttttgatacttccagtgtcttggctgcttttactgatggcaatcattacattgtattattctgtcaatggtattttaaatgtatgtgcaaaagcaaaaaatattcaagtagttgccaataataagaatatggttctttttgggtttttggcaggcatcatcggcggttcaaccaatgccatgtctcccatattgttaatatttttgcttagcgaaacagaaaataaaaatcgtatcgtaaaatcaagcaatctatgctatcttttggcgaaaattgttcaaatatatatgctaagagaccagtattggttattaaataagagtgaatacggtttaatatttttactgtccgtattgtctgttattggattgtatgttggaattcggttaaggactaagattagcccaaatttttttaaaatgttaatttttattgttttattggtattggctctgaaaatcgggcattcgggtttaatcaaactttaa

SEQ ID NO: 39903 - DNA, 342 bp, Neisseria meningitidis; identical to SEQ ID NO: 37907

SEQ ID NO: 39904 - DNA, 4176 bp, Neisseria meningitidis
atgaatttgttgaacttatttaatccgttgcaaactgccggcatggaagaagagtttgatgccatcaaaatcggcattgcttctcccgaaaccatccgttcatggtcttacggcgaagttaaaaaacctgaaaccatcaactaccgtacgttcaaacctgagcgtgacggtctgttctgcgccaaaatctttggtccggtcaaagactacgaatgcttgtgcggaaaatacaaacgcttgaaatttaaaggcgtaacctgtgaaaaatgcggcgtagaagtgaccctgtccaaagtgcgccgcgaacgtatgggccacattgaattggcagcacccgttgcccatatttggttcttgaaatccctgccttcccgcttgggtatggtactggacatgactttgcgcgacatcgaacgcgtattgtactttgaagcatttgtggtaaccgaccccggtatgactccgctgcaacgccgccaattgctgactgaagacgattactacaacaaactggacgaatacggcgatgacttcgatgccaaaatgggtgcggaaggtatccgcgaattgctgcgtaccttgaatgtggcgggcgaaatcgaaatcctgcgccaagagttggaatcgaccgggtccgacaccaaaatcaaaaaaatcgccaaacgtttgaaagtattggaagccttccaccgttccggtatgaagctggaatggatgattatggatgtgctgccggtattgccgcctgatttgcgtccgttggttccattggatggcggtcgttttgccacttccgatttgaacgatttgtaccgtcgcgtcatcaaccgtaacaaccgtctgaaacgtctgttggaactgcatgcgcccgacattatcgtccgcaacgaaaaacgtatgttgcaagaagcggtcgactctctgttggataacggccgtcgcggtaaagccatgaccggcgccaacaaacgcccgctgaaatcattggcagacatgattaaaggtaaaggcggtcgcttccgtcaaaacctgttgggcaaacgtgtggactactccggccgttccgtgattaccgtaggcccatacctgcgtctgcaccaatgcggtctgccgaaaaaaatggctttggaactgttcaaaccgttcattttccacaaattggaaaaacaaggtttggcctctaccgttaaagcagcgaaaaaattggtagagcaagaagtaccggaagtatgggacatcttggaagaagtcatccgcgaacatccgattatgctgaaccgtgcgccgaccctgcaccgtttgggtattcaagcgttcgaacctatcttgattgaaggtaaagcgattcagttgcacccattggtgtgtgctgcgttcaacgccgactttgacggcgaccaaatggcggtacacgttccattgagcttggaagcacaaatggaagcacgcacgctgatgctggcttcaaacaacgtattgtctcctgccaacggcgaaccgattatcgtaccttcccaagacatcgtattgggcctgtactacatgacccgcgaccgtatcaatgccaaaggcgagggcagcctgtttgccgatgtgaaagaagtgcatcgcgcataccataccaaacaggttgaactgggtacgaaaattaccgtacgtctgcgcgaatgggtgaaaaacgaagcaggtgagtttgagcctgtcgttaaccgttacgaaacaaccgtcggccgtgcattgttgagcgaaatcctgccgaaaggcctgccgtttgaatatgtcaacaaagcgttgaagaaaaaagaaatttctaaactgattaacgcatcgttccgcctgtgcggcttgcgcgatacggttatctttgctgaccacctgatgtacaccggtttcggatttgcggcaaaaggcggtatttccattgccgttgacgatatggaaattccaaaagaaaaagtggccttgctggctgaagccaatgccgaggttaaagaaatcgaagaccaataccgtcaaggtttggttaccaacggcgaacgctacaacaaggtggtcgatatttggggtcgtgccggcgataagattgctaaagcgatgatggacaacttgtccaaacaaaaagttatcgaccgtgacggcaacgaagtcgatcaagagtcattcaactccatttatatgatggcggactccggtgcccgtggttctgcagctcagattaaacagttgtccggtatgcgtggcttgatggcaaaacctgacggctcgattattgaaacgccgattacctcaaacttccgtgaaggtctgaccgtattgcaatactttattgcgacccacggtgcgcgtaagggtttggcggataccgcattgaaaaccgcgaactccggttacctgacccgtcgtctggtagacgtaactcaagatttggtcgttgttgaagacgattgcggtacttcagacggctttgtcatgaaggcagtggtacaaggcggtgatgtgattgaagcattgcgcgagcgtattttgggccgtgttactgcgtctgacgttgtcgatccgtcaagcggcgagaccttggttgaagcaggcacgttgttgactgaaaaactggtggatatgattgaccaatccggtgtcgatgaagtcaaagtccgtactccgattacttgtaaaacccgccacggtttgtgcgcgcactgttacggccgcgacttggcgcgcggcaaactggtcaatgccggagaggcagtcggcgtgattgccgcccaatcaatcggcgaaccgggtacccagctgactatgcgtacgttccacatcggtggtgcggcatcccgtgcggcagcagccagccaagtggaagccaaatccaacggtacggcacgattcagcagccaaatgcgttatgttgccaacaataaaggcgagttggttgtcatcggccgttcttgtgaagtcgtgattcacgatgacatcggccgtgaacgcgaacgccacaaagtaccttacggtgccatcctgctggtacaagacggtatggccattaaagccggtcaaaccttggcaacctgggatccgcatacccgtccgatgattaccgaacacgcaggtatggtgaaattcgaaaacgtggaagagggcgttaccgttgccaaacaaaccgatgatgtaaccggtttgtccactttggtagtgatcgacggtaaacgtcgttcctctagtgcttccaaactgctgcgtccgactgtgaaactcttggacgaaaacggcgtggaaatctgtattcccggtacttctactccggtatccatggcattccccgttggtgcggtgattaccgtacgcgaaggtcaggaaatcggtaaaggcgacgtattggcgcgtatcccgcaagcctcttccaaaacccgcgacattaccggtggtctgccgcgcgttgccgaattgtttgaagcacgcgtgccgaaagatgccggtatgttggcggaaattaccggtaccgtttccttcggcaaagagaccaaaggcaagcaacgtctgattattaccgacgtggacggcgtagcatacgagactttgatttccaaagagaaacagattttggtacacgacggtcaagtggtaaaccgcggcgaaaccattgtggacggcgcggtcgatccgcacgatattctgcgtctgcaaggtatcgaagcactggcacgctacattgtccaagaggtgcaagaggtttaccgtctgcaaggtgtgaagatttccgacaaacacatcgaagtcatcatccgtcaaatgttgcgccgtgtgaacattgcggatgccggcgaaaccggcttcattaccggcgagcaggtcgaacgcggcgatgtgatggctgccaatgaaaaagctttggaagaaggcaaagaaccggcacgttacgaaaacgtattgctgggtattaccaaagcctccctgtctaccgacagcttcatttctgccgcatcgttccaagaaacgacccgcgttctgaccgaagccgcgattatgggcaaacaagacgagctgcgcggtctgaaagagaacgtgattgtcggtcgtttgattcctgctggtactggtttgacttaccaccgcagccgtcatcaacaatggcaagaggtggagcaggagactgctgaaacccaagtaacggatgaataa

SEQ ID NO: 39905 - DNA, 297 bp, Neisseria meningitidis
atgcggatggcagaaagtaaaagggtacaacggctattgagggtctttatcgcgcttgacgagcatccgattatcggtctgagcaataaggatttatcggtcggactggggctgacgccatcgcaagtcagcagggatattgatgatttggttgcctcgggattggtcatcaaacttgaaaacggcaactacgcctacggcatcaaaaccctgcaaatcgcagagcggttcaggcagcagcatgaacggctgcaaagcaagattgccgaaatcggcaagcgggtcgatgtggattaa

SEQ ID NO: 39906 - DNA, 285 bp, Neisseria meningitidis
atggcttttcatcacggccgccgatgccgtattacgccgcttcccgaaaccgagtcattacaggagagtaaaaaaatgaacatcaacgaactgggcgcaaggatagaccgcccgaccatccgcgaactgattgcctacgcaacctgccgcaaccgccccatttcaaactcgacactgctgcgtatggaaaaagacggacggataccgtgccgtctgaaaaccccactcacatcccccgtatgggacacccgcgaagttttggaagccctggggttacagcaataa

SEQ ID NO: 39907 - DNA, 906 bp, Neisseria meningitidis
gtggcacgggatttttacaaagaatacaaccccttatttatcaaaacataccaatccgaacaccccggcacatccgtcagcatccaacagtcccacggcggctccagcaaacaggcattatccgtagccaacggccttcaagccgatgtcgtaaccatgaaccaatcctccgacatcgacctgctcgaaaaaaaaggactggtagaaaaaggctggcaacaagccctccccgaccacgctgcgccctacaccagcactatggttttccttgtccgaaaaaacaaccccaaacagatccgcgattggaacgaccttgccaaagacggcgttaacatcgtcatcgccaatcccaaaacctcgggcaacggacgctacgccttcctcggcgcatacggttacggtctgaaaaccaccaacggcaacgaacaggaagcccaaaaactcgtcgcatccatcctcaaaaacacccccgtttttgaaaacggcggacgcgccgccaccaccaccttcacacaacgcaacatcggcgacgtactcattacttttgaaaacgaagccaactacgtcagcaaaaaactgacccaaggacagtttgaaatcgtctatccgagctacaccatttccgccgaaagccccgtcgccgtcgtcaacagcgtcgtcgcgaaaaaaggcacgcaaaaaaccgcccgcgcctatctcgaatacctttggagcgaaccggcgcaagaactcgccgcctcactctacctgcgcccccgcaaccccgaagtattggcaagacacaaagccgacttcccagacttagactcattctctcccgaagaaaaattcggcggatgggacaacatcatgaaaacctacttcgccgacggcggcatattcgaccgcctgaccgcacaaaaatga

SEQ ID NO: 39908 - DNA, 471 bp, Neisseria meningitidis
atgccaagacgtagagaagtccccaagcgcgacgtactgccagatcctaaattcggcagcgtcgagttgaccaaattcatgaacgtattgatgattgacggtaaaaaatccgttgccgagcgtatcgtttacggtgcgttggaacagattgagaaaaaaaccggcaaagtagcaatcgaagtatttaacgaagccattgcaaacgccaagcctgtcgtggaagtgaaaagccgccgtgtaggtggtgcaaactaccaagttcctgttgaagttcgtccttcacgccgtttggctttggcaatgcgctgggttcgcgatgcggcccgcaaacgtggtgagaaatccatggacctgcgtttggcaggcgaattgattgatgcgtccgaaggtcgtggcggtgcgttgaaaaaacgtgaagaagtacaccgtatggctgaagccaacaaagcattctctcacttccgtttctaa

SEQ ID NO: 39909 - DNA, 291 bp, Neisseria meningitidis
atggcgcgcattggtacgaataagggtttttttgagctcttggagggcgagaccctgttggaaggcttggaacggacggggcatatggtggaatatcagtgccgaagcggatattgcggatcgtgccgggtgaagattttggagggaagcgttacttatcggaagccgcctttggcttttttggggcgggacgagatactgccgtgctgctgttacgtcgagggggatgtcaggctggattgcggtttgtcgggggaggatgaggggctgtctgacagtttgttgaaataa

SEQ ID NO: 39910 - DNA, 1056 bp, Neisseria meningitidis
atgccgtctgaaacacgcctgccgaactttatacgcgtcttgatatttgccctgggtttcatcttcctgaacgcctgttcggaacaaaccgcgcaaaccgttaccctgcaaggcgaaacgatgggcacgacctataccgtcaaatacctttcaaataatcgggacaaactcccctcacctgccgaaatacaaaagcgcatcgatgacgcgcttaaagaagtcaaccggcagatgtccacctatcagcccgactccgaaatcagccggttcaaccaacacacagccggcaagcccctccgcatttcaagcgacttcgcatacgttactgccgaagctgtccgcctgaaccgcctgacacacggcgcgctggacgtaaccgtcggccctttggtcaacctttggggattcgggcccggcaaatccgttacccgtgaaccgtcgccggaacaaatcaaacaggcggcatcttatacgggcatagacaaaatcattttgaaacaaggcaaagattacgcttccttgagcaaaacccaccccaaagcctatttggatttatcttcgattgccaaaggcttcggtgtcgataaagttgcgggcgaactggaaaaatacggcattcaaaattatctggtcgaaatcggcggcgagttgcacggcaaaggcaaaaacgcgcgcggcgaaccgtggcgcatcggtatcgagcaacccaatatcatccaaggcggcaatacgcagattatcgtcccgctgaacaaccgttcgcttgccacttccggcgattaccgtattttccacgtcgataaaagcggcaaacgcctctcccatatcattaatccgaacaacaaacgacccatcagccacaacctcgcctccatcagcgtggtcgcagacagtgcgatgacggcggacggcttgtccacaggattattcgtattgggcgaaaccgaagccttaaagctggcagagcgcgaaaaactcgctgttttcctgattgtcagggataaaggcggctaccgcaccgccatgtcttccgaatttgaaaaactgctccgctaa

SEQ ID NO: 39911 - DNA, 2256 bp, Neisseria meningitidis
atgggacagtacaagaagctatggtacttgctgtttgccgttctggcggtatgctttaccattcttggctatatgggcagcgaggtttacaaaaaagccccgccttaccctgaacaggtcgtttccgcatcaggcaaagtgctgatgacgaaagacgatattttggcaggtcagtctgcgtggcagagtaccggcggtatggaagtcggttcgattctgggtcacggcgcatatcaggctccggactggacggccgactggctgcatcgtgagttggttgcatagttggatttgaccgcgcaacagacttacggcaaaaaattcgatgaagtttcccctgaagaacaagccgttctgaaaacccgactggctgacgaataccgcaaccaaagccgtattaaagaagacggcagcgtcgtcatcagcgatacgcgcgtgaaagccatcgaaagcatcctgccttattaccacggtgtttacggcgatgatcccgcgctgcaaaccacccgcgaacactttgcaatgaaaaacaacacattgccaagccaagaagcgcgtgaaaaactgttcgacttcttcttctggacttcttggtctgcttcgaccaaccgtcctgacgagacgttcacttataccaacaactggccgcacgagcctttgatcaacaacgtaccgaccactgaaaactatatgtggtcattcaccagcgttgttcttctgctgatgggcatcggtttgttgatgtggggttattccttcctgaccaaacacgaggaagtggaagtgccgtctgaagacccgatttccaaaatccaactgaccccttcacaaaaagcattgggcaaatacgtcttcctgacggttgccctgtttgtggtacaagtattgctgggcggtctgaccgcgcactacaccgtcgaaggtcagggtttctacggcattgacgaggcgttgggctttgaaatgtccgactggttcccttacgccctgacccgtacttggcacatccaatccgccatcttctggattgcaaccggctttttgacggcaggtttgttccttgcgccgattgtcaacggcggcaaagatcccaagttccaacgtgcaggcgtgaacttcctctatatcgccctcttcatcgtggtcggcggctcttacgcgggcaacttcttcgcgttgacgcacatccttcccccggaatttaacttctggttcggacaccaaggttacgaatacctcgatttgggacgtttctggcaactcctgctgatggtcggcctgctgttgtggctgttcctgatgttgcgttgcacggtttccgccttcaaagaaaaaggcgtggacaaaaacctgctggcaatctttgtcgcttctatggtcggtgtgggcgtattctacgcaccgggactgttctatggcgagaaatccccgattgccgtaatggaatactggcgttggtgggtggttcacctgtgggtggaaggcttctttgaagtatttgccactgccgcttttgcctttgtcttctacaatatgggctttgtccgccgcagtaccgccacagcttctactctggccgctgccgccatctttatgttgggcggcgttccgggtacgctgcaccacctgtacttctccggctctacctccgcctctatggcaatcggtgcctgcttctccgctttggaagtcgtgccgctggtgttgctgggccgtgaagcatacgagcattggtcttaccaacacctgtccgactgggcgaaacgcctgcgttggccgctgatgtgcttcgtggcagtcgccttttggaatatgatcggtgccggtgtattcggtttcctgattaacccgccgatttccctgttctatatccaaggtttgaatacttctgctgttcatgcgcacgccgccttgttcggtgtgtacggtttcttggcattgggcttcgtattgctggttgcccgttatttgaaaccgaacgcgcagtttgacgacaaactgatgacttggggcttctggctgctcaacggcggcttggtcggtatgattgccatcagcctgttgccggttggcgtgattcaggcatacgcctccatcacgcacggcctgtggtatgcacgcagcgaagagttcctgcaaatggaaatcctcgacaccttgcgttgggtacgtacggcagctgacttggtctttatcggcggtgcaatctgcgttgccatccaagccactaaaatcgtattcggccgcgacaaataa

SEQ ID NO: 39912 - DNA, 393 bp, Neisseria meningitidis
atgagtatgcatgatcctatttccgatatgttgactcgtatccgcaatgcgcaacgtgctaataaagcagcggttgcaatgccttcttcaaaattaaagtgtgctattgcaaaggtattgaaagaagaaggatatattgaggacttcgcagtttcatctgacgtaaagtctatattggaaattcaattaaaatactatgcaggtcgtcctgtaattgaacaaatcaagcgtgtatctcgccccggtttgcgtatttataaagcgtctagtgagattccaagtgttatgaatggcttgggtattgctattgttagtacttctaaaggtgtaatgactgatcgtaaagcacgttctcaaggtgttggtggtgagttgttatgcattgtagcctag

SEQ ID NO: 39913 - DNA, 522 bp, Neisseria meningitidis
gtgaaagatagtttaatggatttctttgatttttttgcgcaaggtaagtataaaaaaattgcaactgaacaaggtttagaccgtaaatattttatattccactatatcgtatgtaatttatctgccatttcttctttttgtttaatgaaggttatccatagttatactatcctttgtttattaataatgataattggcattgcatttggatttatcttgagaaatagggttctatctatagtaaaaaataaacaaaagtttttatctgatatgtttcccttggaaatgcctttcttttctagagtatacaaaatacctatcttggccagattcttgaataggggaatgaaatggctttatctccaaaattttttctgtttagttatgatttgtttctcgatatctcttatccttaatgaagaaagggggtggatgccttattttatctgctattggtttggactttgttatccagcaaacacttattacgtttttttatccagagattataaacatatctaa

SEQ ID NO: 39914 - DNA, 843 bp, Neisseria meningitidis
atgtcgggaggggttatgccggaattgccggaagtggaaacgacgttgcgcggcatcgcgccgcatattgaagggaaaacggtggaagccgtggtattgcgccaattgaagctgcgctggcagatcaatcccgatttgggggagattttgtccggtcggcaggttttgtcctgcggcaggcgtgccaaatatctgattgtccgtttccaaacggggattttgctgattcacttggggatgtcgggcagcttgcggatttttacgccgtcggacggacgtatcggcaggccggacagacacgatcacgtcgatattgtgttttcagacggcacggtcatgcgttaccgcgatccgagaaagttcggcgcgatactttggtatgagggaatcgaagaacatcatccgctgttggaaaaactggggccggagcctttgtcggaggcattttgtgcggattatctgtatgtgaggctgaaggcgcagaaacgcgcggtcaaacttgccctgatggacaatgcggtcgtggtcggtgtgggcaacatttatgccaacgagagcctgttcagagcgggcatttcgccccaccgtcctgccaaccgtctgaaaaagaaagagtgtgcgcttttggttgaaaccgtcaaagcggtgttgcggcgcgccattgaaacgggcggcagtaccttgagggattttgtggacagcgacggcaaaagtggctacttccaacaggaatatacggtgtacgggcggcacaatcagccgtgcccccagtgcggcggtttggttgtgaaagaaactttggggcagcgcggcacgttttactgcccgaattgtcagaaatag

SEQ ID NO: 39915 - DNA, 727 bp, Neisseria meningitidis
atggcatttgcctcactatttaccctgccggacgacatcaccgccgttttggacgatgttgccctgatgaccaaagccgccgcaaagaaaaccgccggcgtggtcggcgacgatttggcacccaatgccaaccgggttacgggcgtatcggcagaacgcgagttgccgattgtttggtcgatggcgaaaggttctttttccaacaagccggttttggtgcctgcggccctgctgctttccgccttcctgccgcaactcattacgccgcttttgacggcaggcggcatttatctgtgctttgacggcgtagaaaagctgctgcacaagtttctgcaccgacatgacgcgcatgctcgtaatggcggcaatcggcatcggcatgactgttttggtgtacggaatcgttgccgtcatcgtcaaactcgacaacttaggcatgctgctgatgcgccgcccacaaaccttttcgcgcagtttggggcaaatgctgactgcctttatgccttgctttatgcgcggtttgagcgtggtcggcacgcttgccatgtttcttgtcggcggcgtactggtcgcccacaacctcggccttctgcacgatttcctgcacgcgcaacactgggacgctggctgggcggagtacttcgccaacctcgttgtcgggctgctttccggttcgattgcctgcgcccccgccttgccgctgatgaatcgtttcggcaggcattga

SEQ ID NO: 39916 - DNA, 1392 bp, Neisseria meningitidis
atgtttcccgatttctcccaaaccctctccaaagaccgccacttcctacgttccgccttcaaaaatcccaacaaatacggcggcttgtccaaagtcgaagaaaaataccaaaaatcgcacgaaatctttttgaagcgtttggctgccttgcccaaacccgaattcgataacaccctgcccgttcacgaaaaactcgaagaaatcaaaaaaaccgttgccgaacatcaggtaacgattatttgcggcgaaaccggttcgggcaagaccactcagttgcccaagatttgtctggaactcgggcgcggggcggcgggtttgatcgggcatacccagccgcgccgtttggcggcgcgttccgtagcagagcggattgccgaagagctgaaatccgaaatcggcagcgcggtcggctataaagtgcgcttcaccgaccacacctcgcgcgatgcctgcgtcaagctgatgaccgacggcatcctgctggcggaaacccagaccgaccgttatctcgccgcctatgacacgattatcatcgacgaagcgcacgagcgcagcctgaacatcgacttccttttgggctatttgaaacaactcctgccgcgccgccctgatttgaaagtcatcatcacctcggcaaccatagacgcagaacgcttctcccaacacttcaacggcgcgcccgtgttggaagtaagcgggcgcacctatcccgtcgaaatcctctaccggccgctgaccggcaaagacgaagacgacgcggaaatagaattgaccgacgcaattgtcgatgccgccgatgaattggcgcgatatggcgaaggcgatatcttggtattcctgccgggcgaacgcgaaatccgcgaagccgccgaagccctgcgcaaatccacgctgcgccgcaacgacgaaatcctgcccctgttcgcacgcctgtcgcacgccgagcagcacaaaatcttccacccctcaggcgcgaaacgccgcatcgtattggcaaccaacgtcgccgaaacctcgcttaccgtgccgggcatcaaatacgtcatcgacaccggcctcgcgcgcgtcaaacgctattccgcacgggcgaaagtggagcagcttcatatcgaaaaaatctcccaagccgccgcccgccaacgctccggccgctgcggacgcgtctccgcaggcgtatgtatccgattgttttcagaagaaaatttcaacaaccgccccgaatttaccgaccccgaaatcgcccgcagcaacctcgccgccgtcatcctgcgcatggcatcgctgaaactcggcgacgtagcggcattcccatttttagaaatgcccgattcacggtatatcaatgacggttttcaggtgttgttggagttgggggcggtggaggccgtctga

SEQ ID NO: 39917 - DNA, 492 bp, Neisseria meningitidis
atgcgtgcggtcatacagaaaacggtaggtgcaaaggtggatgtcgtgtccgaaaacggcacggaaacctgtggcaaaatcgacggcggattcgtcgtgctgctcggcgtaacgcatagcgacacagaaaaagatgcgcactatatcgccgacaaaatcgcccatttgcgcgtgtttgaagacgaagcgggcaagttgaacctgtctttgaaagatgtcggcggcgcggtgctgctggtgtcgcagtttacactttatgccgatgcggcaagcgggcggcggccttcgttttcccaagccgcacctgcagaacaggcgcagcagctttacctgcgaacggcggaactgttgcgcggacacgggattcatgtcgaaacagggcgtttccgcacgcatatgcaggtgtcgctctgcaacgacgggccggtaaccatactgctggactctttcatgacgcggatttccccaaaaatgaaggttgttccggattga

SEQ ID NO: 39918 - DNA, 144 bp, Neisseria meningitidis
ttggaagacgtattatggtacaaagtcagcaaatgcatcgaaaatatttacttctcgcatacaacgcagatacaattgcagcaattcaggaagcaaaaatggagcgaaaaattgtatcacttctctgtcttcattattacataa

SEQ ID NO: 39919 - DNA, 438 bp, Neisseria meningitidis; identical to SEQ ID NO: 39862

SEQ ID NO: 39920 - DNA, 501 bp, Neisseria meningitidis
atgagaaaaagtcgtctaagccagtataaacaaaataaactcattgagctatttgtcgcaggtgtaactgcaagaacggcagcagagttagtaggcgttaataaaaataccgcagcctattattttcatcgtttacgattacttatttatcaaaacagcccacatttagaaatgtttgatggcgaagtagaagcagatgaaagttattttggcggacaacgcaaaggcaaacgtggtcgcggtgctgccggtaaagtcgccgtattcggtcttttgaagcgaaatggtaaggtttatacggttacagtaccgaatactcaaaccgctactttatttcctattatccgtgaacaagtgaaacctgacagcattgtttatacggattgttatcgtagctatgatgtattagatgtgcgcgaatttagccattttagcttcgctgaaacttcgttttcgtatcaatcacagcacacattttgccgaacgacaaaaccatattaa

SEQ ID NO: 39921 - DNA, 240 bp, Neisseria meningitidis
atgccccatacccttcccgatatttcccaatgtatcagacaaaatttggaacaatatttcaaagacctgaacggtaccgaaccttgcggcgtgtacgatatggtattgcatcaggtggaaaagccgctgctggtgtgcgtgatggagcaatgcggcggcaaccagtccaaagcctccgtcatgttgggactgaaccgcaatactttgcgtaaaaaactgattcaacacggtttgctgtga

SEQ ID NO: 39922 - DNA, 1410 bp, Neisseria meningitidis
atgatgaaaaatcgagttaccaacatccattttgtcggtatcggcggcgtcggcatgagcggcatcgccgaagtcttgcacaatttgggttttaaagtttccggttcggatcaggcgcgtaatgccgctaccgagcatttgggcagcctgggcattcaagtttatcccggccataccgccgaacacgttaacggtgcggatgtcgtcgttacctctaccgccgtcaaaaaagaaaatcccgaagttgtcgctgcgttggagcagcaaattcccgttattccgcgcgccctgatgttggcggagttgatgcgcttccgtgacggcatcgccattgccggcacgcacggcaaaaccacgaccaccagcctgaccgcctccatcctcggcgcggcaggacttgacccgactttcgttatcggcggcaaactcaacgccgcaggcaccaacgcccgcttgggcaaaggcgaatacatcgttgccgaagccgacgagtcggatgcatcctttctgcacctgacaccgattatgtccgtcgttaccaatatcgacgaagaccatatggatacctacgggcacagcgtcgaaaaactgcatcaggcgtttatcgatttcatccaccgtatgcccttctacggcaaagcctttttgtgtattgacagcgaacacgtccgcgcgattttgcccaaagtgagcaaaccttatgctacttacggtttggacgataccgccgacatctacgccaccgacatcgaaaacgtcggcgcgcaaatgaaattcaccgtccatgttcaaatgaaaggacatgagcaggggtcgtttgaagtcgtgctgaatatgcccggcagacacaacgtgctgaacgcattggcagccatcggcgtggcgctggaagtcggcgcatcggttgaagcgatccaaaaaggcttgctcggctttgaaggcgtcggccgccgcttccaaaaatacggcgacatcaagttgccaaacggcgggaccgcgctcttggtggacgactacggacaccaccccgtcgaaatggcggcgacccttgccgccgcacgcggcgcgtatccggaaaaacgtttggtactcgccttccagccgcaccgctatacccgcacgcgcgatttgtttgaagactttaccaaagtcctcaataccgttgacgcgctggtgctgaccgaagtttatgccgccggtgaagagccgattgccgccgccgattcccgcgctcttgcccgcgccatccgcgtgttgggcaaactcgagccgatttactgcgaaaacgttgccgatctgcccgaaatgctgttgaacgttttgcaggacggcgacatcgtgttgaatatgggcgcgggaagcatcaaccgcgtccccgccgcgctgctggaattgtcgaaacagatttga

SEQ ID NO: 39923 - DNA, 924 bp, Neisseria meningitidis
atggaaaaccaaaggccgctcctaggcttcgcgttggcacttttggcggcgatgacgtggggaacgctgccgattgccgtgcggcaggtattgaagtttgtcgatgcgccgacgctggtgtgggtgcgttttaccgtggcggcggcggtattgtttgttttgctggcattgggcgggcggctgccgaagcggcgggatttttcttggtgctcattcaggctgctgctgctcggcgtggcgggcatttcggcaaactttgtgctgattgcccaagggctgcattatatttcgccgaccacgacgcaggttttgtggcagatttcgccgtttacgatgattgttgtcggcgtgttggtgtttaaagaccggatgactgccgctcagaaaatcggcttggttttgctgcttgccggtttgcttatgttttttaacgataaattcggcgagttgtcgggtttgggcgcgtatgcgaagggcgtgttgctgtgtgcggcaggcagtatggcatgggtgtgttatgccgtggcgcaaaagctgctgtcggcgcaattcgggccgcaacagattctgctgttgatttatgcggcaagtgccgccgtgttcctgccgtttgccgaaccggcacacatcggaagtttggacggtacgttggcgtgggtttgttttgcgtattgctgcttgaatacgttaatcggttacggctcgttcggcgaggcgttgaaacattgggaggcttccaaagtcagcgcggtaacaaccttgctccccgtgtttaccgtaatattttctttgctcgggcattatgtgatgcctgatacttttgccgcgccggatatgaacggtttgggttatgttggcgcactggtcgtggtcgggggtgcggttacggcggcggtgggggacaggctgttcaaacgccgctag

SEQ ID NO: 39924 - DNA, 510 bp, Neisseria meningitidis
atgacagacactcaaaaccgggtagccatgggctacatcaaaggcgtattcggcataaaaggctggttgaaaattgccgccaacaccgaatattccgacagccttttggactaccccgagtggcatttggtcaaggacggcaaaaccgtcagcgttacccttgaagccggaaaagtcgtcaacagcgaactccaagtcaaattcgaaggcataaacgaccgcgacttggcattctcattgcgcggttacaccatcgaaataccccgtgaagcattcgccccgacagaagaagacgaatactactggacagacttggtcggcatgaccgtcgtcaacaaagaccataccgttttaggcaaggtaagcaacctgatggaaaccggcgcaaacgacgtattgatgattgacggagaacacgggcagattctgattccgttcgtttcccaatatatcgaaaccgtcgataccggcagcaagattattactgccgactggggtttggactactga

SEQ ID NO: 39925 - DNA, 912 bp, Neisseria meningitidis
atggttcatattatgtttaatcaggcagcacaagaattgacgactatccgcgatgttttacgttttgcagtcagccgttttaatgaggcagggctcttttttggtcatggaacggataatgcgcatgatgaagcggcttatttgattctgcatactttgaatttgcctttggatatgcttgccccatatcttgatgcaaaactcttggaagctgaaaaagaggaagtgctgacggttattgagcgtcgtgctgtcgaacacattccagccgcttatttgacacaccaggcatggcagggagagtttgatttctatgtggatgagcgcgtaatcatacctcgttcttttatttatgaattgttgggtgacggacttcgtccttggatagaatacgatgagttggtgcataatgctttggatctttgcaccggaagcggatgccttgccattcagatggcgcatcattatcctgatgcccaaattgatgcggttgatgtgagcttggatgctttggaagtggcagggatcaatgtcgaagattatggtttggaagaacgcatccggcttattcatacggatttgtttgaaggattggaaggcacttatgatttgattgtttccaatccgccttatgtggatgcggaatcggttgagttattgcctgaagagtatttgcacgaaccggaattggcattgggcagcggggcggacgggttggatgccaccaggcagattcttctgaatgcggcaaagtttctgaatcccaaaggtgtattgctggtggaaatcgggcataacagggatgtattggaagcagcgtatccggagttgccttttacttggttggaaaccagcgggggcgacggttttgttttcctcttgacgcgcgagcagttattgggtgaagagtga

SEQ ID NO: 39926 - DNA, 1125 bp, Neisseria meningitidis
gtgtgcggattatgccataaaacggtgtccgccccaatcgcgggcgcgtccggagattggaaatcctgcttaaaaaatgtacaatggcgcacttttttgaaacgcggatccattatgcacatcggcggctattttatcgacaaccccatcgcacttgcaccgatggcgggcattaccgacaaacccttccgccgcctctgccgcgatttcggcgcgggttgggcggtgtgcgaaatgctgaccagcgacccgacacttagaaataccaaaaagaccctgcaccgcagcgattttgccgatgaaggcggcatcgttgccgtgcagattgccggcagcgatccgcagcagatggcggatgccgcgcgttacaacgtcagccttggggcgcaggttatcgacatcaacatgggctgtcccgccaagaaagtgtgcaatgcccaagccggcagcgcgctgatgcagaacgagccgctggttgccgccattctcgaagccgtcgtccgtgcggtggacgtacccgttaccctcaaaacccgtttgggctggcacgacgaccacaaaaacctgcctgccgtcgcccgcatcgccgaagattgcggcattgccgcccttgccgtccacggacgcactcgcacgcaaatgtacaaaggtgaagcggcttacgacctgattgccgaaaccaaatgccgtctgaacatcccggtctgggtcaacggcgacatcacttcgccgcaaaaagccgccgccgtcttcaaacaaaccgccgccgacggcatcatgatagggcgcggcgcgcaaggcagaccgtggttcttccgcgatttgaaacattacgccgaacacggtgttttaccgcctgccttgagtttggcagaatgcagtgccgccattttgaaccacgtccgcgccatgcacgcgttttatggtgagaccgccggtgtgcgcattgcacgcaaacacataggctggtacatcggcgaaatgcccgacggcgaacaggcgcggcgtgaaatcaaccgcttggacagtgcggcggcgcaatacgacatgcttgcaggttatcttgaaagacttgccggaaaaaccgaccgttgggcgtgcggctaccgcacaaatgccttctga

SEQ ID NO: 39927 - DNA, 789 bp, Neisseria meningitidis
atgatggaaaacggaaaaacagtcccgagatggcgttttgccttgaaaagtgcgggctggcacctcttaatcagcctgtcggttgcagggctggcggcattgctggtttttaaggtttggtatccttatccttatgccgagctgacgggagggctgtcgctttatcagctggtggtggctgtcgatattgtatgtggtccgctgctgactttaattttggcaagcccgaagaaaaagacaaaggcacgcatggtcgatttttccatggtcggcatcatccagctggcggctttggtgtacggtctgcacagcgtttctttggcgcgtcccgtggtggaggcgtttgaaaaagacaggattaatgttgtgaccgccgccgaagtggcggttgaagacctgcacaaagcgccggaagggctgcaaagcctgtcgtggttcggcatccgccgcattgcattgaaagaacctgaggatgcggatgagaagaacaagacgctggatttgtccctgaaaggtatcgagccgagtatgcgtcccgaccggtggctgccgtattccgacaaggaagcagaagaaatccgcaaacatctgaaaccgctgaaagtcttggcggatgcgagaaaaacgacggttgcggacattctgaaacaggcaggtctcgccgaaggggaggagctgtattacctgccgtttaccagcagcaggcagaaagagtggatagtcattaccgataaagagggcaacaccaaaggctacgcgccgatagacggcttcatcatcaccccttaa

SEQ ID NO: 39928 - DNA, 2115 bp, Neisseria meningitidis
atgttcctcttttcagacggcctacaatctattaataacaataatcgacgaaaacgcattgtgaaaaacgcctacatcccctctcgcggcatccgcaaaatcccccatctctccaccctattgcccgagtttcatatctacaaagacggaaaaggagcagaggctgttatcggctggggtttgcgcccgacgacacacaaagcgcgtgcttttgccgctgaacaccagcttccctttattgctttggaagacggctttttacgctcgcttggcctgggcgttgccggctatcctccctattccatcgtctatgacgacatcggcatctactacgacactacccgcccttctcgtttggaacaactgattcttgccgccgataccatgccgtctgaaaccttggctcaggcgcaacagacgatggatttcatcctgcaacaccacctgtccaaatacaaccacgcgcccgaactttcagacgatcatcctttacgctccccatccaagcctgaaaccgtcctcatcatcgaccaaaccttcggcgatatggccatccaatatggcggcgcagacgcctctacgtttgaactgatgtttcagacggccttaaatgaaaacccgcaagccgatatttgggtcaaaacccaccccgatgttttgtgcggcaaaaaacaaggctatctgacccagctggcgcagcaacaccgcgtccatcttttagcagaagacatcaacccgatttctttgttgcaaaacgtcgataaagtttattgcgttacctcgcaaatgggttttgaggcacttttgtgcggcaagccgctgaccaccttcggcctgccgtggtatgccggatggggtgtaagcgacgaccgccatcctgaaatcaaccgccttgttcaaacccaacgccgcgccacccgcaacttgctgcagctcttcgccgcagcctatctgcaatacagccgctacctcaaccccaataccggcgaagcaggcagcctctttgatgtcatcgactatctggcgacggtcaaacgtaaaaacgacaaattgcgtggcgagttatattgcgtcggtatgtctttgtggaaacgcgcggttgccaaaccgttctttaacgtaccctcttgccgtctgaaatttatctcttccacccaaaaactggcaagggtcaaactgtccgacgatgcacgcatcctggcttggggcaacggcaaagaggccatcgtccgctttgccgaacaacaccacatccccctgctgcgcatggaagacggctttatccgctcggtcggactcggctccaacttagtgccgccgctgtcgctcgttaccgacgatatgagcatttatttcaatgccgaaaccccgtcccgtcttgaatacatcctacaaaaccaaaacttcgacgatcaagactttcagacggccttgaagctgcaaaaaatgctgaccgaaaaccacatcagtaaatacaacgtcggcagctcagacttcaccgccccgtcaaccgacaaaaccgtgatcctcgttcccggccaggttgaagatgatgcgtctatccgctacggttcgccccaaatctaccgcaatctggatttgctccgtaccgtacgcgaacgaaaccccaatgcctatatcatctacaaaccgcatcccgatgtagtcagcggtaaccgcatcggccatatttcccctgaagatgctgcacgatatgccgaccaaaccgccgaacaagccgacatcctgacctgtctccaatacgcagacgaaatacataccatgacttcgctgaccggttttgaagccttgttgcgcggcaaaaaagtcagctgctacggcctgcctttttacgcaggctgggggcttacccaagatctgctccccatcccgcgccgtagccgcagacttgagctttggcagctgattgccggcacgctcatccactatcccgactacatccaccccgaaacccatcaggccataaatgcagaaaccgcagcccaaatcctgatacgacaaaaaaatatgcaaaaaaacaacaacggattacatcgcgggtgctttgccaaaaaattaggtaaaatcaaacaactatatcgatctttcaaataa

SEQ ID NO: 39929 - DNA, 1776 bp, Neisseria meningitidis
gtggctaaaacatatttattgactgcattgataatgtctatgacaatctctggatgtcaagtcatccatgccaatcaaggtaaggttaatactcattctgctgtcatcacaggtgcagacgctcacacgcctgaacatgcaacgggactgaccgaacaaaagcaggtgattgcaagtgattttatggtagcgtcagccaatccattagcaacacaagctggctatgatatcttaaagcaaggcggtagcgctgcagatgcgatggtggcggtgcagacgacactaagcttggtagagccacagtcgtcaggcttgggcggtggtgcatttgtgttgtattgggataataccgccaaaacattgaccacatttgatgggcgtgagacggcaccgatgcgtgcgacgccggaattatttttggataaagatggtcaaccattgaaatttatggaagcggtggtcggtggtcgctcggtgggtacgcctgctatccctaaactgatggagacgatacatcagcgatacggtgtattgccttggggaaaattatttgatacgccgatccgcttggcaaaacaaggctttgaggtgtcgccaaggcttgccatctcggttgagcaaaatcagcagcatttggcacgctatccaaaaacagccgcttattttttgccgaatggtgtgccgctacaagcaggcagcttgctgaaaaatttagaatttgctgacagtgttcaggcgttagcagctcaaggtgcaaaagctctgcatactggtaaatatgcccaaaatatcgtttcagttgtccaaaatgctaaggataaccccggtcaattatccttacaagatttatctgattatcaagtggtggaacgcccgcctgtttgtgtgacttatcgtatttatgaagtatgcggtatgggtgcaccaagctcaggtgggattgctgtgggtcagattttggggattttaaatgaattttcacccaatcaggtggggtatgatgctgaaggtttacgtctcttgggcgacgcttctaggcttgcgtttgcggatcgtgatgtatatttgggcgaccctgattttgtaccagtacccattcgccagttgatttctaaagactacctaaaacatcgcagccggctgcttgagcagtcggataaggcattgcctagcgtatctgcaggcgattttattcatgagtgggtgtcctcacaagcgattgagttaccttctaccagtcatatatcaattgtggataaggcgggcaatgtgctatcaatgacgacttccattgaaaatgcgtttggctcaactttgatggcaaatggctacctgctgaataatgagctgacagactttagttttgagccaataaagcagggcaaacaggtcgccaatcgtgtcgagcccggcaagagaccacgctcctcaatggcaccaaccatcgtatttaaagcaggcaagccttatatggcaatcggctccccaggtggtagccgtatcattggctatgtcgctaagacgattgtggcacatagtgactggaatatggatatccaagatgccatcagtgcacccaatttattaaatcgctttggtagctatgaactagaaacgggtacaaccgccctccagtggcaacaagcattaaatgatttgggctataagactgacgtgcgtgagctaaattcaggtgttcaagccattattatcgagccaagcaggctggttggtggtgccgatccacgccgagaaggtcgagtgatgggtgattag

SEQ ID NO: 39930 - DNA, 138 bp, Neisseria meningitidis
ttgataataagtcactttactcctttcttgaaatttactcctttcttgaaaaatcgtcaagaacagttatcaatctttaaaatctatttaaaacaaaaatatacagatatttcaggctgcctgaaacacaaaaaataa

SEQ ID NO: 39931 - DNA, 846 bp, Neisseria meningitidis
atgctcagttacagacacgcattccacgccggcaaccacgccgatatgctcaaacacttcaccttgtttttagtgctgcaatatttcaaccgcaaagacaagccctactggtacatcgacacgcacggcggcgcgggtgtgtacaatctcgaaggcagcgaggcacaaaaagtcggcgaataccggcaaggcatcgccctacttcgacaagcaaaaaacctgccaaccgagttaaacggctttatcgcgcacatacaaaaaatcctgccctcgcccaaactttactgcggttctccgtggctggcgcaatcgctgacccgtgtcggcgacaaattgcgcctgtttgagctgcaccccaccgactttgtccatctgcaaaacaatatgggcgaagcaggattgggcaaacgcggacaagtgttgcgcgaagacggttacaaagagctgatttccctgctgccgcccccgccgcgccgcgccaccgtcctcatcgacccgccctatgaggaaaaacaggactaccggcgtgtaacggaaacgctgaaagccgctttaaaacggtttgagtccggctgttatctcatttggtatccctgcctcagccgcgaagaaagccgcaagctgcccgaagaattgaaaaaactcctgcccgacaactaccttcacgccgaacttcacgtccacgcgccgaaagccgacggtttcggtatgcacggcagcggaatgttcgtcatcaatccgccctatctgttggcggaacaattggcggcaaacctccccgccctgacgcggctgctggcgcaagacgaaggcgcgcgctaccttttggacagcaaaatccgctga

SEQ ID NO: 39932 - DNA, 369 bp, Neisseria meningitidis
atgcgtcatcgtaatggcaatcgcaaattaaaccgtaccagcagtcatcgtgctgcaatgctgcgtaatatggcgaattcattattgactcacgaaactattgtaacaactctgcctaaggccaaggaattgcgccgtgtagtagagccgttgattacattgggtaaaaagccgtcattggcaaaccgccgtttggcatttgaccgtactcgcgaccgtgatgttgtagtaaaactgtttggcgatttgggtcctcgttttactgctcgtaacggtggttatgttcgggtgttgaaatacggattccgtaaaggtgataatgcacctctggcactggttgaattggttgacaaaccggctgctgagtaa

SEQ ID NO: 39933 - DNA, 747 bp, Neisseria meningitidis
atggattttcgttttgacattatttacgaataccgctggatgtttctttacggcgcactgacgaccttggggctgacggtcgtggcgacggcgggcggttcggtattgggtctgttgttggcgttggcgcgcctgattcacttggaaaaagccggtgcgccgatgcgcgtgctggcgtgggcgttgcgtaaagtttcgctgctgtatgttacgctgttccggggtacgccgctgtttgtgcagattgtgatttgggcgtatgtgtggtttccgtttttcgtccatccttcagacggcattttggtcagcggcgaggcggcaatcgcgctgcgtcgcggatacgggccgctgattgccggttctttggcactgatcgccaactcgggggcgtatatctgtgagattttccgcgcgggcatccagtctatagacaaaggacagatggaggcggcgcgttctttggggctgacctatccgcaggcgatgcgctatgtgattctgccgcaggcattgcgccgcatgctgccgcctttggcgagcgagttcatcacgctcttgaaagacagctcgctgctgtcggtcattgctgtggcggagttggcgtatgttcagaatacgattacgggccggtattcggtttatgaagaaccgctttacaccgtcgccctgatttatctgttgatgacgactttcttaggctggatattcctgcgtttggaaaaacgttacaatccgcaacaccgctga

SEQ ID NO: 39934 - DNA, 1842 bp, Neisseria meningitidis
atgcagacaaattatttgtctgaaacggattcgattatgaaaaaactgatttgcctgttcgccgtatttttgatgttgtgcggacgagctttcgcgctggatgcgaacgatctgctgccgccggaaaaggcattcgtgccggagcttgccgttgccgacgacggtgtgaacgtccgtttcaggattgccgacggatactatatgtatcaggcgaaaatcgtcggcaagaccgatccggcggatttgttgggacagccttctttcagcaagggcgaagagaaggaagacgagtttttcggcaggcagacggtttaccatcacgaagcgcaggttgcctttccttatgcaaaggctgtcggcgaaccgtataaattggttttgacctatcagggctgtgccgaagtcggcgtgtgctatccgcccgtggataccgagtttgatatttccggcaacggcacttaccatccgcaaaccgacgaaccggcatccgccaaagaccgctttttgcagccttcctctcaaaacggcagcggggcgctgccgcccccgaagggggatgagggcggcgacagccgtttcaagctgtcttgggatacgctcaacgccaatcttttggcgttttttctcgccggtttgggtctgagttttaccgcctgtatgtatcccctgttgccgattgtttccagtattgtggtcggcgacaaaaaggcgggcaaggcgcgggcgtttgtgctgtccgtcgtttatgttcagggtttggctctgacttatacgctggtcggcattgttgccggactgacgggcgcgctgctgaccgtatggttgcagcaggcttgggtcgtgttggcggcatcggctttgatggtcgtcttggcactgtctatgttcgggctgttcaacatccagcttcccaacgccgtgcagtcgtattttcagaatcaaagcagcaggctttcaggcggtaaaatcgtttccgtctttattatgggcatattgtccgcgctgattgtcgggccgtgcgtcgccccgccgctggcatttgctttgggctacatcggtcagacgggcgatgcggttttaggcggtttggcactttacactttggcgttgggcaccggcgttccgctgattgccatcggcacgttcggcgggcatatcctgcctaaggcaggcgattggatgaatgccgtcaaatacgctttcggctttatcctgcttgccgtcgccgtttacctcgccacgccgcacttgccctattatctcgtcgtcgcgctgtacacgctgctgatgctggttcctgcctgtatgctgctggtcaacggacgcaggcagaaacgccgtccgaaagctgtggcattcgcattgggcggcatattgctgataggcggcgcgtggttcggctggcagggcgcaaacggcaaaacgaccgcgctgcaccatttcctgaccctcaatccgccggccgaagcaggcaaatcttcggaacacggaaaaatgtttgccgatactgccgcgctgaaggcagcgatggatacggcgttgaaagaacatcccgacaaacccgtcgttttggatttttatgccgactggtgcatttcctgcaaagaaatggcggcttacacgctcaatcagccggaagtgcatcaggcagtcgatatggaacgctttttccaaatcgacgtaaccgccaacaagcccgaacatcaggcgttgttgaaagaatacggtctgttcgggccgccgggcgtgtttgtcgtccgctccgacggcagccgcagcgagccgctgctgggttttgtcaaagcagacaagtttatcgagtggtatgaacaaaaccgctga

SEQ ID NO: 39935 - DNA, 453 bp, Neisseria meningitidis
atgtttatggctattgcgaacaataaaaaagcatttcacgattttttcattgaagaccggattgaagccggtttggtattggaaggctgggaagtcaaggcgatccgtgctgcacgcgtacagcttaaagagagttatatctattggaaaaaagacgcgttttatttggtcggctgccatattacggctttgcccacagcctcgacacacattaaaccagatgccgtacgtccgcgcaagctcttgttgaaccagtcggaaatcaacaaattaatcggcaaaaccgaacgtgccggctacaccatcgtgccgctggatttgcatttttcacgcggaaaaatcaagatggaaatcggtttggcaaaaggtaagaaacagcacgacaaacgccagagtatgaaagaggcggattggaaacgcgagaaacagcggttgattaagcatacgcgctga

SEQ ID NO: 39936 - DNA, 318 bp, Neisseria meningitidis
atgggcaacaaattgactctgcctgccgaactgcctgacgaacaggatttgcgggcggtattggcatacaatatgcggcttttccgcgtgaacaagggttggtcgcaagaagaattggcgcggcaatgcggtttggacaggacttatgtgtcggcagtcgagcgcaaacgctggaacatcgccctgtcgaatatcgaaaaaatggcggcggctttgggcgtggcggcgtatcagttgctgctgccgccgcaggaacggttgaagctgatgaccaattccgccgatacccgacaaatgccgtctgaaagcggtatttga

SEQ ID NO: 39937 - DNA, 987 bp, Neisseria meningitidis
gtgagtggagcagaaagttaccggcatatcacggtcttgctgaatgaggcggtggatgcgcttgccgtgcgcgaagacggtgtctatgtggacggtacgttcggcaggggagggcattcccggctgattttgtcgcgtttgggcgatgcggggcggttgattgttttcgacaaagacccgcaggcgattgctgtggcagaagagctggcgcgttcggacaaacgggtcggtgtcgtgcatggcggttttgcttcgtttcagacggcattggacggtttgggtatcggcaaggtggacggtgcgctgtttgatttggggatttcgtctccgcaaatcgatgacggcagccgcggtttcagctttcgtttcgatgcccctttggatatgcgtatggatacgacgcgcggtatgtctgccgcagagtggatagcggttgcgtcggaacaggatttgcacgaggtaatcaagaattatggtgaagagcggtttagccgccagattgcgcgcgccattgtcgcgcaacgggcggaaagtccaatcgatacaacccgcaagctggcgcagatcgtggcacaaaacgtccgtactcgcgagcgggggcaggatcctgcgacgcgcaccttccaggcggtccgcatctttattaaccgcgagcttgaagaagtaggggcagtattgccgcaggtcatgtgtcgtctgaaagagggcggacgtttggcggtcattgctttccattcgttggaagaccgcattgtgaagcagtttgtcaaaaaatattcgcaacacgcgcccctgccgcgttgggcggcggtcagggaagcggatttgcccgagctgcccctgaaaatcgtgggcagggcattaaagccgggtgaggcggaaattgccgccaatccgagggcgagaagtgcggttttgcgtgtggcggagcggactgccggttcgataccggaacaatcacagagaaaaacgtctgaatggcaatga

SEQ ID NO: 39938 - DNA, 1083 bp, Neisseria meningitidis
atgccgtctgaagccgcttcagacggcattttgccgctttaccctacccgcactatttttcagaaaccgatcatgcttccattccttccagaaccctccctttcctatacgcaacaaaaccgtaccgccgttttgctgttgaacctcggcacgcccgacgcgccgaccgcgcaggcggtacgaccttatctgaagtcctttctgaccgaccggcgcgtcgtcgaactgcccaaatggctgtggtatcccattctgcatggtctggtactgacgctccgccccaaaaaaagcgcgcacgcctatgaaaaaatctggtttaaggaaggttcgcccttagaagtttacacagcacgccaagctgccgcgcttgccgaacgtatgcccgacctcatcgtccgccacgccatgacctacggcaatccttcggtggcagacgtattgtcggaactgaaggcgcaaggcgcgggcaggctgctggttatcccgatgtacccgcaatatgccgcttccagcagcggcgcggcagtagataaggtgtgcgaacaattactgctgcaacggaaccaaatgagcgtccgcaccgtttcgcgcttttatgacgataccggctacattgatgcgatgaaaaaccacatcctccgatattgggcggaacacggacgtgggaaaaaactgatgttgagttttcacggcgtaccgcagaagcactacgacctcggcgacccctatcccgacgagtgccgccacaccgccaaactgcttgccgaagcactggaactgaccgaagaccaatatgtcgtatcgttccaaagccaattcggcagggcaaaatgggttacaccgagtacgcaggatttgttcggcaaactgcccaaacagggggtaaccgagctggacgtattctgcccgggctttttggcagactgtttggaaacactggaagaaatcgccctgatggggcgggaacagttttatgaagcaggcggcaaaagctaccgctatatcccctgcctcaacgacaatcccgactggatagacgcactcgtcgcacttgccgaagaaaaccttggcggctggcgttga

SEQ ID NO: 39939 - DNA, 1311 bp, Neisseria meningitidis
atgagcgtaactgttgaaactttagaaaatctggaacgcaaagtagtgttgtccctgccttggtccgaaatcaacgcagaaaccgataaaaaactgaaacaaacccagcgccgtgcaaaaatcgacggtttccgcccgggtaaagcacctttaaaaatgattgcccaaatgtacggtgcgagcgcgcaaaacgacgtgatcaacgagctggtgcaacgccgcttccacgatgttgccgttgcccaagagttgaaagtggcaggcttcccccgttttgaaggcgttgaagaacaagacgataaagaatctttcaaagttgccgccatttttgaagtgttccccgaagtcgttatcggcgatttgtctgcacaagaagttgaaaaagtaaccgcttccgtcggtgatgccgaagtggaccaaaccgtagaaatcctgcgcaaacaacgcacccgcttcaaccatgtcgaacgcgaagcccgaaacggcgaccgcgtcatcattgactttgaaggcaaaatcgacggcgaaccttttgcaggcggcgcatccaaaaactacgccttcgtattgggcgcaggtcaaatgctgcctgaatttgaagccggcgtagtcggcatgaaggctggcgaaagtaaagacgttaccgtcaacttccctgaagaataccacggcaaagacgttgccggtaaaactgccgtgttcaccattacgctgaacaacgtttccgaagcgactctgcctgaagtcgatgcagattttgcaaaagccttgggtattgcggatggcgacgttgccaaaatgcgcgaagaagtgcagaaaaacgtaagccgcgaagtggaacgccgcgtaaacgaacaaaccaaagaatccgtaatgaacgcgctgctcaaagccgtagagctgaaagcacctgttgctttggtcaatgaagaagccgcacgcttggcaaacgaaatgaaacaaaattttgttaaccaaggtatggctgatgctgccaacttggatctgcctttggatatattcaaagaacaagccgaacgccgcgtatctttgggtctgattttggccaaactggttgatgaaaacaaactggaaccgactgaggagcaagtcaaagccgttgtcgccaacttcgcagaaagctacgaagatcctcaagaagtaatcgactggtactacgcagagccttctcgcctgcaagccccgacttctttggcgatagaaagcaacgtcgttgatttcgttttgggtaaagccaaagtaaacgaaaaagctttgtcttttgacgaagtgatgggcgcgcaagcctga

SEQ ID NO: 39940 - DNA, 372 bp, Neisseria meningitidis; identical to SEQ ID NO: 36794

SEQ ID NO: 39941 - DNA, 1077 bp, Neisseria meningitidis; identical to SEQ ID NO: 39857

SEQ ID NO: 39942 - DNA, 492 bp, Neisseria meningitidis
ttgaaaaaccatccgcccgtcgccgcctttcccccgcaaggcgaaatggcgcatttcatgggtttggcattggaacaggcgaaactgtccgcattaatgggcgaaatacccgtcggggcagtcatcgtttcagacggcaaaatcatcgcatcggcacacaacacctgcattgccgactgcaatgtcagccggcacgccgaaatcaacgccttggcacaggcaggcagcgaaatgcaaaactaccgccttgacggatgcgacatctacatcaccctcgaaccatgcgccatgtgcgcgtccgcactgatacaggcacgaatcaggcgcgtgatctacggtgcggcagaacccaaaaccggcgcggcaggaagcatcgtcaacctgtttgccgacaaacgcctcaatacgcacaccgccatacggggcggaatcctgcaagaagaatgccgcgccgtattaagccgttttttccaaaacaaaagaaaaggttga

SEQ ID NO: 39943 - DNA, 546 bp, Neisseria meningitidis
atgaaacactatgccttactcatcagctttctggctctctccgcgtgttcccaaggttctgaggacctaaacgaatggatggcacaaacgcgacgcgaagccaaagcagaaatcatacctttccaagcacctaccctgccggttgcgccggtatacagcccgccgcagcttacagggccgaacgcattcgacttccgccgcatggaaaccgacaaaaaaggggaaaatgcccccgacaccaagcgtattaaagaaacgctggaaaaattcagtttggaaaatatgcgttatgtcggcattttgaagtctggacagaaagtctccggcttcatcgaggctgaaggttatgtctacactgtcggtgtcggcaactatttgggacaaaactacggtagaatcgaaagcattaccgacgacagcatcgtcctgaacgagctgatagaagacagcacgggcaactgggtttcccgtaaagcagaactgctgttgaattcttccgacaaaaacaccgaacaagcggcagcacctgccgcagaacaaaattaa

SEQ ID NO: 39944 - DNA, 549 bp, Neisseria meningitidis
ttgaatttaacggagggcgacaccgtgttggacagggaaggctatcgccccaatgtcggtatcatcttaaccaacaaccgcgacgaagtcttttggggtaagcgcgtgcgcgaacattcttggcagtttccgcaaggcggcatcaagccgggcgaaagccccgaaaccgcgatgtaccgcgagctttacgaagaagtcggacttctgtcgcaacacgtcaaaatcgtcgggcggacgcgcgactggctgcgttacgacgtgccgaacaactgggtacgccgcgaatggcgcggctcttatcgcgggcagaagcagatttggtatctcctgcgcctgaccggccgggattgcgatgtcaacctgcgcgccacccgccaccccgaatttgacggctggcgttggcaccaatattgggcgcccgttgacgaagtgattgatttcaaacgcgacgtttatttgggggcattgaaagaactttcttcccgcttcctgcgcggtatggaaagttatgaagactttgccgcccgccaactttccggcaaccggtaa

SEQ ID NO: 39945 - DNA, 501 bp, Neisseria meningitidis; identical to SEQ ID NO: 37882

SEQ ID NO: 39946 - DNA, 846 bp, Neisseria meningitidis
atgaacaaattttcccaatccggaaaaggtctgtccggttttttcttcggtttgatactggcgacggtcattattgccggtattttgttttatctgaaccagagcggtcaaaatgcgttcaaaatcccggttccgtcgaagcagcctgcagaaacggaaatcctgaaaccgaaaaaccagcctaaggaagacatccaacctgaaccggccgatcaaaacgccttgtccgaaccggatgctgcgaaagaggcagagcagtcggatgcggaaaaagctgccgataaagccgacgaggttgaggaaaaggcggacgagccggagcgggaaaagtcggacggacaggcagtgcgcaagaaagcactgacggaagagcgtgaacaaaccgtcggggaaaaagcgcagaagaaagatgccgaaacggttaaaaaacaagcggtaaaaccatctaaagaaacagagaaaaaagcttcaaaagaagagaaaaaggcggagaaggaaaaagttgcacccaaaccgaccccggaacaaatcctcaacagcggcagcatcgaaaaagcgcgcagtgccgctgccaaagaagtgcagaaaatgaaaacgcccgacaaggcggaagcaacgcattatctgcaaatgggcgcgtatgccgaccgccggagcgcggaaggacagcgtgccaaactggcaatcttgggcatatcttccaaggtggtcggttatcaggcgggacataaaacgctttaccgggtgcaaagcggcaatatgtctgccgatgcggtgaaaaaaatgcaggacgagttgaaaaaacatgaagtcgccagcctgatccgttctatcgaaagcaaataa

SEQ ID NO: 39947 - DNA, 345 bp, Neisseria meningitidis; identical to SEQ ID NO: 36231

SEQ ID NO: 39948 - DNA, 405 bp, Neisseria meningitidis
atgagaaaaagtcgtctaagccggtataaacaaaataaactcattgaactgtttgtcgcaggtgtaactgcaagaacagcagcagagttagtaggcgttaataaaagtaccgcagcctattattttcatcgtttacgattacttatttatcaaaacagtccgcatttggaaatgtttgacggcaaagtagaagcagatgaaagttattttgctgaacgacaaaaccatatcaatggaattgggaacttttggaaccgggcaaaacgtcatttacgcaagtttgacggcattcccaaagcgcattttgagctgtatttaaaggggtacgaacgacgttttaacaacagtgagataaaagttcaaatttccattttaaaacaattagtaaaatcgagtttatcctag

SEQ ID NO: 39949 - DNA, 654 bp, Neisseria meningitidis
atgggattgggcatggaaatcggcaagctgattgtggcttttttggtgctgattaatccgtttagcgcgttgtcgctttaccttgacctgaccaacgggcacagcacgaaggagcgcaggaaggtcgcgcggacggccgccgttgccgtgtttgccgtgattgcggtatttgcgctgatcggcggtacgctgctgaaggttttgggcatcagcgtcggttcgtttcaggtcggcggcgggattttggtgctgctgatcgccatttcgatgatgaacggcaacgacaatcccgccaagcagaatctcggcgcgcagccggaaacggggcaggcgcgccccgcccgcaatgccggagcgattgccgtcgtgcccatcgccataccgatcaccatcggcccgggcggtatttcgaccgtgattatttacgcttcggcagccaaaacgtacagcgacatcgcgctgattatcgtggccggtttggtggtcagtgcgatttgttatgccattttaattgttgcagggaaggtcagccgcctgctgggcgcgacggggctgacgattttaaaccgtatcatgggtatgatgctggcggcggtatcggtggagattattgtgtcgggactgaaaacgatattcccgcaactggcaggttga

SEQ ID NO: 39950 - DNA, 435 bp, Neisseria meningitidis
atgtttttgaatacaattcaacctgctgttggtgctacgcatgctggtcgtcgtgttggacgcggtattggtagtggtcttggcaaaacgggtggtcgtggtcataaaggtcaaaagagtcggtctggtgggtttcataaggtgggtttcgagggtggtcaaatgcccttgcaacgacgcctccctaaaagaggttttaaatctttaacagcatcagctaatgcacagcttcgtttaagtgaactggaatcaattgctgttaatgagattgatattttggtcttaaagcaagcgggtctgattgcatctacagtctctaatgttaaagttattgcttctggtgaaatttctaaggcagttgctttgaagggtattaaagttaccaaaggtgcgagagctgctatcgaggctgttggtggtaagattgaaatgtaa

SEQ ID NO: 39951 - DNA, 285 bp, Neisseria meningitidis; identical to SEQ ID NO: 39838

SEQ ID NO: 39952 - DNA, 453 bp, Neisseria meningitidis
ttggttatgtatgtagtaaaatcagccaatgatggaggtaattccctatttttaagttcatcagatattgtcaatcagttatctaaaacagaaaccggtaaaaaacacttaaaaacattaacgggcaatttatatccatttaaagcaccagcatcatttgataaaaaacaaggtgtgagatggggtaatatcttatcggtcaatactcaaatgattagatttagaagtgattttatctataaaggtattgaagaaaatagaaataaagtatcaaaggaaatggtacttgcacttgattatcttgtaaagattataaaaaatgcgagtgatattcaagaattttctgcacaagatgatggtttgattattattgacaatgtcaatggcttgcatgccggaactgattatacggataaaaacaggcattatattagagcaagaattactgtataa

SEQ ID NO: 39953 - DNA, 1911 bp, Neisseria meningitidis; identical to SEQ ID NO: 39858

SEQ ID NO: 39954 - DNA, 1155 bp, Neisseria meningitidis
ttgttggaacaggatatgagtcaaaatgcctcggtgggcattgtaacgccccaaaaaattccgtttgaaatgccgctggttttggaaaacggtaaaactttgccgcgtttcgatctgatgattgaaacctacggcgagctgaatgccgaaaaaaataatgcggttttaatctgtcatgcgctgtcaggcaaccatcatgttgcgggcaggcattcggcggaggataaatatacgggctggtgggacaatatggtaggacccggcaaaccgattgatacggaacgttttttcgtggtcggtttgaacaatctgggcggctgtgacggcagcagcggacctttgtcgatcaatcctgaaacgggtagggaatacggcgcggattttccggtggttacggtgaaggactgggtaaaatcacaagccgcgcttgccgactatctcggcatcgggcaatgggcggcggttgtcggcggcagtttgggcggtatgcaggctttgcagtgggcgatttcctatcccgaacgcgtgcgccatgccttagtgattgcgtctgcgccgaaactgtccacgcaaaatatcgcgttcaacgatgtggcgcgtcaggcgattttgaccgaccccgatttcaacgaaggacattaccgcagccataataccgttcctgcacggggcttgcggattgcccgcatgatggggcacattacctatcttgccgaagacggtttgggcaaaaaattcggacgcgatttgcgttccaacggctatcaatacggttatggcgttgaatttgaagtagaatcctatctgcgctatcagggcgacaaattcgtcgggcggtttgatgccaacacctatttgctgatgaccaaagctttggactatttcgatccggcggcggatttcggcaacagcctgacccgcgccgtgcaggatgtgcaggcaaaattctttgtcgccagcttcagcaccgattggcgtttcgcgcccgaacgttcgcacgaactggtcaaggccctgattgccgcccaaaaatccgtgcagtatatcgaagtcaaatccgcacacgggcacgatgcctttttaatggaagacgaagcctatatgcgtgcggtcgccgcctatatgaacaacgtttataaggaatgtcagcaatga

SEQ ID NO: 39955 - DNA, 621 bp, Neisseria meningitidis
atggcacgttatattggccctaaatgtaagttggcacgtcgcgaaggtacggatttgtttttgaagagtgcgcgccgctctttggattctaaatgtaaaattgattccgctcctggtcagcatggtgcaaaaaaaccgcgtttgtcagactatggtttgcagttgcgtgaaaaacaaaaaatccgccgtatttatggcgtattagaacgtcagttccgtcgttatttcgcagaagctgatcgtcgtaaaggttctaccggcgagttgctgttgcagttgctggaatctcgtttggataatgtcgtttatcgtatgggtttcggttctacccgagctgaagcaagacagcttgtttctcataaggcgatagttgtgaatggacaagttgtcaatattccttctttccaagtgaaagctggtgatgttgtctcagttcgtgaaaaagccaaaaaacaggtacgtattcaagaagcattgggtttggcaactcaaatcggcttgccgggttgggtttctgtagatgcggataaacttgagggtgtgttcaaaaacatgccggatcgctcggaattgaccggtgatattaatgaacagctggtggtagagttctactctaaataa

SEQ ID NO: 39956 - DNA, 297 bp, Neisseria meningitidis; identical to SEQ ID NO: 37913

SEQ ID NO: 39957 - DNA, 582 bp, Neisseria meningitidis
atgaaaataagatggcggtacggaattgcgttcccattgatattggcggttgccttgggcggtctgtcggcatggttgggacgcatcagcgaagtcgagattgaagaagtcaggctcaatcccgacgaaccgcaatacacaatggacggcttggatggcaggcggtttgacgaacagggatacttaaaagaacatttgagcgcgaaaggcgcgaaacagtttcccgaaagcagcgacatccattttgattcgccgcatctcgtgttcttccaagaaggcaggttgttgtacgaagtcggcagcgatgaagccgtttaccataccgaaaacaaacaggttctttttaaaaacaacgttgtgctgaccaaaaccgctgacggcaaacggcaggcgggtaaagttgaagccgaaaagctgcacgtcgataccgaatctcaatatgcccaaaccgatacgcctgtcagtttccaatatggtgcatcgcacggtcaggcgggcggcatgacttacgaccacaaaacaggcatgttgaacttctcatctaaagtgaaagccacgatttatgatacaaaagatatgtaa

SEQ ID NO: 39958 - DNA, 843 bp, Neisseria meningitidis; identical to SEQ ID NO: 39859

SEQ ID NO: 39959 - DNA, 543 bp, Neisseria meningitidis
gtgcagagttggaaagaaaggcgggatttcaatattgtaaagcaggatttggatttttcctgtggggcggcttcggtggcgacgcttttgaacaatttttacgggcaaacgctgacggaagaagaagtgttgaaaaagctggataaggagcagatgcgcgcgtcgtttgaggatatgcggcgcattatgccagatttgggttttgaagcgaaaggctatgccctgtctttcgagcagctcgcacagttgaaaatccccgtcatcgtgtatctgaaataccgcaaggatgatcatttctcggtattgcgcgggatagacggcaatacggttttgcttgccgacccgtcgctggggcatgtttcaatgagcagggcgcagtttttggatgcttggcaaacccgtgagggaaatttggcaggtaagattttggcggtcgtgccgaaaaaagccgagacaatttcaaataaattgtttttcacacatcatcccaagcggcagacagagtttgcagtcggacaaatcaggcaagcacgtgcagagtaa

SEQ ID NO: 39960 - DNA, 1296 bp, Neisseria meningitidis
gtgattgccatgatttacatcgtactgttcctcgccgccgtcctcgccgttgtcgcctacaatatgtatcaggaaaaccaataccgcaaaaaagtgcgcgaccagttcgggcactccgacaaagatgccctgctcaacaacaaaaccagccatgtccgcgacggcaaaccgtccggcgggtcagtcatgatgccgaaaccccaaccggcggtcaaaaaaacggcaaaactccaagaccctgctatgcgcaacctgcaagaacaggatgccgtctacatcgccaagcagaaacaggcaaaagcctccccgttcaaaaccgaaatcgaaaccgccttggaagaaagcggcattatcggcaactccgcccacaccgtttccgaaccccaaaccggacattccgcaccgaaacctgccgacgcgccggcaaaacctgcacccgttccgcaaacacctgcaaaaccgctgattacgctcaaagaactgtcaaaagtcgaactgccgtggtttgacgtgcgcttcgacttcatctcctatatcgcgctgaccgaagccaaagaactgcacgcactgccgcgcctttccaaccgctgccgctaccagattgtcggctgcaccatggacgaccatttccagattgccgaacccatcccgggcatccgctatcaggcatttatcgtgggtattcaggcagtcagccgcaacggacttgcctcgcaggaagaactctccgcattcaaccgccaggtggacgcattcgcacaaagcatgggcggtcagacgctgcacaccgaccttgccgcctttatcgaagtggcttccgcactggacgcattctgcgcgcgcgtcgaccagaccatcgccatccatttggtttccccgaccagcatcagcggcgtagaactgcgttccgccgtaacgggcgtgggtttcgttttggaagacgacggcgcgttccactataccgacacgtcgggctcgaccatgttctccatctgctcgctcaacaacgagccgtttaccaacgcccttttggacaaccagtcctacaaaggcttcagtatgctgctcgacatcccgcactctccggcaggcgaaaaaaccttcgacgatttgtttatggatttggcggtacgcctgtccggccagttgaacctgaatctggtcaacgacaaaatggaagaagtttcgacccaatggctcaaagacgtgcgcacttatgtattggcgcgtcagtccgagatgctcaaagtcggtatcgaaccgggcggcaaaaccgcattgcgcctgttctcctaa

SEQ ID NO: 39961 - DNA, 342 bp, Neisseria meningitidis; identical to SEQ ID NO: 37907

SEQ ID NO: 39962 - DNA, 435 bp, Neisseria meningitidis
atgtgcgggttgtggctgctgcgcgccctgactgccaaactgccccaacagcgttatgcggctttgtttattacactgttttttgccgcagtattggtgttcagacggcatgattcgatgtattggtatcccgtcctcgtcaatctgatgatgttggcggtgttcggcggcagcctgtttgccggacagacggtgattgaaaaacttgcgcggctgcaacagcccgacctgcctgaaaaagccgtgcgctatacccgccgggtaacgcaggtttggtgcgtattttttataatcaacgggacgcttaccgctttgttggctcggttggggcgatatgattggtgggcggtttatacaggcgtgattgcctatgtattgatggggatgctgtttgccggcgaatggctttaccgcaaactcgttttgaaagtctga

SEQ ID NO: 39963 - DNA, 357 bp, Neisseria meningitidis
atgaatgaacacaacctgttaattttctgtttaaaagacaatgtttcaattagtgaatatactgaaatgattgattgggcttataaaaacattcaatctgaaacagttgtagaaattacggaaagtcaaattattgaatatcaaaatcgtggattatggagacttgtttctgaaattaccgataattggttatttggaccaagtgagggggattggctaatagataaggaaagtattttggctgtaaaagaaaaattacaaaattcagatttttctacagagcccttagtgaaaaatattattcatgtacttgaatatgctataaaaaatgaaaaaacagtaatttttcatttttga

SEQ ID NO: 39964 - DNA, 201 bp, Neisseria meningitidis; identical to SEQ ID NO: 36765

SEQ ID NO: 39965 - DNA, 312 bp, Neisseria meningitidis
atgcttgccatactgttgtctgcaatattgggactggtatcgacaactgccgctgccggtacgtcagaacccgcccaccgcgataccaaacatatccgcaaggcaaacaagcagatgctgcaccccgaatgcaggaaatatttggaacgccgtgccgcgtggtaccgatcgcaaggcaacgtgcaggaattgcgcgaaaacaaaaaggcgcgcaaagcattccgctccctgccttatgcggaacagaaaatccaatgccgggcggcttatgaggctttcgatgatttcgacggcggcagtttccgccgttaa

SEQ ID NO: 39966 - DNA, 216 bp, Neisseria meningitidis; identical to SEQ ID NO: 37963

SEQ ID NO: 39967 - DNA, 399 bp, Neisseria meningitidis
  misc_feature 6, 7, 8, 9, 10: 'n' is a, c, g or t
gtgtgnnnnnggcgacggggtaaaaaaatgttgtttgaagaaaatccgatagacggacattttacagagtatagccaccggtcgggtgaaatccgattggcgggtcaaagtttccataaacccgtgcttgtacataaggattcggtctgcctgtcgcaatgccgaaccttgtccgatctgactccggaaaacctgttgtccgacatcaaacctgttgactatccggaaatattgattatcgggacgggcgcggctcaggagtttatccatcccaaaatcatggcggatttttcccgaatcggaatcagcgtggaatgcatgaataccgattcggcattcaggacattggttttcctgcactcggaagggcgcagggcttgggcttggcttcagccgtaa

SEQ ID NO: 39968 - DNA, 396 bp, Neisseria meningitidis
atgatgtattcgtttgaagcgaatgcaaatgcagtaaaaatatctgaaactgtttcagttgataccggacaaggtgcgaaaattcataagtttgtacctaaaaatagtaaaacttattcatctgatttaataaaaacggtagatttaacacacatccctacgggcgcaaaagcccgaatcaacgccaaaataaccgccagcatttcccgcgccggcgtattggcggggggcggcaaacttgcccgcttaggcgcgaaattcagcacaagggcggttccctatgtcggaacagcccttttagcccatgacgtatacgaaactttcaaagaagacatacaggcacgaggctaccaatacgacaccgaaaccgacaaatttgtaaaggtctcaggctaa

SEQ ID NO: 39969 - DNA, 408 bp, Neisseria meningitidis
atggaaattcgggcaataaaatatacggcaatggctgcgttgcttgcatttacggttgcaggctgccagttggcgggttggtatgagtgttcgtccctgtccggctggtgtaagccgagaaaaccggctgccatcgatttttgggatattggcggcgagagtccgccgtctttagaggactacgagataccgctttcagacggcaatcgttccgtcagggcaaaggaatatgaatccgcacaacaatcttacttttacaggaaaatagggaagtttgaagcctgcgggttggattggcgtacgcgtgacggcaaacctttgattgagacgttcaaacaggaaggttttgattgtttgaaaaagcaggggttgcggcgcaacggtctgtccgagcgcgtccgatggtaa

SEQ ID NO: 39970 - DNA, 318 bp, Neisseria meningitidis
atggcggaaaagctggcgatgtcggcaggcgggtatgccaaaatcgaacgaggcgaaacgcagttgaatatcccgcgtttggagcagttggctcagattttcaaaatcgatatgtgggacttgctcaaatcgggcggtggtgggatggtgtttcagattaatgaaggtgatagtggtggcgatattgcgttgtatgcgtcgggtgatgtttcgatgaaaatagaatttttaaaaatggagttgaaacactgcaaagaaatgttggaacaaaaagacaaagaaatcgagctgctccgcaagctgaccgaaaccgtttaa

SEQ ID NO: 39971 - DNA, 744 bp, Neisseria meningitidis
atgcctgatgccgtcaaaaaagtttacctgatacacggttggggggcgaaccgccacgtgtttgacgatttgatgccgcgcctgcctgcaacgtgggcggtgtccgccgtcgatttgcccggacacggcgacgcgcccttcgtgcaacccttcgatattgaggcagccgccgacgctgttgccgcgcaaatcgatacgcccgccgacattctcggctggtcgctcggcggattggtcgcgctgtatctggcggcgcgccatcccgacaaagtccgttcgctctgcctgacggcgagtttcgcacggctgacggctgccgaagattatcccgaagggcttgccgcgcctgcactgggcaaaatggtcggcgcgttccgaacggattatgccaaacatatcaaacagtttctacaattgcagcttctgcacacgcctgatgccgccgaaatcatcggcaggattctgcccgatttggcgcgctgcggcacgccctccgccctgcaggaggcgttggacgcggcggaaagggcggatgcgcggcatttgttggacaagatagatgttccggtactgctggtgttcggcggcaaagacgcgattacaccgccgcgtatgggtgagtatctgcatcggcatttgaaaggcagcaggctggttgtgatggaaaaggcggcacacgcgccgtttttgagccatgcggaagcgtttgccgcgctgtaccgcgactttgtcgaaggggtttga

SEQ ID NO: 39972 - DNA, 981 bp, Neisseria meningitidis
atggcgatggcaggaaacgaaaaatatcttgattgggcacgcgaagtgttgcacaccgaagcggaaggcttgcgcgaaattgcggcggatttggacgaaaacttcgcccttgcggcggacgcgttgttgcactgcaaaggcagggtcgttatcacgggcatgggcaagtcgggacatatcgggcgcaaaatggcggcaaccatggcctcgaccggcacgcccgcgtttttcgtccaccctgcggaagcggcacacggtgatttgggcatgattgtcgataacgatgtcgtggttgccatttccaattccggcgaaagtgatgaaattgcggcgattattccggcgttgaaacgcaaaaacattaccttcgtctgcatcaccgcccgccccgattcaaccatggcgcgccatgccgacatccacatcacggcgtcggtttccaaagaagcctgcccgctggggcttgccccgaccaccagcaccaccgccgtcatggctttgggcgatgcgttggcggtcgttctgttgcgcgcgcgcgcgttcacgcccgacgacttcgccttgagccaccctgccggcagcctcggcaaacgcctgcttttgcgcgttgccgacattatgcacaaaggcggcggcctgcctgccgtccgactcggcacgcccttgaaagaagccatcgtcagcatgagtgaaaaagggctggggatgctggcggtaacggacgggcaaggccgtctgaaaggcgtattcaccgacggcgatttgcgccgcctgtttcaagaatgcgacaattttaccggtctttcgatagacgaagtcatgcatacacaccctaaaaccatcgccgccgaacgcctcgccaccgaagccctgaaagtcatgcaggcaaaccatgtgaacgggcttctggttaccgatgcagatggcgtgctgatcggcgcgctgaatatgcacgacctgctggcggcacggattgtataa

SEQ ID NO: 39973 - DNA, 1332 bp, Neisseria meningitidis
atgaacacaacatcccaatttaccagtaatttctggaatatatatattgcagttattgtcttactgagctttatcgctttggcttggctgctgctgtctcaaaatgttgtcaaacgtccgaagaagggcgaagaagtacaaactacgggtcacgagtgggacggcattgccgaatacgacaatccgctgccccgctggtggttttggctgtgtgttttgacgtggctgttcggtatcggttatctggttatgtatccgggtgtcggcgactacaaaggtctgctgaaatggaccagccataaccaatatgaaaaagaggtcaaaaaagccgatgagcaatacggcaaactgtatgccaagtttgcggatatgccgattgaaaaagtggcaaaagaccctcaagccaagcaaatcgcccaaaacctgtttaacacttattgtatccagtgccacggctctgatgctaaaggctctaaaggttttccgaatctgaccgatagcgattggttgtggggcggtgatcccgataaaatccacgagaccatcgaaaaaggccgtgttgcgactatgcctgcctggggccctgctttgggcgaagaaggcgtgaaagacgttgcccattatgtgatgtccctttcaaaacccgaaggtcagtatgatgaggaacgtgccgcgcgcggacaagccttgttcagcggtccgcctgccaactgtttcacttgccacggcgataagggacaaggtatccaaggtttgggtccgaacctgactgatgacgtgtggttgtggggcggtacgcaaaaatccattatcgaaaccattaccaacggtcgcagcagccaaatgcccgcttggggacatttcttggataaagacaaactgcatattatgactgcttatgtatggggtctttccgataaagacggtaaagctccggtgaaaaaagccgagcctgcaccgactcccgcaccggcggcagaacccgcagcctctgctcctgcagaagcagcacaagccgcgtccgaagccaaacctgccgcagcagaacctaaagccgaggaaaaagccgcacctgctgccaaagcggacggcaaataggtttatgaaaccgtttgtgccgcctgccatggcaatgcgattccgggtattccccatgtaggcatcaaagccgattgggccgaccgcatcaaaaaaggcaaggacacgttgcacaaacacgcgatcgaaggtttcaatacgatgcccgcaaaaggcggtcgcggcgatttgagcgatgatgaggttaaagctgcggttgactatatggtcaaccagtcaggcggcaaattctaa

SEQ ID NO: 39974 - DNA, 759 bp, Neisseria meningitidis
  misc_feature 736, 737, 738, 739, 740: 'n' is a, c, g or t
atgacgtttgataaatggttgggcttgtcaaaactgcctaaaaatgaagcaagaatgctgctgcaatatgtttcggaatatacgcgcgtgcagttgttgacgcggggcggggaagaaatgccggacgaagtccgacagcgggcggacaggctggcgcaacgccgtctgaacggcgagccggttgcctatattttaggtgtgcgcgaattttatggcagacgctttacagtcaatccgagcgtgctgattccgcgccccgaaaccgaacacttggtcgaagccgtattggcgcgcctgcccgaaaacgggcgcgtgtgggatttggggacgggcagcggcgcggttgccgtaaccgtcgcgctcgaacgccccgatgcgtttgtgcgcgcatccgacatcagcccgcccgcccttgaaacggcgcggaaaaatgcggcggatttgggcgcgcgggtcgaatttgcacacggttcgtggttcgacaccgatatgccgtctgaagggaaatgggacatcatcgtgtccaacccgccctatatcgaaaacggcgataaacatttgtcgcaaggcgatttgcggtttgagccgcaaatcgcgctgaccgacttttcagacggcctaagctgcatccgtaccttggcgcaaggcgcgcccgaccgtttggcggaaggcggttttttattgctggaacacggtttcgatcagggcgcggcggtgcgcggcgtgttggcggagnnnnncacacacttaattaattaa

SEQ ID NO: 39975 - DNA, 375 bp, Neisseria meningitidis
atgaaacttctgaccaccgcaatcctgtcttccgcaatcgcgctcagcagtatggctgctgctgccggcacgaacaaccccaccgttgccaaaaaaaccgtcagctacgtctgccagcaaggtaaaaaagtcaaagtaacctacggcttcaacaaacagggtctgaccacatacgcttccgccgtcatcaacggcaaacgtgtgcaaatgcctgtcaatttggataaatccgacaatgtggaaacattctacggcaaagaaggcggttatgttttgggtaccggcgtgatggatggcaaatcttaccgcaaacagcccattatgattaccgcacctgacaaccaaatcgtcttcaaagactgttccccacgttaa

SEQ ID NO: 39976 - DNA, 624 bp, Neisseria meningitidis
atgaaggcagccgccgcctttgcggcaggtttggatgcacaggctgttcgcatcgtcatcgacatttacggctcgctcgcactgaccggatacggacacggtacatttgacgcgctgatgctcggtttggaaggcagcctgccgcacgacatcccgcttgccggcattcccgaacgcctcgaacgcatccgcacgcagcacatcctccggctcaacgggcaagaaatccgcttcatccccgaccgcgacctgaacatactcggcaatcaagtgctgcccaaacaccccaacggcctgcgttttaccgcctatgcttcagacggcacggtattgaatgaacaggtttattattcggtcggcggcggctttgtcgttaccgaagaagattttgaccggcaggcggaaacggaaaaagccgttccctatccctataccagttgcgccgaactgcttgcccgatgccgtctgaaccggctcgacatctccgaagtcgtgttggcaaacgaagccgcgcttgccggatgcggcgaagccgaaatccgccgccgcgccgctgccgttgccgaggttatggaaggctgcatcaaacgcggcttgggtgcggacggcgaactgcccggctga

SEQ ID NO: 39977 - DNA, 300 bp, Neisseria meningitidis
atgaagaaaatgttcgtgctgttctgtatgctgttctcctgcgccttctcccttgcggcggtaaacatcaatgcggcttcgcagcaggagttggaggcgctgccgggcataggccctgcgaaggcgaaggccattgcggaataccgtgcgcaaaacggtgcgttcaagtctgtggacgatttgaccaaggtaaagggcatcggccctgcggtgctggcgaagctgaaggatcaggcttctgtcggcgcgcccgcaccaaaaggcccagcaaaaccggctctgcccgcagctaaaaaatag

SEQ ID NO: 39978 - DNA, 867 bp, Neisseria meningitidis; identical to SEQ ID NO: 39713

SEQ ID NO: 39979 - DNA, 867 bp, Neisseria meningitidis; identical to SEQ ID NO: 39713

SEQ ID NO: 39980 - DNA, 939 bp, Neisseria meningitidis
atgcatcaatattatgacgcagtaattttatcggttggaaatgggttgttaaaaaggttctttaagcagaatgcgcaattaaatattgcttcaaggccattgattattaccttgtttccaggtgtagtattcggtgatcaggcaagtattctatctcgtatgggggctgatattgttttatataataataagcatgattttagaattgcagaggaatataagaaacaatataaattaagttgtcaaaatatactttatggttatccaatttttcgccacgcatcaaaaggtcgtcatggagagaaaatttactttattgaccaagttaaaatcccatttaaaaaagaagaaagaatttatacattaaaaaaattgattgccttggctgaaaaataccctgagaaagaatttactattttgctaagggttgcagataaagatattactgtgcatcaggataaacattcgtatatagagctggcaaagcagtttcagttgccgagtaatttgacaatagagcgaaaaagtaccgcgcaagccttccaagaaatggggtattgtttatcttattcatctactatgctttttgaagctgaatgtaagggtatccctgttggtgttgttgcagacttaggcttttctgaatcctatgcaaatcagcattttttaggtagtggggttttagtttattttgatcaaatagatttcacttccccaaaaatagcagatccggattggcttgattgctatgctactaaaaaggtgattacaactgatgagtttaataagctattaaagcaggttgtgccattgcaacatgattaccaagaatatttatctgcggtgaatagtatagaatcaactaaaactatttttttaagaaaatttaaaaagttaattagggatcctaaaaagttttttatgattctaaatggttga

SEQ ID NO: 39981 - DNA, 927 bp, Neisseria meningitidis
atgaaagtcatcttcgccggcacgcccgattttgccgccgccgccttaagagccgttgccgccgccggttttgaaatcccgctggtgctgacccagcccgaccgtccgaaagggcgcggtatgcaactgactgccccgcccgtcaaacaagccgcgctggaactcggtttgcgcgtcgaacagcccgaaaaactgcgtaacaacgccgaagccctgcaaatgctcaaagaggtcgaggcagacgtaatggtggttgccgcctacggtttgattctgccgcaagacgtgttggatgtgccgaaacacggctgcctcaacatccacgcttcgctgctgccccgttggcgcggcgcggcgccgattcagcgcgcgattgaggccggcgatgccgaaaccggcgtgtgcattatgcagatggatgccggtttggacaccggtgatgtggtcagcgaacaccgctacgccatccaaccgaccgataccgccaacgaagtccacgacgcgctgatggaaatcggtgcggcggcggttgttgccgatttgcaacagcttcaaagcaaaggccgtctgaacgcggtcaaacagcccgaagaaggtgttacttacgcgcaaaaattgcgcaaagaagaggcgcgtatcgattggagcgaaagcgcggcggttatcgaacgcaaaatccgcgctttcaaccccgtgcctgccgcgtgggttgagtatcagggcaagccgatgaaaatccggcgggcggaagtggtggcgcaacaaggcgcggcaggcgaagtgttgtcctgttcggcggacggtttggtcgttgcctgcggcgaaaacgcgctgaagattaccgaattgcagcctgccggcggcaggcgtatgaatatcgcggcgtttgcagcaggacggcatatcgaagcagggacgaagctgtaa

SEQ ID NO: 39982 - DNA, 381 bp, Neisseria meningitidis
  misc_feature 4, 5, 6, 7, 8: 'n' is a, c, g or t
gtgnnnnntcctccggttggtcctgctttgggtcagcgcggtttgaatattatggaattttgtaaggcatttaatgctgcaacccaaggtatggagcctggcttaccgattccggttgtgattactgcatttgcagataaatcattcacatttgtgatgaaaaccccgccagcttctatcttgttgaaaaaggctgccggtttgcaaaaaggtagttctaatcctctgaccaacaaagtgggtaaattgacccgtgcccagttggaagaaattgctaaaactaaagagcctgatttgactgctgctgacttggatgcggctgtccgtactatagcaggttctgctcgctcaatgggcttggatgtggagggtgttgtataa

SEQ ID NO: 39983 - DNA, 321 bp, Neisseria meningitidis
atgggtatgaatcaacaacgtttgactcaagtgattttggcacctatcgtttctgaaaaaagcaacgtattggctgaaaaacgcaaccaaatgacgtttaaagttttggcaaatgcagccaaacctgaaatcaaagcggctgtcgagctgctgttcggtgttcaagttgcttctgtaactaccgttacaactaaaggcaaaactaagcgttttggtcgtactttgggccgccgcagcgatgttaaaaaagcttatgtaagcttggctgccggtcaagagttggatttggaagccgctgctgcagctgcagataaggaataa

SEQ ID NO: 39984 - DNA, 483 bp, Neisseria meningitidis
atgaaaaaatatctgcccttactacgttttttgttgattgcttgtatatcagcatttttagcatggaaagggcaaccttttgttcatgggaacgagaaggccgttgatttaattattaacgtatttgcaatcttagccggttttttaattgccattatgacattgtttagtgatatgaggtttgatgaagatgcaaattggcgacaaattcaaattcgtgaaggcgtacaagaacaacggtatataaaacattccttacttttttacacatatcttgccgtattagtttgtgtttttattgtcatcttgttggctcataaagaagaatacaaaaatggaccagccattttttggcttgaacggagctatttatttttagcctgtatttccattttttattctgtattcttacctgggaatttaattaaaagccgaaaagaagagtttaaaaaattaatggaaaagaagaaacccaaaatctag

SEQ ID NO: 39985 - DNA, 2760 bp, Neisseria meningitidis
atgaaaagaatgttattcaacgcaacgcaggccgaagagctgcgcgttgccatcgtcgacggacaaaacctgctggatttggacatcgaaacgctgggcaaagaacagcgcaaaggcaatatctacaaaggcatcattacccgcatcgagccgtcgctggaagcgtgtttcgtggattacggaaccgaccgccacggcttcttgccgtttaaagaagtctcccgctcatacttccaagactacgaaggcggacgcgcgcgcatccaagacgtgctcaaagaaggcatggaagtcatcgtccaagtcgaaaaagacgagcgcggcaacaaaggcgcggcgctgaccaccttcatcagcctcgccggacgctatctggtattgatgccgaacaacccgcgcggcggcggcgtatcccgccgtatcgaaggcgaagaacgtcaagaactcaaagccgctatggcgcaactcgacattccgaacggcatgagcatcatcgcccgtaccgccggcatcggccgcagcgcggaagagttggaatgggacttgaactacctcaaacaactctggcaggcgattgaagaagcaggaaaagcgcatcacgacccttacctgctctttatggaaagctcgctgctcatccgcgccatccgcgactatttccgccccgacatcggcgagattttggtggacaatcaagaagtttacgaccaagttgccgagttcatgagctacgtcatgccgggcaatataggccgtctgaaactctacgaagaccacacgccgctgttttcccgcttccaaatcgaacatcaaatcgaaagcgcgttttctcgcagcgtcagcctgccttccggcggcgcaatcgtcatcgaccacaccgaagccctcgtctccatcgatgtcaactccgcacgcgccacacgcggtgcggacatcgaagacaccgccttcaaaaccaatatggaagccgccgaagaagtcgcccgacaaatgcgcctgcgcgacttgggcggcttggtcgtcatcgacttcatcgacatggaaaaccccaaacaccagcgcgatgtggaaaacgtcctgcgcgacgcgctcaaaaaagaccgcgcccgcgtacagatgggcaaactctcccgtttcggccttttggaattgagccgccaacgtttgaaaccggctttgggcgaaagcagccacgtcgcctgtccgcgctgcgccggcaccggcgtgattcggggcatcgaatccaccgccctgcacgttttacgcatcattcaagaagaagcgatgaaggacaacaccggagaagtgcgcgcccaagtgcccgtcgatgtcgccaccttcctgctgaacgaaaaacgcgccgagctgtttgcgatggaagagcgtttggatgtcaacgtcgtcctgattccgaacatccacctcgaaaatccgcactacgaaatcaaccgcatccgcaccgacgacgtagaagaagacggcgaaccgagctacaaacgcgtcgccgagcctgaagaagacgaatccgccaaaccgttcggcggcgaaaaagccaaagccgcccgtcccgaacccgccgtcaaaggcgtgcgccacaccagccccgccccgactgccgcccccgagaaaaaaacctcttggtgggacagcttcaaagcttggctcaaacgcattttcggcggcagcgaaacccaagccgcgcccgctgccgaaacctccgaaaaacgcagcacggcaaaccgcagcggcagccgcgccaacaaccgccgccaaaacccgcgccgcagcaaacgcgaaggcagcaaagtagaagtccgcgaagtggcaggcaaaactgccggacaggaagcgcgtgccgacaaagccgaaacgcgcaacaacggcaaccgccgccgcaacgaacgcggcgaccgtgccgccggacgcgccgacgaagcggaaatccaagaccgcaacatacagcctgccgcaaccgttgcagatgccgcaccgtccgaaaccgaagtgcaaaccggaaaacgccgccgcaacggcagccgcagcgaacgcggccaaaccgcgccggaaaccgccaccgttgccgaaacaaccgttcagacagcggaaaacacgccgtccgaaccgcataccgcagaagacaaaggcagcaagcccaaatccgaacgcaaccgccgcgaacgcgacagccgagatgccaaagaacgccgcgagcgcaacaatcagcgcgaccgccgtcaaaacggcaaaaaacgcaatattccgtctgccgccaaaatcgagcagtacctgaatattcacgacaccgccgacaaagtccgttccgccgccgcgcacgttttcggcgaaaccgacgcaaacgcgccgattaccgtcagcattgccgatccggttgcagaaagggatcttccgacagcatctcccgccgtttcaaacggcgacgcaccggtttatgatgcggcggaaaaaatccgccgtgccaccgccgccatcctgcccgaaggcgcgacaccgaaagccgaagcacaggaaatgccgtctgaaaccgcaacctttacggctgcggcggaacaggcacgggaaaccgcacaaaccggcggactcgtcctgatcgaaaccgaccctgccgcattgaaggcatgggcggcacaacccgaagtccaagccggacgcggtttgcgccgttccgaacagcccaagccgtctgaagtcgcaaccgtccctgccgaagaaatgatccaagtcgaaacccggcaaggctga

SEQ ID NO: 39986 - DNA, 924 bp, Neisseria meningitidis
gtgcaaagcaagcagataaaaggcttcaagctttggaaatcttacgatgagcagttggagattctaagaagtagaggattgcagattgatgatgagaaaaaggcattaggatatttacgcaccatcggttattaccgattaagcggttatttttactctttccgacaatttgctcctgaaagttctaagagcaggttggatgagtttattacagatactcgttttgaagatgtcaaaagcctttatatgttcgataagaaattgcggcaattggcattagatgcactggaaagaattgaagtagcgcttcgggtaaatattgcccatacattaggacggcatgacccattggcttacaaagatagcaaatattctgccacaggtttcgaccatgcggaatggctggataggtataacaggctggtcgagcgcgaaaagaaaaccggttttgttaaacatcatttggaacattatgccgacttacctgtctgggtagcctgcgaagtatgggatttcggcacgatgtctatgctgtataaagggatgttgaataaagataaagactctattgccaaattgtatcgtttgaaagacggtaagcatctgcaaacacatctgcacgcatttaactttatccgcaacgtttcggcacatcacagtcgattatggaatagggatattacttttaaagccagcttgaaaggtttgtctgatgcagaatggaaatcattgcctatcaataaaccgtttgtgtatttttgcctgatgaaacggatgttggatgttatttgtccgcgaaccgaatggggaaaccgtcttcttgctttactggatgagtttcccgatgtcgcgaatgaagctgtaagtttgcgcgatatgggtttggaaaataatccgcgagactggagattgtggcagggataa

SEQ ID NO: 39987 - DNA, 873 bp, Neisseria meningitidis
atggaaatatggaatatgttggacacttggctcggtgccgtcccgatacgtgcggaggcggtcgaatccgtggcggtggtcgcggctttgctgctggcgcgcgcccttctgttgaatatccacttcaaacggcatccggatttcggcatcgaaagcaagcggcggtttttggttgccagccgcaatataacgctgcttttggtgctgttttcgctggcatttatctggtcggcgcaaatccaaacgctggctttgtcgatgtttgcggtggcggcggcggtcgtcgtggcgacgaaggaactgattatgtgtctgtcgggcagtattttaaggtctgccacccagcaatactcggtcggcgactatatcgaaatcaacggcctgcgcgggcgcgtggtcgacatcaacctgttgaacacgctgatgatgcaggtcggtccgaaccccttggtcggacagcttgcgggaaccaccgtttctttccccaacagcctgttgttgagccaccccgtgcgccgcgacaatattttgggcgactatgtcatccatacggtcgaaatccccgttcccatccatttggattcggatgaagccgtatgccgtctgaaagccgtactcgagcccttgtgcgcgccctacatccccgccatccaacggcatttggaaaacgtgcaggcggaaaaactgtttatcacgcccgccgccagaccgcgcgttacccgcgtgccgtacgatgacaaggcataccgcatcatcgtccgcttcgcctcccccgtttcaaagcggctggaaatccaacaggcggttatggacgaatttttgcgcgtacaataccgcctgttaaattaccccgccggctccgaaacactttaa

SEQ ID NO: 39988 - DNA, 1452 bp, Neisseria meningitidis
atgctttctttccttagcggcttattgagcttgggtatagaagtcttgtgggtaaggatgttttcgttcgcagcacagtccgtgcctcaggcattttcatttactcttgcctgttttctgaccggtatcgccgtcggcgcgtattttggcaaacggatttgccgcagccgctttgttgatattccctttatcgggcagtgcttcttgtgggcgggtattgccgactttttgattttgggtgctgcgtggttgttgacgggtttttccggcttcgtccaccacgccggtatcttcattaccctgtctgccgtcgtcagagggttgattttcccgctcgtacaccatgtgggtacggatggcaacaaatccggacgacaggtttccaatgtttatttcgccaacgttgccggcagtgcattgggtccggtccttatcggctttgtgatacttgatttcttgtccacccaacagatttacctgctcatctgtttgatttctgctgctgtccctttgttttgtacactgttccaaaaaagtctccgactgaatgcagtgtcggtagcagtttccctaatgttcggcatcctcatgttcctactgccggattctgtctttcaaaatattgctgaccgtccggataggctgattgaaaacaaacacggcattgttgcggtttaccatagagatggtgataaggttgtttatggggcgaatgtatacgacggcgcatacaataccgatgtattcaatagtgtcaacggcatcgaacgtgcctatctgctaccctccctgaagtttggcatacgccgcattttcgtcgttggattgagtacaggttcgtgggcgcgcgtcttgtctgccattccggaaatgcagtcgatgattgttgcggaaatcaatccggcataccgtagccttatcgcggacgagccgcaaatcgccccgcttttgcaggacaaacgtgttgaaattgtattggatgacggtaggaaatggctgcgtcgccatcctgatgaaaaattcgacctgattttgatgaatacgacttggtactggcgtgcctattccaccaacctgttgagtgcggaatttttaaaacaggtgcaaagccaccttaccccggatggtattgtaatgtttaataccacgcacagcccgcatgcttttgctaccgccgtacacagtattccctatgcataccgctatgggcatatggtagtcggctcggcaaccccggtagttttccctaataaagaactgctcaagcaacgtctctcccggttgatttggccggaaagcggcaggcacgtatttgacagcagcaccgtggatgctgcagcacaaaaggttgtctctcgtatgctgattcagatgacggaaccttcggctggggcggaagtcattaccgacgataatatgattgtagaatacaaatacggcagagggatttaa

SEQ ID NO: 39989 - DNA, 1452 bp, Neisseria meningitidis; identical to SEQ ID NO: 39988

SEQ ID NO: 39990 - DNA, 2025 bp, Neisseria meningitidis
atgaacgatatgactttatatttgataattgcccttgttccgttggcaggctcgctgattgcgggtttgttcggcaacaaaatcggccgcgccggcgcgcatacggttacgatactcggcgtggcggtgtccgccgtgctgtcggcttatgtgttgtggggctttattgacggcagccgcgccaagtttgacgaaaacgtctatacctggctgacaatgggcggcttggatttttccgtcggcttcttggtcgatacgatgacggcgatgatgatggtcgtggtaacgggcgtgtcgttgatggtgcatatctacaccatcggctatatgcacgatgaaaaagtcggttaccaacgcttcttcagctatatttctttgtttactttcagcatgttgatgctgattatgagcaacaacttcatccagctcttcttcggttgggaagcggtgggcttggtgtcgtatctcttgatcggtttctatttcaaacgtccgagcgcgacatttgccaacctgaaagcctttttgatcaaccgtgtcggcgacttcggctttttgctcggtatcggcttggtgcttgcctatttcggcggcagcctgcgctatcaagatgtattcgcttatctgcctaatgttcagacggccaccattcaattgttccccagtgtggaatggtctttgattactgtaacctgtttgctcctgtttgtcggtgcgatgggtaaatcggcacaattcccgctgcacgtttggctgcctgattcgatggaaggcccgaccccgatttctgcattgattcacgccgcaaccatggttaccgccggtctgtttatggtatcgcgtatgtcgccgatttatgagatgagtagcactgcgctgtctgtcatcatggtgattggtgcgattaccgccctgtttatgggtttcttgggcgtgattcaaaacgatatcaagcgcgtggttgcgtattccaccctgtcgcaactgggctatatgaccgtggctttgggcgcgtccgcctattccgtggcgatgttccacgtcatgacccacgccttctttaaagccttgctgttcttggcggcaggtagcgcgattatcggtatgcaccacgaccaagatatgcgccatatgggcaacctgaaaaaatatatgccggttacttggctgactatgctgatcggcaatttgtcgctgatcggtacgccgttcttctccggcttctattctaaagattcgattatcgaagcagcgaaatacagcaccctgccgggcagcggctttgcttattttgccgtccttgccagcgtgttcgttaccgcgttttacgcgttccgccaatactttatggtgttccacggcgaagagaaatggcgcagcctgcctgaacatcatgacgatcatcatggtgaagaacatcacggcttgggcaaaaacgacaatccgcacgaaagcccgctggttgttaccctgccgctgattttgcttgccatcccgtccgtcatcatcggctatgttgccatcgagcctatgctttacggcgatttctttaaagacgtgattttcgtcaataccgacgcgcatccgaccatgcacatcatgaaggaagagttccacggcgcattggcaatggtgtcgcacagcctgcattcgcctgtactctaccttgctattgcaggtgtcttaagcgcatggcttttgtacgtcaaactgccgcacctgcctgcgaaaattgcacaggcgttccgtccgatttacgttttgtttgaaagcaaatactacctcgacgccctgtatttcaacgttttcgccaaaggcacacgcgcattgggtaccttcttctggaaagtcggcgataccgccattatcgacaacggcatcgtcaacggctctgccaaactggtcggcgtaattgccgcgcaagtgcgtaaagcccaaaccggctttatctacacctacgccgccgctatggtattcggcgtattggtactgctcggcatgaccttctggggattgttcagataa

SEQ ID NO: 39991 - DNA, 2025 bp, Neisseria meningitidis; identical to SEQ ID NO: 39990

SEQ ID NO: 39992 - DNA, 1092 bp, Neisseria meningitidis
atgatgaaaatcaaagccctgatgattgccgccgcattgctggcagcagccgatgtccacgccgcaccgcaaaaggcaaaaaccgcatccgccaaagctgccaaagctgccaaagctgccaaagctgccaaagttgccaaagttgccaaagttgccaaagttgccaaagttgccaaagttgccaaagttgccaaagttgccgccacggcgcaaaaagaagccgcacccgcacaacagcagggcggtatccgcttttcagacggcattgccgccgttgccgacaacgaagtcatcacgcgccgccggcttgccgaagccgttgccgaagccaaagccaacctgcccaaagacgcgcagataagcgaatccgagctgtcccgacaggtgctgatgcagcttgtcaaccaatccctgattgtacaggcgggcaaacgccgcaacattcaagcaagcgaagcggaaatcgatgccgtcgtcgcaaaaaatcccgccctcaaaaacctcagccccgcccaacgccgcgattttgccgacaacatcattgccgaaaaagtccgccagcaggcagtgatgcagaacagccgagtgagcgaagctgaaatcgatgccttcctcgagcaggcgcaaaaacaaggcatcaccctgcccgaaggcgcaccgttgcgccaataccgcgcccaacacatcctgattaaagccgacagcgaaaacgctgccgtcggcgcggaaagcaccatccgcaaaatctacggagaggcccgcagcggcacagacttttccagcctggcgcgccaatattcgcaagacgcgagcgcgggcaacggcggagatttgggctggtttgccgacggcgtgatggttcccgcctttgaagaagccgtccacgcgctcaaacccggacaggtcggcgcgcccgtccgcacccaattcggctggcatatcatcaaattgaacgaagtgcgcgatgccggcacacctcaggaacgtatccgcaattccgtgcggcaatacatcttccaacaaaaagccgaacaggcaaccgtcaacctgttgcgtgacctgcattccggcgcgtatgtcgacatccgctaa

SEQ ID NO: 39993 - DNA, 2379 bp, Neisseria meningitidis
gtgctggcattgggcctctgcttcggcacgcattgcgccgccgccgatgccgttgcggcggaggaaacggacaatccgaccgccggaggaagcgttcggagcgtgtccgaacccatacagcctaccagcctgagcctcggttcgacctgcctgttttgcagtaacgaaagcggcagccccgagagaaccgaagccgccgtccgaggcagcggcgaagcatccatccccgaagactatacgcgcattgttgccgacaaggtggaaggacagtcgcaggtgcaggtgcgtgccgaaggcaacgtcgtcgtcgaacgcaaccggacgaccctcaataccgattgggcggattacgaccagtcgggcgacaccgttaccgcaggcgaccggttcgccctccaacaggacggtacgctgattcggggcgaaaccctgacctacaatctcgagcagcagaccggggaagcgcacaacgtccgtatggaaaccgaacaaggcggacggcggctgcaaagcgtcagccgcaccgccgaaatgttgggcgaagggcattacaaactgacggaaacccaattcaacacctgttccgccggcgatgccggctggtatgtcaaggccgcttccgtcgaagccgatcgggaaaaaggcataggcgttgccaaacacgccgccttcgtgttcggcggcgttccccttttctatacgccttgggcggacttcccgcttgacggcaaccgcaaaagcggcctgcttgttccctcactgtccgccggttcggacggcgtttccctttccgttccctattatttcaaccttgcccccaatctcgatgccacgttcgcgcccggcgtgatcggcgaacgcggcgcggtctttgacgggcaggtacgctacctgcggccggattatgccggccagtccgacctgacctggctgccgcacgacaaaaaaagcggcaggaataaccgctatcaggcgaaatggcagcaccggcacgacatttccgacacgcttcaggcgggtgtcgatttcaaccaagtctccgacagcggctactaccgcgacttttacggcaacaaagaaatcgccggcaacgtcaacctcaaccgccgtgtatggctggattatggcggcagggcggcgggcggcagcctgaatgccggcctttcggttctgaaataccagacgctggcaaaccaaagcggctacaaagacaaaccgtatgccctgatgccgcgcctttccgccgattggcgcaaaaacaccggcagggcgcaaatcggcgtgtccgcccaatttacccgcttcagccacgacagccgccaagacggcagccgcctcgtcgtctatcccgacatcaaatgggatttcagcaacagctggggttacgtccgtcccaaactcggactgcacgccacctattacagcctcaaccgcttcggcagccaagaagcccgacgcgtcagccgcactctgcccatcgtcaacatcgacagcggcgcaacttttgagcggaatacgcggatgttcggcggcggagtcctgcaaaccctcgagccgcgcctgttctacaactatattcctgccaaatcccaaaacgacctgcccaatttcgattcgtcggaaagcagcttcggctacgggcagctctttcgcgaaaacctctattacggcaacgacaggattaacaccgcaaacagcctttccgccgccgtgcaaagccgtattttggacggcgcgacgggggaagagcgtttccgcgccggcatcgggcagaaattctacttcaaaaacgacgcagtcatgcttgacggcagtgtcggcaaaaaaccgcgcagccgttccgactgggtggcattcgcctccagcggcatcggcagccgcttcatcctcgacagcagcatccactacaaccaaaacgacaaacgcgccgagaactacgccgtcggtgcaagctaccgtcccgcacagggcaaagtgctgaacgcccgctacaaatacgggcgcaacgaaaaaatctacctgaagtccgacggttcctatttttacgacaaactcagccagctcgacctgtccgcacaatggccgctgacgcgcaacctgtcggccgtcgtccgttacaactacggttttgaagccaaaaaaccgatagaggtgctggcgggtgcggaatacaaaagcagttgcggctgctggggcgcgggcgtgtacgcccaacgctacgttaccggcgaaaacacctacaaaaacgctgtctttttctcacttcagttgaaagacctcagcagtgtcggcagaaaccccgcagacaggatggatgtcgccgttcccggctatatccccgcccactctctttccgccggacgcaacaaacggccctga

SEQ ID NO: 39994 - DNA, 450 bp, Neisseria meningitidis
atgactgataatcgggggtttacgctggttgaattaatatcagtggtcttgatattgtctgtacttgctttaattgtttatccgagctatcgcaattatattgagaaagcaaagataaatgcagtgcgggcagccttgttagaaaatgcacattttatggaaaagttttatctgcagaatgggagatttaaacaaacatctaccaaatggccaagtttgccgattaaagaggcagaaggcttttgtatccgtttgaatggaatcgcgcgcggggccttagacagtaaattcatgttgaaggcggtagccatagataaagataaaaatccttttattattaagatgaatgaaaatctagtaacctttatttgcaagaagtccgccagttcgtgtagtgacgggctggattattttaaaggaaatgataaggactgcaagttacttaagtag

SEQ ID NO: 39995 - DNA, 939 bp, Neisseria meningitidis; identical to SEQ ID NO: 39980

SEQ ID NO: 39996 - DNA, 939 bp, Neisseria meningitidis; identical to SEQ ID NO: 39980

SEQ ID NO: 39997 - DNA, 951 bp, Neisseria meningitidis
atgaccaaacaggaaaagcaagaagaccgcgaaaaaaaatataaaattatttctttatttagcggttgtggcggaatggatttgggttttctggggggctttgagtttttaaaccgtacttatgacaaacatgattttgatattatttgggcgaacgaaatcgacgaacacgctgttagaacctaccgccacaacttaggaaatcacattgtacatggtgatatttggcagcatttggatgaaatacccactagcgcagacatcattatcggtggctttccttgtcaggatatttctattaatggtaaaggtgcaggtatttcaggcagccgcagcgggctgtataaagccatgttgtctgctgttgaacgcgttcgccccaaaatatttgttgctgaaaatgtcaaagggctactgatgaagcatcatcggaaagatttggaaacagtgctttcagattttcgcaatttgggttatcaggtagattactacttgctgaatgcagccgattacggtgttccacagactcgggagcgagttatcatcgttggaaggctacctgaaattcccgaaatacagattgaaaaaacaaataccagcaacagctatgtaacagctagacaggctataggcgatttggtcgacaaggtagaagacgaaattgccaaccatatttggagtagagcagaaaaaagccccgatcaaggtagtcgaaaattggatgccgaaagggcgggctacactattagggcagaatgccatggaaacatacagtggcattacgaattaccccgccgcatctccatgcgtgaggcggcgcgcatccaatcgtttcccgacaattttattttccaggcaaaattgcgtgccacagaacggcaaattggcaacgccgtccctcctgttttagggtggcacatcgccgccgccgttagtaaggcacttaaataa

SEQ ID NO: 39998 - DNA, 831 bp, Neisseria meningitidis
atgcacacaccacttacctatattgaccttttctcaggagcaggaggcctatccttgggttttgaacaagccggattccaacaattgctttctgttgaaatggagtctgattattgtcagacttaccgtaccaacttcccccatcatcaattactgcaaaaagatttaaccacactaaccgaacaagatttaatcaattgtcttaacggacaagcagttgatttgattattggaggaccaccttgtcaaggttttagtatggcaggaaagattggacggacatttacagatgacccacgcaaccatttatttaaagagtttgtccgaatagttaaaattgtccaaccatatttttttgttatggaaaatgtagcgcgactctatacacacaattcaggtaaaacacgtattgagattattcaagcatttcagaatatcggttattcggtggaatgtaagatactgagtgcagccgatttcggtgttcctcagatacgtagccgagtgatatttatcgggaggagggataaaggcaaaatttcctttcccgaacctttgcagatttcccatcagactgttggatcagcaataggacattttccaaaactggctgctggcgaaagcaatccacacgttgcaaatcatgaagctatgaatcattcggcacaaatgttagaaaaaatggcatttgttaaaaatggaggtaaccgtaacgatattcctgaaccattacgtccgaaaacaggtgatatccgtaaatacatccgttacaacagcaacaaaaccagccgtttgtattacaggagatatgcgcaaagtttttcactatga

SEQ ID NO: 39999 - DNA, 207 bp, Neisseria meningitidis
atgtttgatggagcaaaggttgtacgaagggtggaaggcaacctgtgggtgtttggtatggtcgcgcttgaaaaaacgtgttttaagggacaaatgccgtctgaaaatcggtttcagacggcattttctgtttatttaaagcaaacaggaaaaggcagcaatattctgcagtcttcctattcacacaagcgttttatagttaattaa

SEQ ID NO: 40000 - DNA, 378 bp, Neisseria meningitidis
atgtgcgagttcaaggattttagaagaaacatcccttgttttaaggagtatgacgaaaattcatttattggcaaatggtatgatgacggggtgtgggatgatgaagaatattggaaattggagaatgatttaattgaggttagaaaaaaatatccttatccgatggatataccaagggacatcgtgattggaatcggtaccattattgattttttaatggttcaaaattggaaactttttgaaattaaagcttccccttggctacctgatagcgtgggaattaacgaacgttatgaaaggcttaaaacaatgctccgttatatttttaccgagaaagacatagtcaacgtgcgatttgattattacaacaaaaaatag

SEQ ID NO: 40001 - DNA, 378 bp, Neisseria meningitidis; identical to SEQ ID NO: 40000

SEQ ID NO: 40002 - DNA, 1107 bp, Neisseria meningitidis
atgtccttgacccgcctaatcttgaaattctatgcactattgcgcctttttttgggcaaaaacgcccgcaccgcatggatttcgcatcccgcctgtgccgggcacgaacccggcgcaaaccatcccgattcgcccgaccgcatcctctgcatcgagcaggcattgcgccgcgccagtatttggcagcacctccaaaccatagaggcggaagaaatcagcgatacgcgcctcgcacttgtccactcgagcaaatatctgaaccgtttggaatcttgcctgccccaaaaaggcaagatttcccgcctggataacgacactgcaatcagcacaggctcgctgtctgccgcacgctttgccgccggttcggcagttcaggcagtcgacatggtcatgaaccgtaaagcatggcatgccttttgcgccgcccgcccgcccggacaccatgcgggcagcggcaaagccggcggattctgcctgctgaacaacgttgccgccggcgtcatgcatgccattgccgaataccgcctgaaacgcattgccgtcatcgatttcgatgtccactacggcgacggtacggcagaaatattcaaagacgatccgcgcatcctgtttttcaacctgtttgaaaccgacctttttcctttccccgaaaacaacgatatgcccgacggcggcaatatggtgcacctgcccttgccgccgggaacgggcagccgcacattccgcgaagccgtccgcagacagtggctgccccggcttgccgcattcaaacccgaactggtgctgctgtcggcaggattcgacgcacaccgtctagacgaatcgggcaggctcaacctgcacgaggcggattttgcctggctgacacacaaaatcattcagacggcatcgggctgccccggcaaaatcgtatccgtactcgaaggcggctacacccttgaacctctggcacaatctgctgccgagcatatccgcgtgctggcagggctgggcaaatccgatgccgcaaccgcctatcagaaaacactggacccaacaaaaaaacggtttgccaaaccgaaaaccggacaggtgcgccaacctacccaatccgaccgttacgacata

SEQ ID NO: 40003 - DNA, 543 bp, Neisseria meningitidis
atgaggacacaccgcaagacctgctctgcggtgtgttttgcttttcagacggcatcgaaacccgccgtttccatccgacatcccagcgaggacatcatgagcctgaaaatccgccttaccgaagacatgaaaaccgcgatgcgcgccaaagaccaagtttccctcggcaccatccgcctcatcaacgccgccgtcaaacagtttgaagtggacgaacgcaccgaagccgacgatgccaaaatcaccgccatcctgaccaaaatggtcaaacagcgaaaagacagcgcgaaaatctacactgaagccggccgtcaggatttggcagacaaagaaaacgccgaaatcgaggtactgcaccgctaccttccccaaatgctctccgccggggaaatccgtactgcggtcgatgccgccgttgccgaaaccggcgcggcaggtatggcggatatgggcaaagtgatgggcgtattgaaaacccgcctcgccggcaaagccgatatgggcgaagtcaacaaaatcctgaaagccgtgctgaccgcctga

SEQ ID NO: 40004 - DNA, 924 bp, Neisseria meningitidis
atgaatacaggcaaaccccaaaaacgtgccgtcaacggtgttttgctcttggacaaacccgaaggcctttccagcaacaccgcgctgcaaaaagcgcggcgtttgttccgtgccgaaaaagccggacataccggcgtgctcgatcctttggcaaccggacttttgcccgtctgcttcggcgaagcgaccaagttctcccaatacctgctggatgccgacaaagcctacaccgccacgctgaaactcggcgaagccagcagcacgggtgatgccgaaggcgaaatcgttgccaccgcccgtgccgatatttccttagccgaatttcagacggcctgcaaagcattaacgggcgacatccgccaagtgccgccaatgttttccgcgctcaagcacgaaggcaaaccgctgtacgaatacgcccgcaaaggcatcgtcatcgaacgcaaagcgcgctacattaccgtttacgccatcgatattgccgaatttgacgcgcccaaagccgtcatcgacgtacgttgcagcaaaggcacctacatccgcaccctcagcgaagacatcgccaaacacatcggcacgttcgcccacctgaccgccttgcgccgcaccgaaaccgccggctttaccatcgcccaaagccacacgcttgaggccttggcaaatttgaacgaaacagaacgcgacagcttgctgctatcctgcgacgtattggtttcacactttccccaaaccgttttaaacgattatgccgtccatatgctccgctgcggacaacgtccgcgtttcgaggaagacctaccttccggcacgccggtacgcgtttacactgaaattggagaatttgtcggtttggcagaatatcaaaaggaaatatgccgtctgaaagccttgcgcctgatgaacacggcggcatccgccgcctga

SEQ ID NO: 40005 - DNA, 432 bp, Neisseria meningitidis
atgaccgaaaacgcacaggacaaggcgcggcaggctgtcgaaaccgtcgtcaaatccccggagcttgtcgagcaaatcctgtccgacgagtacgtgcaaataatgatagcccggcgtttccattcgggaccgttgccgccgccgtccgacttggcgcaatacaacgacattatcagcaacggggcagaccgcattatggcaatggcggaaaaagaacaagccgtccggcacgaaaccatacggcaagaccaaaccttcaacaggcgcgggcaactgtacggcttcatcagcgtcatcctgatactgctttttgccgtcttcctcgtatggagcggctaccccgcaaccgccgcctcccttgccggcggcacagtggttgccttggcgggtgctttcgtgattggaagaagccgagaccaaggcaaaaattaa

SEQ ID NO: 40006 - DNA, 468 bp, Neisseria meningitidis
atgcaaatagataatatatccgatgaacaggttgtgattgtcagaatgtcttgttatcttaagaaagatgaaatttttaagaatatagaaagatatggatatcagtcatcagatattaagaaaattagtcctccttttccattaaatattttacctgttcccaaaccttattatttttatctttatgatacccatttgaatcaaatttatgatttggcttggtcatgtaatgattttttaatgtttgaaatatttattttggatagggaaagcatcaaatatatagataaagataaactttttaaatctggagaaacactatattcgaattttaaatctattaaaaatcaatgcaaaaattattttttttgcggttttgattttgatgccccttactttaaaagcggtgtgagtcaggtggcagattataattttgttcctgatgcattttctttattctttatttaa

SEQ ID NO: 40007 - DNA, 315 bp, Neisseria meningitidis; identical to SEQ ID NO: 37950

SEQ ID NO: 40008 - DNA, 561 bp, Neisseria meningitidis; identical to SEQ ID NO: 36282

SEQ ID NO: 40009 - DNA, 498 bp, Neisseria meningitidis
ttgttaatccactatacctccgccaatgcccatgagtgcaaacacctgtcgccgttgttagaagggatagctgaaggtacgaccgtctatgccgacaaaggctatgacagtgcggaaaaccggcaacatctggaagaacatcagttgttggacggcattatgcgcaaagcctgccgcaaccgtctgctgacggaagtgcaaaccaaacgcaaccggtatttgtcgaagacccgttatagtggattaaatttaaatcaggacaaggcgacgaagccgcagacagtacaaatagtacggcaaggcgaggcaacgccgtactggtttaaatttaatccactatatgtggtcgaacagagcttcggtacgctgcaccgtaaattccgctatgcccgggtagcctatttcgggctgattaaagtgagtgcgcaaagccacctgaaggcgatgtgtttgaacctgttgaaagcggccaacaggctaagtgcgcccgctgccgcc

SEQ ID NO: 40010 - DNA, 1197 bp, Neisseria meningitidis
ttgtccacttttccgaaccacaccatgcacaccatttcctttccaaaccgcacccgactcaccgccctgccgcccccgtcgctttacatccacatcccgtggtgcatcaaaaaatgcccgtattgcgacttcaattcccacagcctgaaaaacggattgcccgaagccgcctatatcgacgcgctgctgaccgacttgcagcttgaattgcccaatatttggggcagaccggtggaaacgatctttttcggcggcggtacgcccagcctgtttcaggcggaatcgattgaccgtttgttgagcggcgtgcgttcgctgttgcgcttgcagccggaagcggaaattacgttggaagccaatccggggacgtttgaaatcgagaagtttcaaggatttaaagacgcaggcatcacgcggctttctattggcgtacagagtttcaacgacgatatgctctcaaggctggggcgcgtccacaacggtaaggaagccttaaccgctatcgataccgccttgaaattatttgataaagtcaatatcgacttgatgtatgccctgccgaaccaaaccgttcagacggcattggacgacgtacaaaccgccatcgctacgggtgcgacccacatcagcgcgtatcatctgacgatggaaccgaacacgccgttcggtcatacgccgccgaaaggtttgccgcaagacgaagccgccctcgacatcgaagacgcggtacacggcgcgctggaaagcgcgggttttgtccactacgaaacatcggcttttgcgaaaccagccatgcagtgccgccacaatttgaactactggcagttcggcgattatttaggcataggcgcgggcgcgcacggcaaaatttcctatcccgaccgcatcgagcgcaccgtccgccgccgccaccccaacgactacctcgccttaatgcaaaaccgaccgagcgaagccgtcgaacgcaaaaccgtcgccgccgaagatttgccgttcgaattcatgatgaacgccctgcgcctgaccgacggcgtacccaccgcgatgttgcaggagcgcacgggcgtaccgagtgccaaaatcatggcgcaaatcgaaacggcaaggcaaaaaggcctgctggaaaccgaccccgccgtattccgcccgaccgaaaaaggacgcttgtttttaaacgatttgctgcagtgtttttta

SEQ ID NO: 40011 - DNA, 390 bp, Neisseria meningitidis
atgtggaaaattagtaaagaaaattgtgaagatttaggatttgcaatagtctgtatgttctatgatgctattaatctttctgaatttaaattatggttggatatagttgtcagagatactcctattgatacaattccattgtatatttttgatttgattgattttgataagggtataggggaaatttatgatgtaattggagtcgttaattatggttacatttcaaatgatcaaaaaaatgcattaacgggcattgccttcttaagggggatagatgtctatgatccgcctatttcaaaagaaaaagcattaaaagccttagagaaatatcctgaaatttatcagaggtttcagcatttctttccttttgtagagcttccgcttctttaa

SEQ ID NO: 40012 - DNA, 261 bp, Neisseria meningitidis
ttgctccttccacggcagcaccttggtcaaaacggcagacggctgaaaagcaaacaccgtccgtcgtgttgccgtttgcggatgagtacgggtcaaccccaatgccgccgaaaccgtcgaagccgccttcaacattgccgccgccaaagccgcaaagttggcaaaaacggtaaaaccggggagataaaagccgatggcaggaaagtaaatgtgaggatagacagtacggaggcagacctgctttatccggcagggcaataa

SEQ ID NO: 40013 - DNA, 522 bp, Neisseria meningitidis
atgattatagttgaacatttagaacattatttgggtgaaatcgaaagcggtataaaatgcttggatcgacgttatcatctcagcgtttccgtcttcccatcacaaccatataaaggggtaactactttttctactttaggcttgaatcgatatgacttgaactataagagtaggtttgaattaatttttacctgttctgaagaatggaataaagaaaatattgcagcttttctatcaggagtggctgaatatttgattgacaatagacaacctattttaagaggtgaaattattcaattacccagggtaattatcgaaggtagcaaaatggatgcactgtatgtttccgccccattttatttcgacgatgattttcaggtctgttatggcgaacactacaatatcgttttccctttgcttgtcccgttgtataaacaggaagcagaattggtggaaaaaagggttggaatgcttttgagcagttcttgctggataatgaagttggcaacctttcggatatga

SEQ ID NO: 40014 - DNA, 351 bp, Neisseria meningitidis
gtggctttgcgcactcactttgtcatttccaatgttccaagtacacctaatctgctaagaggaagacagcttgaaggaaaacttattttagaagttcctgctcaggtcaatccaattccacaatctgtattaagggcggcacaagaagaaaatgttatcattagagatacaacaggaaggatttacaataggtggtggtttagtattaggtggttgtgcaggtgcacatcttgcaagaaaagaaccattgatactaacagggaaaacaggggcaggtgcgtcagcaattgcaaatgcaagcattggatatcaatggactgtcaatttgtcagagccaaaagaaggagctaa

SEQ ID NO: 40015 - DNA, 465 bp, Neisseria meningitidis; identical to SEQ ID NO: 36919

SEQ ID NO: 40016 - DNA, 189 bp, Neisseria meningitidis
gtgcggaacgcacgtatgcggttctcaaggtttgagctaagaggccgtctgaaaacagaaaaactgtttcagacgacctttcttttaaccagttgccacagcaaccggacaaaagcagcctacctccacatccatataggcaatacaggggagatattttgtaaattctacgaatattttacctgctaa

SEQ ID NO: 40017 - DNA, 552 bp, Neisseria meningitidis
atggaattcctatctcttcacccttggtggtctttttttattatattaactattatccttagctatattggattctgtgcacatctccacattcaaaatagggcagttttcttttatagctatcgggatgtaactattattttcttgacacctgtcatcctcatcgccctaagttatttaattaaaaataaagaaatcctgtcagcttgtatcttatgtataactcttattgcattttcatgggcatggattataacctatcgatctaatactaaaaggttttttctttccttattgatagtatggggaaaattgttattaagtactattgtttgggcaattctcgccatatcacttggcttagctgtaataacagggaacagcaagcgtaaaaaatatgaacgacgtgaccgtcatgctgaacgtaatgaaaaagcttttataggtgcgctattagtaggtttcgaattatcaagaaatttattgaatttatgttgcctacacaaggatttttccaccccatctaaaaacattgaagtcaatcgctcttaa

SEQ ID NO: 40018 - DNA, 972 bp, Neisseria meningitidis
ttgttaatccgctatatcgacatcgccaaacgaaacttcgtcatcgccgtttcgtctttgtctaaaaccaaaaccgaaaccaacaaccccaaaggtatcgcccatactatcgaataccttaaaaaacacaaggtcgccctcgtcgtgacggaaagtaccggcggtctcgaaatccccgccgccaaagccatccgccgagcaggcatagccgtgattatcgccaacccgcgtcagacgcatcagtttgcccaatcgcagccgctgaccaaaaccgacgccaaagatgccaaaatgcccgccttcttcgcacagatgacggcacagaaagaagattcgcaaaccatgccctaccaaccgcccaccgaagcggaagaagtgttggaagccttggttaaccgccgcaaccaatcggcggatatgcggactgccgagaaaaaccgtctgcatcaggttcatgaaacgcaagtcggaagcgtcaaacaactgattgcccattttgaccggctgattgacgaattggacaaacaaatcgacgaccacacccacacgcattttgacggcaaagcccaagtggcggagcaaatcaaaggcatcggttcgataacgacggctacgctgatggtgatgttgcccgaattggggcggctgtcgcacaaacggatagcgagtttggtcggcattgccccgcacccgagggagagcggggaaaccaaattcaaaagccgctgctttggcggaaggtctgcggtgcgtaaggcactgtatatggctaccgtggcagcgacacgttttgaaccgcttattcgggatttctaccaacgcctgccgtccgagggtaagccgtataaggttgccgttacggcatgtatgcgcaaactgctgacgatatcgaatgcccggatgcgtgattattttgccgaaaacgataccgccgaaaacgataccgccgaaaacggtatccggacggcttga

SEQ ID NO: 40019 - DNA, 435 bp, Neisseria meningitidis
atgcgccgggcgttgattgcgaaaattaagattgctcaaaaggagctgggcttggatgacggtacctatcgcgcggtgttggagcgtgtgacggataagcggtcgtgtgcggatatggatgtttctgaacttgagtctgttgtcgctgatatgcggtcgcacggatttaagcctaaagcaaaaggtaacccacacggcaaaccgcatctgcgtcggacatcatcagcggcaatgctggacaaagtcgaagccctgctgaccgtcggcggcaaacattggaactatgcacacgcaatggcgcggcggatgtttggtaaggataaggtcgaatatttagacgatacgcagctacataaactggttgctgcgttgcagattgcggaaaacaggaaaacggaaaaagcgggtggggatgatggggttcgaaaaagttga

SEQ ID NO: 40020 - DNA, 225 bp, Neisseria meningitidis
ttgacggaatcgacggaagcggtgggcttcagcccaccgcttgtatattggaatcaccgtatcatagcgccacccgcgcccacccaaggcacacaaccgttgcgtagctcagggagcggcagggcaacccatcgacacaaccggacagttgccggacaacacaaccgaatgcaaggcaggtttatgatgagtacccaataccattacgcaggtatagtgaattaa

SEQ ID NO: 40021 - DNA, 1536 bp, Neisseria meningitidis
gtgtctgattccaagacgaaagaacgcgccacattcggcacgcgccgcgcgtttatgattgccgccatcgggtccgccgtcggcttgggcaatatttggcgtttcccctatattgcttttgaaaacggcggcggcgcgttcatcctgccctatctggtcgcgcttctgacggcgggcatcccgctgctgctgctcgattatgccatcggccaccgttaccgtggttctgcgcccttggctttccgccgcctcggacgatggtttgagccggtcggctggtggaacgtgatgaccaatatcgtcatctgcatctattacgcggtaattatcggttgggcggcaagctatacctattattcggtcaacgccgcctggggtgcggatccgcagggttttttctttaaggacttcctgcaaatggcgggcccggaagccttgggtttggattttgtcggcaaagtcgccggtcctttggcgggcgtgtgggtttttaccgccgccattatggcgttgggcgtgcaaaagggcgtggcgcgcgcctcgtcgttctttatgccgctgcttttggtgatgtttttgattatggtcggcatttcactaaccctgccgggtgcggcaaagggcttggacgcattgtttacgcccgactggtcgaaactcgccgattccaaggtctgggtggcggcatacgggcagattttcttttcgctttccatctgcttcggcattatggttacctattcttcttatttgaagaaaaaaaccgacttgggcggaacggggctggtggtcggttttgccaacagcagctttgaactgctcgcgggcatcggcgtgtttgccgcattgggctttatggcgcaggcgggcggtaaggcggtcaacgaggttgcctcaggcggcatcggtttggcgtttatcgcctttccgaccattatcaaccaggcaccgatgggctggctgatcggcatattgtttttcggttcgctggtattcgccggcgttacgtcgatgatttccatccttgaagtgattgtggcggcgattcaggacaagctgaacatcgggcgcgtcaacgccacgctgctggtctgcattccgatgggcattgtttccacgctgctgttcggtacggcgacggggctgccggttttggacgtgatggacaaattcgtcaacacctacggcattgttgccgccggctttgtttatgttgccgccatcatcatcagcggcaggctgccggaattacgcaagcacctgaacgctttgtcctccatccgcatcggcggcttgtggacggtctgcgtcgtggttaccgtcgtgatgctcggctatatgctgtttaaagataccagcggcctgatggagaaaaattacgaaggttatccggatggtttcctcagtattttcggctgggggatgtcggcggcgttggtcgtgttcgggctgctgctgtcgttgctgccttggaaacacggtcaggatttcaacgtcaaagacgaacacgaacatgaacaaggagaagaaaaatga

SEQ ID NO: 40022 - DNA, 309 bp, Neisseria meningitidis
atgccgtctgaaatcctgctgtttcagacggcatccggttttcagaaatgctacaattccgtttttacagaaactcccgacaccatgaaaaaaattaccccgaaatcgtttgaagaagccttgtcgcgccttgaatcgctgacgcagtctatgcagggtgaaatgcccttggaagacgcgcttgccgcctatcaggaaggcaacgagctggtcaggtactgccaaaccaagctggcacaagtcgaacagaaattacaggttttggatgcggacgggccgaaggagttgaaccttgaatccgacgaatga

SEQ ID NO: 40023 - DNA, 309 bp, Neisseria meningitidis; identical to SEQ ID NO: 40022

SEQ ID NO: 40024 - DNA, 306 bp, Neisseria meningitidis
atgcgcgtatctaaaataattggaagtatgttgcttgttacagcggttcagaccgtattttcggcaaatgtttacgcgtgccgccataatggtaaaaccagttacagccaaactccgggaaaacattgtaccaacgcgggtttggggcgggaccgggtgtacagttcggttagaccggcagtaaaagacagggcggaagacgcaggggtcggcgattattcggacacggtgagggacgaacacgtccaaaatccgagagagaatacgcataaggatgcttcgaataccggtgcaaagacgcattga

SEQ ID NO: 40025 - DNA, 198 bp, Neisseria meningitidis; identical to SEQ ID NO: 36382

SEQ ID NO: 40026 - DNA, 354 bp, Neisseria meningitidis
atgaaaaattgcaaatttttttatgatccgacaagggcaatctatgatagcggtgcagattacttaactagggaaaaacatagattagtcgttatcgcaaatagtgcttgggggctattgcttaatttatcttgttattatgacgaggttttggaaaagcggaaaataccgttcggcaaacaggaaattgatgacgatatggacaaagtgtccgcccttaagcggaagtttaaagatatttctgaaatcaaagtaggggatggttgggaatacccgttcaattatgagcagggaatgaaagaattagatgaagtgctattgaaatacattcccttttttgaagaagaacgataa

SEQ ID NO: 40027 - DNA, 732 bp, Neisseria meningitidis
atgataaaacttactgcacaacaaatatttgataagttgctggatgaagaaaaaatcttatcggccaatggtcaaattagatttttcttgggcgatgtggatattatcgtcaaacaaaaagatgttgtcggcaacatcattcaggaatggctcggcggatgattgagaaaaagggaaattgaatttgatgtttcaaccaatacccaaatgcctcccgatttctttttaaataaaaaagaccgcagcagagaattgttggaagtaaaggcgttcaaccgaaataccggcccgggttttgatattgcagattttaaaatgtattctgatgaaatcattcataagccctatatgctggatgtagactatttaatattcggttacgatatggacgacaacggcaatgtaaccatcaaggatttatggcttaaaaaagtatggcaaattacgagaagcatggatgggtgggcaattaatcttcaagtcaaaaaaggcgtggtgcataaaatccgcccgggtgtttggtacagcataaataaaaagaatatgcctatgtttgaatgcttggaagattttgtttccgcaattgaagaaaccgtttatcaaaacccggcaacacggcataacgcatccttatggaaaaagaaatttgaggaagcctataaaaaacactacaaccgatcgatttccatacctcgttggcacgaaattgcacacaaatacaaaaagaaataa

SEQ ID NO: 40028 - DNA, 981 bp, Neisseria meningitidis
  misc_feature 6, 7, 8, 9, 10: 'n' is a, c, g or t
gtgtgnnnnntgacggcggtcggatgcctgctgttttatcctgctgcgggtagccattcttacgcggtatttttgggcgcgttgtttattttggcttccggcgtaacgctgcttcaggtcgccggtaatccttatgttaccctgctggcgaaacccggcaaggaatcggcaacactgacgctggttcaggcgtttaacgctttgggtacgaccattgcgccgcaaatcggcgcgttcctgattctggcggacgcaacccaaaccgtcagcaaggcggaacagatttcttccgtacagattccctatttgggactggcggggctgctgattatccttgccgttttcgtgaaaatgatccggctgcccgacgcgcgcaaaattgccgccgaggaaagcgcgcacaaccacgacggcaaaaccagcgtatggcaatacaaacatctcgtgttcggtacggcaggcattttctgctatgtcggcgcggaggtgtctatcggttcgttgatggtcaacgtattgggttatctgaaagggctggatcatgcttctgccgcgcattacctgtcgttctattggggcggcgcgatggtcggacgtttcctcggttcggcggtgatggcgaaattcgcgcccaaccgttatttggcgtttaacgcatcggctgcggtcgtactgcttgccgtcgcgatggcgacgggtagcggcaatgcggatgtggcgatgtggtcgctgcttgccatcggttttttcaactcgattatgttcccgacgattttctctttggcaaccaaaggattgggaaaatttaccaacgcggcttccggtgtactgtgtaccgcgattgtcggcggtgcggtcgttcctgtcgtgcagggctgggtggcagatacttacaccctgatgtcttcgtttgtcgtttccgtcatctgttatctgtatatcgtgttttttgcggtgtacggatatagggcggacaaataa

SEQ ID NO: 40029 - DNA, 339 bp, Neisseria meningitidis
atgttggacgcaagcccaccgcaagagcggggtagccgccgcgaaacgcgcagccaaaaaaaagcgtcgcaaataactgcctttttccgatggctgggcggcttggtctctaatccggccacagggaaaatcagccataccaaactatggacaaacgtggcagccgcttctatgacctataagttctctcaaacagcagatgcgccggaatggctctggtgggcttatggcgcattggtcggcgggtatgcattaatcaaacgcggcatcgccgccgtaccgcagttggcagaaatcaaaaagtccgcgaatgcggaagaatggagcggcaatgattga

SEQ ID NO: 40030 - DNA, 564 bp, Neisseria meningitidis
atgcaaaacggcgggggaaagatttaccagacggcggacaatgtggaagggattatgctgttgaaggtagtacctgagcgtaccgtttcggcagatgcaaaaaccagagacccgatgtgggacaatgcggctttacagaccagcgaaggcgtaaattttattgctcgtttcctaggattttttagcgatggggaataccgctatgtggatgtcctgcaacccaaccattccgatattattcggtattcaggtaaagattttccgataaatcaaatatttaatcatatacaccccgcccgttatgcggtaacgttcgaaaacaatgtcgattccaagctgcgcaggcactgggtggcaggtgcgaccatacggattatcgaccgccaaactgacgaagtgattgccaagaaaaccatctatgtctttgaaaaaggcttggacggcacgggtggggcgagaatgccgtggaagtttgctatcttgtgcaataaagaaagacttacttcttcagagccgttatcggattttgttcttagcgttttaaaaccttatatattgcgtccc

SEQ ID NO: 40031 - DNA, 1356 bp, Neisseria meningitidis
atgtctgatttttttcattctgacgtgttgtccgtttccgagttgaacgcatttgccaaaagtcttttggaaaaccaccttgccggcctgtggattgcgggcgaagtgtccaacctgacccgtgccgccagcggacattattatttctcgctcaaagacagccgcgcgcaggtgcgttgcgcgatgttcaaaggtgcggcggcgcgtttggcgaagcctttgaaagaaggcgaccatatcgaagtatcaggaaaaatcagtatttacgaggcgcggggcgaatttcaaattaccgtgaatgaggtgcggctcaaaggtttggggcagctttacgaagcctacgagcggttgaaggcacagttgcaggcggaaggcgcgtttgcggcggaacgcaaaaagccgttgcctacccgtccgcaatgtatcggcatcgtcaccagcctggcagcagcggcattgcgcgatgtcgttaccaccttgaaacgccgcgcgcccgaaattcccgttatcgtttatccgacacctgttcaaggcgcaggcagcgagttacaaattgcccaagcgattaaaaccgcctcgcaacgcgccgaatgcgacgtgttgattgtctgtcgcggcggcggcagcattgaagacttgtgggcgtttaacgaagaaccggtcgtgcgcgcaatcgaagcctgcacggttcccgtcgtcagtggcgtgggacacgaaaccgattttacgcttgccgattttgtcgccgacgtgcgcgcgcccacgccgaccggtgcggcggagctggtcagccccaaccgccaagaatcgctacatcgtctcgctcaggcgcaaggccgtctgaaaactgttttggaacaacgctatttcgatgccagccaaaaactcgactggcttgcgcggcaaatccgtcatccgcgccaaaaacttgatgagcagcgcgcttcaatcggcaagctggcgcaaacgctgtcttactctatgaagcaaaacctccgtgcccacaccgcccgttttgaacgccaaacccaagccctgcaacattaccgtcctgatgtttccgtttgcaaaaacaacatcgtctgccttcagacggcattgcccgccgccttcagccaactgcttacccaccgccgccaaagcctgaccgcccaagccgcattgctcgaagccgtttcgccgcagcacattctggagcgcggcttttccgtcgtcaaaaacacacgcggacaagtcatccgcaacgccgatgttttgaagcaggggcagaagctgcacattaccttcgccgacggcgaaaccgacgtgcgcgtaagcaaagaacaagggcagcaggatttgttcgattgcatttaa

SEQ ID NO: 40032 - DNA, 354 bp, Neisseria meningitidis
gtgattacattgcgcatcgtgtgggcagttgccaaccgcgccaagcgtccgcaaagcgacagcaaggctgcggcggcaggacacggcattctgtatctgctcatgcttgccgttcccgttatcggcatgatccgccaatacggcagcggccgcggcccgttgaaagtgttcggcgttgaggtgatgcagggttcgccggaaaaaatcgagtggatggcaaacttgggcaacacgttccacggcaatttgggctggctgctgtttgccgccgtcgtcggacacgtcgccatggtcgtcgtccaccgtgttcaaggcaaagacgtgctgtaccgcatgacggggcgtgtccgttga

SEQ ID NO: 40033 - DNA, 111 bp, Neisseria meningitidis
atgcgtgtacaaccatctgttaagaaaatttgccgaaattgcaagattattcgtcgaaatcgtgtagttcgtgtaatttgtactgatctccgtcacaaacagcgtcaaggt

SEQ ID NO: 40034 - DNA, 279 bp, Neisseria meningitidis
atgtcccgaaacctgcttgtccgctggcttgtcgtctgcctcatccctttggcgacgcttgccgttttcgtcgccaatccgcccgaagacaaaccccagcatctgatcaacggcatcatccttgcctgcgaagcgacgtttttgttcaaattcgtccttttcgacaccatcaagcatcatttgaaacaagagtttgatttgaaacgtcaaaccatgttgctgtttattccgattgttttgctggttgtgtatttgttccactatttcggcgcgttttag

SEQ ID NO: 40035 - DNA, 1242 bp, Neisseria meningitidis
ttgaacggcaggaacgacagtgggacgcagaaaactttggtttgccctggcagcagcaggcgttatcggcggtttggtcggcattgtgctgacggaactgatgcacttcatacagcatacggcaacggttatggcgcggacggcgtgtacacttcgttccgcgaaggcgtggcacaggcttccggtatgcggcgcgttgccgtgctgacgctgtgcggcgcggtcgcaggcagcggctggtggttgctgaaacgtttcggcaagccgcaaatcgaaatcaaagccgccttgaaacagccgttgcaggggctgccgtttctgacgacggttttccatgttctgctgcaaatcataacggtcggactcggttcgccgctcggacgcgaagtcgcgccgcgagaaatgaccgccgcgtttgcttcggcaggcggcaaacgcttgggtttggacgaaggcgaaatgcgcctcttgattgcctgtgcgtccggcgcgggtttggcggcggtgtataacgtgccgctcgcctccacgctgtttatcctcgaagcgatgttgggcgtgtggacgcagcaggccgccgccgccgcgttgctgacttcggtcattgccaccgccgtcgcgcgcatcggcttaggcgacgtgcagcaatatcatcccgccaaccttgccgtaaacacctcattacttcggttttccgccgtcatcggcccgatactgggcgcaacggcggtatatttccggcgcagtgccgaaaagttccccttcctcaagcgcgacaatccgagaattattcctttggcgattgctttgtttgcactcatcggcgcgattgccgtttggtttcccgaaattttgggcaacggcaaagcaggcaaccaactgacctttggcggattgaccgactggcaacacagccttgagctgaccgccgtcaaatggctggttgtcttgatggcgttggcggcaggcgcatacggcggactgattacgccgtctatgatgctcggcagcaccatttcttttgcagccgccgccgcgtggaacagcgttttccccgaaatgccgtctgaaagcgcggcagtcgtcggcgccgccgttttcctcggcgtttccctcaatatgccgctgaccgccgccgtctttattttggaactcacctacgcccccgccgctttgttgatgcctttatgtacgggtatggcgggcgcggtatggacggcaaggaaaatgggatgtaaataa

SEQ ID NO: 40036 - DNA, 228 bp, Neisseria meningitidis
atggaaacttgggttcaaaactacacggcaatcggcggcagcctgtatctgactgccgccgccgcactcttacccatcgtctttttatttgccgtgctgaccgtcctgaagctgaaaggctatcaggcggggctttatacgctgctgattgcgcttgccgttgccgcattcggcttcgggatgccggcgggtatggcggtttcttccctgccgccgcagccgcactga

SEQ ID NO: 40037 - DNA, 658 bp, Neisseria meningitidis
atggacaggcatttcgggcgcaggcgttttctgacggttgccgccgttgcggcggcgggcgcggcggtttctttcctgccgaatccttttgccgccgacggtgaaaaacgaaacggggatgaaaaacgcaatgaaaatgtgtttttctggaaaggtgtcgcgctgggttccggcgcggagctgcgcctgttcggtgtggacgacagacaggcggcggatttggtcaacaaggttttggcggaagtggcgcgtttggaaaaaattgttcagcctttaccgtgaagacagcctgatcagccgcctgaacagggacggttatctgacttcgccgtcggcggattttttggaactgttgagcctgtgccgcgatattcacgcgctgacggacggcgcgttcgatccgacagtgcaggcgttgtggaaactgtatgccgattattttgccgcccgtcccgatgcggaaacgccgcctcctcaaaacagcgtgaaggaagccctgaaacgggtcggcttcggcaaagtctcgtttgacgaccgtgaaatccgttttgccgaaaagggtatgggtttgtccttgaacggcatcgcgcaagtctatagtggattaacaaaaaccagtacggcgttgcctcgccttagctcaaagagaacgattctc

SEQ ID NO: 40038 - DNA, 561 bp, Neisseria meningitidis
atgaatccacttattcatcaagcaaaggaatcatctatgcaaacccgcattctctccgccgtactgctggctttttcaaccgctgcctttgccgggggcgcattcacgctgcaattcgacaacccgtccgaagacggcggcttcacgcaaaaccagcttttgagcgcgccttacggatttggctgttcgggcggcaatgcttcgcccgcgctgtcgtggaaaaatccgcccgccgggacaaaaagtttcgtcctgaccgtttacgataaagacgcgccgaccggactgggctggatgcaccgggtggtcgccgacattcccgccgatgtccaccgccgcaacgcgacctcgctgcaattaagccgctgcgccaacatcgccgacgaccagtccgcagccatatcggcggtaatcagtttgcggatttgccgcatcaggttgacgccttcgtacacggcaaaaccgatgccgtcatgctgcaaccacgccaacacgccgcaaagcgcgacctccgccgcattgtgcggcacttcttcatccgtcagcaccgccgccgcataa

SEQ ID NO: 40039 - DNA, 612 bp, Neisseria meningitidis
atgcgccgcaccgccctcctgctgctcgcactcgccgccggcacgtccctcgctgccggcttcagccaaaaagacacgccgatcaacacccgctaccgcgaaacgcccgaagaggccgccgcccgcgaatttaaagaacataccgccaaactgccgccgctgcccgatacgcactcggacggctggttcgacatttatgtggatgaaaattacggcaaacagccgaaaatcctgctcgacagcctgcaaattatgcccgcgcccgacggcagcatccgctacattctcaatatccgctccgacaaaggctacgacaacctgactgccgaaggcatattctgcgcccgcttctccatcaggttcggcaacggcaaaccttcctcctataaagtgttcggctacggcgacacggtcaaccgccgctggatacagccccgaaacgccgaatggaaaccgataggcggtacattaagccgcaacgacgcactgcgcaccgtcctgtatcaggcattctgcgagggcggtgtacccgccgacacgaaaggtttggtacaacgcctgaaagaacgtgccggacgctatgccccgtcgataaagccgcacaacaaataa

SEQ ID NO: 40040 - DNA, 480 bp, Neisseria meningitidis
atgccccaactcactttagacaaaaccgatattaaaatcttacaggttctccaggaaaacggcaggctgaccaatgtcgaactgtccgaacgtgtcgcactttcgccttctccgtggcgccgtctgaagcagttggaagatgccggcatcgtccgccaatatgccgcgctgctgtctccggaatccgtcaacctggggcttcaggcatttatccgcgtttccatccgcaaagcaaaagacgcgcgggaagactttgccgcatcggttcgaaaatggcctgaagtcttgagctgcttcgccctgacaggggaaaccgactacctgcttcaggcgttttttaccgatatgaacgcgttttcccattttgttttggatacgctcctgtcccaccacggcgtacaagatgcgcaatcgagctttgttttaaaagaaatcaaacacaccacctccctgccgctcaaccacctgctgaaggaatag

SEQ ID NO: 40041 - DNA, 1266 bp, Neisseria meningitidis
atgcaacaaattaaatttattgacttattttccggaatgagtggcatcaggaaaggattcgaacaagcctgtcggaaacagtcggttgcttgcgaatgtgtttttacttcagaaatcaaaccggcagctttggaagtattgaagcaaaactaccctgatgaagtgccgtatggagacataacgaaaattgaaacaggggatattcccgattttgacattctgttggcaggcttcccttgtcaggctttttctttcgccggaaaaagattgggctttgaagatacacggggaacgcttttctttgatgtggcaaggattttaaaagcaaaaaaaccaaaaggttttattttggaaaatgtggaaggattggtgacacacgatagaaaagattcgacacaaaaatggcgcaccctgaccgttattttggaaaccttggaagcattgggctactatgtttcttggaaagttttaaatgcaaaagatttcggcattccccaaaacaggaagcgcatttatctgacaggcagtttaaaatccaaacccgacttatctttcgaaacaagcccaagtccgaaattaaaaaatattttggaatcgggactgcctactgaaagcagccctttcatcaagaaattgctaaaaaaatttcccccgtccgaactgtacggaaaatcagtaaaagacaaacggggagggaaaaacaatattcacagttgggatattgaattaaaaggcgcagtaaccgaagaagagaagcaattgttaaatatccttctaaaagaacggaggaaaaaaagggcttcagaaatcggcatagattggatggatgggatgcctttgacaaaagcgcaaatttcaactttctataaacaccccgatctccaaaatattttggacagcctgacagataaaggctatttggttttagagcatccgaaacaaaaaattggcgggcaaagaatcaaagatgaatccctgcccaaaggctacaatattgtttcaggtaaaaaatcttttgaaatcaataaaatattagatccaaacgatgttgcgccaaccttggttgcaatggatatggagcaccttttcgtcgttgacaacggcggtttgcgtacacttaccggaaaagaagggttgcgcttattcggctatccggacgattattcgtttgatattcccaaaaaagacagatgcgatttattgggtaataccgttgccgtccctgtgattaaggcggtatctgaaagacttctgcatactttataa

SEQ ID NO: 40042 - DNA, 1176 bp, Neisseria meningitidis
atgacagaggacgaacgtttcgcgtggttgcaactggcttttacgccctatatcggtgcggaaagtttcttgctgctgatgcgccgtttcggcagcgcgcaaaatgccttgtccgcaccggcggaacacgccccggcggtgcggcacaagcacgcccgagcttggcgcaatgcggaaaacgcgctttggcgggcagcggcagaagcggcgttggaatgggaaatgcgggacggatgccgcctgatgctgcttcagatgagatttccccgaaatgctgacgcagggctgaccgcgccgccggttttgtttttgcgcggcaacgtgcggctgctgcacaagccttccgccgccatcgtcggcagccgccatgccacgccgcaggcgatgcggattgccaaagatttcggcaagtcgttgggcgggcaaaatatccccgttgtgtcgggtatggcttccggtatcgatactgccgcccatcagggcgcactggaggcagaaggcggcaccatcgccgtgtgggggacgggtatagaccgcatttacccgccgtccaataaaaaccttgcctatgaaatcgccgaaaaaggattgattgtcagcgagtttcccatcggtacgcgcccgtatgccggcaattttccgcgccgcaaccgcctgattgctgccctgtcgcaagtaacgctggtggttgaagccgccttggaatccggttcgctgattaccgccggcttggcggcagaaatggggcgcgaagtgatggcggtacccggttcgatagacaatccgcacagcaaaggctgccacaaactgattaaagacggcgcaaaattggtggaatgcctggacgacatcctgaacgaatgcccggggctattgcaaaatacgggtgcttcatcatattctataaataaagatacgcccgacacgggccgccgcgccgttcagacggcatacgccccgccgcctgccgcaaaaatgccgtctgaaggggcggcaggcggcacagccgtcggcggcatactggataaaatgggtttcgaccccatccatcccgacgtgcttgccggacagttggctatgcctgccgcagatttgtatgccgcactgttggaattggaattggacggcagcgttgccgcaatgcccggcggcagataccagcgtatccgaacttga

SEQ ID NO: 40043 - DNA, 2430 bp, Neisseria meningitidis
atgacagaaaaatcccataaaaaaaccaaaggcagggcgggaagcccgtccccaacgtccgcacgcaagaaagccgacaacggcgcacggggcaataaagtttccgagcggctcaaggcggtcaaagagttgcagaaaaccgaaaccaaaaaggcgcgtcccgaacatgtcgtcaactttatcggcgacgcactgtggctgatgggtttggcggcaaccctgtatttggcgatttccctgatcagtttcgatatgggcgatccgtcttggtcgcacagttcgccggttgtggaagatgtcgccaattggggcggactgttcggcgcgtatgttgccgatgtcggctattatcttttcggctggtcgttctggtggtggatagcggctgcctgcgtcatgctgtataaaaattttcgtctgcacgcaaaacagacggaaaacgaggcatacaaccacaaaatcgctgccgccgcgctgtttgtcctgacggtcttcagccccgtcttggagtattttgtgctgggcggaaaatatgccgactccctgcctgtcggagcaggcggtatggtcggcatacgcgtcggcgcagtgtttgcgtggctgctggggaaatcgggcagcctgctgattatcttggttgttctgctgttgtcgttgtccctgctggtgcagatttcatggctggaatttttgaacggtgcgggcagggcggttcaaaaccgcctgagtgccttatccggcaaggtcatggctttaggaaaacgccggccgaatagcaaaacagacggtgtcgatacccaaaatacacggcgcatggtaaaagaagccaagaatattacggccaaacccgttgccttgcccgaaggcagcagcagcaaccgcaaatccgtcgcggtttccgtcgcgccgtcgcccaaaattcaggtttctctgtttgaagatgacgaacctcggcaggcgggcgaataccacaagcctacattgaacctattgcggattcctgacagcgaacccgtcagcatcaatcccgccgaattggagcgcactgccgaactgatcgaatccaaactggcagaattcggcatcggcgtacaagtcgtatccgccacatccggtcccgtcatcacgcgctacgaaatcgaacccgcgcaaggtgttaaaggcagccaaattgttgccttgtcgaaagatttggcacgctctatgtcgctgcaatccgtgcgtatcgtcgaaaccatcgcaggtaaaaacacgatgggcatcgagttgcccaacgacaaacgccaagacgtgatgttgagcgaaatcttgtcctcgcccgtgtttgccgaagccaaatccaagctgaccgtcgcgctgggcaaagacattgccggtacccccgttgtcggcgacttggcgaaaatgccgcaccttttggtcgccggtatgactggttcgggcaagtccgtcggcgtgaacggcatgattatgtctatgcttttcaaagctacgcccgacgaagtccgctttatcatgatagacccgaaaatgcttgagttgagcatttacgacggcattccgcacctgctctgtcccgtcgtgaccgatatgcgcgaagcggggcaggcgttgaactggtgcgtcgccgaaatggaaaaacgctaccgcctgctttcccacgccggtgtacgcaatctggaaggcttcaaccaaaaagtcgaagccgcaaaagcggcaggcaagccgctgctcaatccgttcagtctgaaccccgacagccccgagcctttggaaaaactgccgatgattgtggtcgttatcgacgaacttgccgacctgatgatgaccgaacgcaaagccgtcgagcagcaaatcgcccgtctcgcccaaaaagcgcgcgccgccggtatccatatgattgtcgccacccaacgtcccagtgtcgatgtcgttactggcctgattaaagccaacatcccgacgcgtatggcgtttaccgtgcaaagcaaaatcgacagccgtaccatcctcgaccaaatgggcgcggacgaactgctcaaatatggcgattcgctgttcctccagcccggcagtgccgaaccgacccgcctgcaaggcgcgtttgtttcagacgacgaagtacatcaagtcgtcaactacgtcaaatcgcaagccccagccgactatattgaaggtctgctcagcggcgaggccgcgctggaaactgccaatatcgttaatccgaatgcagacagcgacgaattgttcgatcaggcagtcgcctatgttttggaaagcaaaaaaacctccatttcgtctttgcagcggcagttgcgtatcggctataaccgcgcggcaaagatggaggcactggaaaatgcgggtgtcgtttctcccaccgacctcaacggcagccgtaaaattttggcgcacaaggaccatttgtag

SEQ ID NO: 40044 - DNA, 1647 bp, Neisseria meningitidis
atgaaacaatccgcccgaataaaaaatatggatcagacattaaaaaatacattgggcatttgcgcgcttttagccttttgttttggcgcggccatcgcatcaggttatcacttggaatatgaatacggctaccgttattctgccgtgggtgctttggcttcggttgtatttttattattattggcacgcggtttcccgcgcgtttcttcagttgttttactgatttacgtcggcacaaccgccctatatttgccggtcggctggctgtatggtgcgccgtcttatcagatagtcggttcgatattggaaagcaatcctgccgaggcgcgtgaatttgtcggcaatcttcccgggtcgctttattttgtgcaggcattatttttcatttttggcttgacagtttggagatattgtgtatcggggggggtatttgctgacgtaaaaaactataaacgccgcagcaaaatatggctgactatattattgactttgattttgtcctgcgcggtgatggataaaatcgccagcgataaagatttgcgagaacctgatgccggcctgttgttgaatattttcgacctgtattacgatttggcttccgcgccggcacaatatgccgccaagcgcgcccacattttggaagcagcaaaaaaagcgtcaacatggcatatccgtcatgttgcgcccaagtataaaaattatgttgtggttatcggtgagagcgcacgttcggattatatgaatgtttacggtttcccattgcccgatacgccttttttgagtcagaccaaagggctgttgataaacggttaccaatcgaccgcccacgcgacgaatctttcgctgccgcagactttggggctgccgggagaaccgaacaataacatcgtcagcttggcgaagcaggcgggttttcggacggcgtggctgtctaatcaaggaatgttggggcattttgccaacgaaatttccacctatgccctacgcagcgattatccgtggtttacccaaaggggtgattatggcaaaagcgcggggttgagcgaccgcctgttgttgccggcgttcaaacgggttttgataggaaatgcaggcacgaagcctcggctgattgtgatgcacctgatgggttcgcacagtgatttttgcacacgtttggataaggatgcgcggcggtttcagtatcaaactgaaaaaatatcctgctatgtttccaccatcgcgcaaaccgataaatttttagaagatacagttaagatattgaatgaaaataaagaaagctggtctttggtttacttttccgaccacggtttgatgcatgtcggtaaaggcggcgagcgaacgttgacacatggtgcgtggaagcgtcaaagctacggcgtgccgctggttaaaatttcgtccgatgacacgcggcgcgaaatgattaaagtgaggcgcagcgcgtttaattttttacgcggattcggcagttggacgggtatcgaaaccgacgagttgcccgatgacggctatgatttttgggggaatgttcccgatgtgcagggcgaaggcaataaccttgcctttatcgacggactgcccgacgaccccgcgccgtggtatgcgggaaaaggcaaatcgactaaaaatacgtctaaaaaatga

SEQ ID NO: 40045 - DNA, 1003 bp, Neisseria meningitidis
atgcacacaccacttacctatattgaccttttctcaggagcaggaggcctatccttgggttttgaacaagccggattccaacaattgctttctgttgaaatggagtctgattattgtcagacttaccgtaccaacttcccccatcatcaattactgcaaaaagatttaaccacactaaccgaacaagatttaatcaattgtcttaacggacaagcagttgatttgattattggaggaccaccttgtcaaggttttagtatggcaggaaagattggacggacatttacagatgacccacgcaaccatttatttaaagagtttgtccgaatagttaaaattgtccaaccatatttttttgttatggaaaatgtagcgcgactctatacacacaattcaggtaaaacacgtattgagattattcaagcatttcagaatatcggttattcggtggaatgtaagatactgagtgcagccgatttcggtgttcctcagatacgtagccgagtgatatttatcgggaggagggataaaggcaaaatttcctttcccgaacctttgcagatttcccatcagactgttggatcagcaataggacattttccaaaactggctgctggcgaaagcaatccacacgttgcaaatcatgaagctatgaatcattcggcacaaatgttagaaaaaatggcatttgttaaaaatggaggtaaccgtaacgatattcctgaaccattacgtccgaaaacaggtgatatccgtaaatacatccgttacaacagcaacaaaaccagccgtttgtattacaggagatatgcgcaaagtttttcactatgaacagaatcgggcgttaaccgttcgtgaattagctgccttacaatctttccctgataattttattttttgcggcagcaaaattgcccagcagcagcaggttggtaacgccgtaccgcctttattggcaaaagctattgctgaaagtattttaaaaatgagtgaaaatgaataa

SEQ ID NO: 40046 - DNA, 1000 bp, Neisseria meningitidis; identical to SEQ ID NO: 38056

SEQ ID NO: 40047 - DNA, 942 bp, Neisseria meningitidis
atggcaatccaatggtttcccggccatatgaacaaggcgaaaaaagccatcgccgagcgtgcaaaaagcgttgatatggtgattgaaatgctggacgcgcgtatgcccgcctccagcgaaaaccccctgcttgcccagctttccaaaggcaaacccaaacttaaaatcctaaacaaacaagatcttgccgaccccgaacgcacaaaggtctggcttgaccactacaacagccgccccgacacgcgcgccattgccctcgattcctccgaaaccggcgcacacggcaaaatcacccaagcctgccgcgcgatgattccccaccggcaaggcatagacaaacccttgcgcgtcttgatttgcggcattcccaacgtcggcaaatccaccctcatcaacggcatgataggcaaaaaatccgccaaaaccggcaacgaacccggcatcaccaaagccgaacaacgccttttccttgccgacgacttctggctctacgacacccccggaatgctgtggccgaaaatcatcgtcgaagaaggcggctacaaccttgccgccggcggcgcagtcggacgcaacgcgttggacgaagaagaagtcgccctcgaacttttagactacctccgccgccactacctccctatgttgcaagaacgctaccaagccgacaaagaccccagcagccactgggacgaaaacgtttggctcgaatggatagccaaaaaacgcggcgcagtcctcagcggcggacggatcaactaccaaaaagccgccgaaaacatcctcaccgacttccgtgaaggcaaaatcggcagaatcaccctcgaaacgccgaaccaatgggaaacttggctcaaaaaagcccgtcagaaagaagccgaactcaaagccatacgcgaagccagaaaagcagagcgtaaagggcagaagccttcggaagcataa

SEQ ID NO: 40048 - DNA, 777 bp, Neisseria meningitidis
atgaatagacccaagcaacccttcttccgtcccgaagtcgccgttgcccgccaaaccagcctgacgggtaaagtgattctgacacgaccgttgtcattttccctatggacgacatttgcatcgatatctgcgttattgattatcctgtttttgatatttggtaactatacgcgaaagacaacagcggagggacaaattttacctgcatcgggcgtaatcagggtgtatgcaccggatacggggacaattacagcgaaattcgtggaagatggagaaaaggttaaggctggcgacaagctatttgcgctttcgacctcacgtttcggcgcaggagatagcgtgcagcagcagttgaaaacggaggcagttttgaagaaaacgttggcagaacaggaactgggtcgtctgaagctgatacacgggaatgaaacgcgcagccttaaagcaactgtcgaacgtttggaaaaccaggaactccatatttcgcaacagatagacggtcagaaaaggcgcattagacttgcggaagcagtggcaaaaacggcactgggcagacaggaattgtcgggattgggcatggtatcctccgatttggcgaagagcaacgaacctgtttatctcgtgaaaataaaacccgacaaaccaaccatcactgcatacggtgaggaaaaaccgctgcaaatcggcatgacgttggaagcagacatcctacacgagaaacggcgattgtacgaatgggtattggagctgatttatagtatgtcgggcaaactgtaa

SEQ ID NO: 40049 - DNA, 966 bp, Neisseria meningitidis
atgaatccggcaatgattgagcgtcttaaggcagtcgagaatcaggcggaagcaatggaacgcggcgcacgctctgcatatcttaagcagcaggcgcaggaattgggcatcagccttgccacgctataccgcaagctggaggcggtcagcgtcaagccgacgcgcaaacggcgcagcgatgcgggcaagacggagcttaaaccggaagaagccaaattgatttcggcggttttggtggaggcgatgaggcgcaacggcaagcggttaatgtcggtgcggcaggcggtggaaatgctgcgcgccaacggaaaaatcgaggcggcgcggattgatggggaaaccggggaagtcatcccgtccgtccgcactgctttccgcccgctggcaagacatcgacctcaccgcccggttatggcacatccccgccgccgacatgaagaccaaacacccctttaccgtcccactgtcggactgggcggtagaaatactccgagagctgcacacacagaccggcgacaacatccaccttttcccaggcatccgcccacggcgcaaacccgcccccctcccgaccacatcagcatcaaattcgcccacaacgccatccgacgactgggctatgacggcagcacccccggcaaatccaaacacacaatgcacggattccgccacctcttcaccaacatcagcctgaccgccggaaaagacaccctcacaacagacctcgccctcggccacatcagccgcgccgccctccaacgcgccggcttctcaagcctgcaccactacctgaccgccgacagctaccgcctccaagagcggcgcgaactcgccgaatggtacagccgccgccaccgccaagcatacgaagccgccgccaaaaccccgcaaaacaaaaaaccgcctgaaaaaaattcagacggcatcctgcccaaaacacttgcaataaaacctaaaaggtattaa

SEQ ID NO: 40050 - DNA, 1197 bp, Neisseria meningitidis
atgtggacgggatttttttcaaaatcaggcactggcattgcagaggaaaggcatcaaaaccgccgtgcttgcaccgatgttccgctacttgcggaaagaaacagcaagcatcctgaccggccttacggttttgcaaaatatcggcaaagcggtttggacatctatgcatggcacggcatatatttcttcccccgctttccgttcatcgacatcgactgcatccgctgggtgtgtgcgggtttgaaagctttcaaacactacatccgcgaaaacgggctgcccgacctgattcacgcccaccgcatgaactatgccggcatactcgcccaaaaaatttcccaaaaatacggcatcccctatgtcgtcacggaacacagcagcaccatcacgcgcggtctgatccgtccccaccaatggcagccgatggaaaaagcagcggcgcacgcctccgcactgctcgctgtcagccgccatttcgcacacgtcctgcaacacaaatacggctgcgaatggcagtacctccccaacatactgggcggaatattcaaccgaccgtttgaacaaagagaaaaaaacaacaaaccgcatttcgtgttctgcaccgtctcgcaccttcgccgtctcaaaggacacgatgtcctactcactgcctttgcccgggcgttggcacaatgcccgcaactgcgcctgaacatcggcggcagcggacaggaagaacagcggctgaaacagcaggcggcagacttgggcattacccatgccgttacatttttgggcgcattgcagcccgaagcagtcttggatttgatgaggaacagcgacgcattcgtccttgccagccgcaccgaaaccttcggcgtagtctatatcgaagcactgtcccaaggattgcccgtcattgcaacacgctgcggcggtgcggaatctattgtttcagacggcaacggatatttggttcctgttgacgacgacgatgcccttgccgacgcactcatcaaaatgtatgaacaccactctgattttgaacctgcccgacttagggaaaactgtctgaacgaatttggcgaaaatgccgttataggcaggttgatcggcattttccgacaggcaatcgcagaatacggtaagaaaatacgggtgaaatatagtggattaacaaaaatcaggacaaggcgacgaagccgcagacagtacaaa

SEQ ID NO: 40051 - DNA, 1974 bp, Neisseria meningitidis
atgctgccaacccaacccaacccaacccaacccaacccaacccaacccaacccaacccaacccaacccaacccaacccaacccaagccctgatctaatcgacacagccggggtgaacaccgaggcaatctacacttcagacggcattaccgccaactctacccaactcgaacagctcaaaaaactgtttcccgcctgttttgacgcagacggaaatttccttatcgacagattacaagccgaaattgcgccacagaccgacatcggacgcgaattttacgaaatgaactggctgggcaaatcatatgctcgcctgcttcgcaacctgccgcccgaaaccctgataagtgaagacaagacgcacaacgccaaacccgaaaatgcaggcagccaaaacctactgattcgtggcgacaatctagaagtgttgaaacacttaaaaaacgcctacacaaacagcgtgaagatgatttacatcgacccgccctacaacaccggatcagacggctttgtctatcaggacgaccgcaaattcacaccagccgaacttgcctgcttagccaatattgacgaagacgaagccgcgcggattttagatttcaccgacaaaggctcaaactcgcacagtgcatggttgacctttatgtatccgcgcctgtatatcgcccgcgaactgttaaaggacgacggcgtgatttttatctcgattgacgataacgaagcggcgcagttgaagttgttgtgtgatgaagtgtttggggaagggaattttattaaagatttaattgttaatacatcagaaggtggtggtaatgcaaaatatgttgtaaatgggcatgaaactgttttagtttatgcgaaagatattactcattttgacaatctaaaaagaccaaaagatatacgcggcaaaaaaattgtaatcaatgatgaattatattggatacaggaagatgccgttcgcgaacagtttggcaaatatgggaacttgcattacgaagatattattgaaataaaaggaattgagtttaaaaacaaaattgataaagatattgaaaataatgaatatatcttaattccgaagtcttatgggaaaacaattattggaaaacttagaaaagtatccgatgatttttccaaatttcatagcatcttaaatattggaaatataagtaaaaatcttactaaagatggtattcgtgaattagaagagttgtttgaaactggaaaaggttattctccttttgaaacaccaaaaccattagatttattgaaaagattagttctttctgcaactttcaagggaaatcaaactgacctaatcctagacttcttcgcaggcagcggcacaaccgcccacgccgtgatgcagcttaacgccgaaggacaaaacggtaaccgccgctatatctgtgtacagcttcccgaaaaaaccgctgaaaaatccgaagcccgtaaagcaggctacccgaccatcttcgacatcaccaaagcccgcatagaaaaagccgccgccaaaatccgcgtcgaacatcccgattacacgggcgattcgggcttcaaaatctttcaaacggcagacaatttcaggcagcatccggacaaggatttttcgcccgaacaaccggatttgccgcttaacgatgaattaagcgaagaacagctgcaaacgcttctgaccacctggacgctgtatgacggggcggcactgaccacgccggttgagcctgtgcggttgggcagttatacggcgtatctgtgcgaaaaacggctgtatctgatgaatgccggttttacttctgccgatttgttggcgtttatccgcaagctggacgacgatgcggctttcaatcccaaccgcgtgattgtattcggcagcaatatggcaagcgccatgcagcacgaacttgaccaggcggttcgcggttatgccaataaaaaagagattgagttgaatgtggttatcagggtttga

SEQ ID NO: 40052 - DNA, 2217 bp, Neisseria meningitidis
atgaagacagacattcaaaccgaattaacccaagccctgctatcacacgaaaaagtatgggcgaacgaagaaaaaaccattttagccaaaaacattctgttggatttggtggaaaaaaccgacccgaccattatcggtttgttattgaataatgatgagttaaaacgccatttctttgtggaagtgaatggtgttttggtgtttaaattgcaggatttacgttttttcttggacaaacacagcgtcaataattcctacacaaaatacgccaaccgcattggtttgacggacggcaaccgctttttgaaagacaattcggatattgtgttggattttccgtttaaagattgcgtattgaatggcggacaaagcaccgaagaaggcgaagagatttattttaaacgcagtaatagccagccagccagccagccagccagccagccagccagccagccagccagccagccagccagccagccagccagccagccagaattatacactaaattaacccgaaaaagacaagaaatcttttttaatcaaacgcttgcttttgatgaaatcgatcggctttttgacgcaaaagcattctcaaaattctctcgccacaccgcagacggcaaacaagcggttggcgaaatcaaacgacattcagacggcacaccagccgaaaatctcattatcaaaggcaataatctgattgccctgcattcgcttgccacgcagtttaaaggtaaagtgaagctgatttatattgatccgccttattattttgttaaaaagaaacaacaagatagttttggttataacactaactttaaattatctacttggcttacatttatgaaaaatcgtttatcaattgccaaagaattattaactgatgatgggattattgttatttccattgatgatgacggaaatgcttatttaaagattttgttagatgaaatttttggatttgaaaattttatcggaaatttacccactattatgaatttaaaaggtaataatgatgaatatgcttttgcaggcactcacgaatacacactagtctttgctaaaaataaagataaatctactttttatgaatttccaatagatgaagataattttttagagaaatgggaagaagatgaaattgggttttataaaaaaggagctccaatgcgagcaacaggaaccgaagataaaagagaagatagacctgaaatgttctatccttttttggtaaaaaataacacagttagtacaattacagatgaagaattttctcaaatctataataaagatttagaagtattcaatgatgattttattcaaaaactaaaagagaaatacgaaaatcttggatacaattttattttacctattgctgataaacaatgggggcgttggcgttgggggtattcaataaagaataaggcaaggctgcagacggatattattgttagccaatctaaaaatggaatttccttgtataaaaaacaaagacctgaattagatgatttacctacaaaaaaacctaaaactattttttataaacctgaatacagtagtggtaatggaactgaacagatgaaaaatctttttggtgaaaaggcatttaaaaatcctaaaccagaagaacttatccaagattttattaccatcacaaccaacgaatccgacatcgtcttagactaccatcttggtagtggcacaaccgccgccgttgcccacaaaatgaaccgacaatatatcggtattgaacaaatggattatattgaaacgcttgccgttgaacgcttgaaaaaagtgattgatggcgagcaaggcggtatttccaaagccgtgaattggcaaggtggtggcgagtttgtttatgccgaacttgccccatttaacgaaaccgcaaaacaacaaattttggcttgcgaagattcagacggcatcaaaacgctgtttgaaggtttatgcgaacgctatttcttgaaatacaacgtcagcgtaaatgaatttagtcaaatcattcaagagcctgaatttcaatccttggcattagacgaacaaaaacaaatggtgcttgaaatgttggatttaaatcaaatgtatgtttcattatccgaaatggatgatgagcaatttgcaggttgcttaaatgatgacgataaagcgttaagccgtgaattctatcaatcagcaaaaaatcaagcggagaaaaaagatggcgaataa

SEQ ID NO: 40053 - DNA, 984 bp, Neisseria meningitidis
atggctgcgtacgacagtttgatggtatttacaggcaatgccaatcccgaattggcacaacgtgttgtcaggcatttggacatttctttgggcaatgcttccgtatccaagttttcagacggcgaagttgccgtcgaactgttggaaaacgtacgcgggcgcgatgttttcatccttcagccgacctgtgcgccgaccaatgacaacctgatggaaatcctgacgatggcggatgcactgaagcgtgcttcggcaggtcgtattaccacagccattccgtatttcggctatgcgcgccaagaccgccgtccgcgttccgtccgcgttccgatttctgccaaactggtggcaaatatgctgtattcggcagggatcgaccgtgttttgactgtcgatttgcatgccgaccagattcaaggtttcttcgatattccggtggacaatatttatgccaccccgattctgttgaacgacatcaaacaacagcggattgaaaatctgaccgtcgtcagcccggacatcggcggtgtcgtccgcgcccgcgccgtggcaaaatccctgaatgccgacttggcaatcatcgacaaacgccgcccgaaagccaatgtggcggaagtcatgaacatcatcggcgatattcaaggtagaacctgtctgattgtggacgatatgattgacactgcaaatacgctgtgcaaagccgccgtcgccctgaaagagcggggggctgaacgtgttctagcctatgccagccacgccgtattctccggagaggcggtcagccgtatcgcctcatccgaaatcgaccaggtggtcgtaaccgataccattcctttgtctgaagcggctaaaaactgcgaccgtatccgtcaggtaacgattgccggtctgttggccgaaaccgtccgccgcattagcaatgaagaatccgtctcatatcttttcaatgaagaagtgatgacaggcagcatgttgctgccataa

SEQ ID NO: 40054 - DNA, 1527 bp, Neisseria meningitidis
atggattatccaccgcttaagggtgcggcattggcatggattacgctgtctttggggcttgccgtatttatggaagttttagatacgactatcgccaatgtcgccgttcccgttatcgccggcaacctcggtgcggcaaccacgcaggggacgtgggtcattacttcttttgctgtggcaaacgccgtttccgtgccgttaacgggctttttggcaaaacgtatcggcgaggtcaaattgtttaccgccgccgccgtcggtttcgtcatcacatcgtggctgtgcggcatcgcgcccaaccttcaggctttggtgtttttccgcattttgcagggctttatcgccgggccgctgattcccctgtcgcaaagcctgttaatggcatcctatccgcccgcaaaacggacgctggcactggcattgtgggcaatgaccgtcgttgtcgcccctgttctcgggccgatactcggcggctggatttccggaaactggcattggggttggattttcttcatcaacatccccatcggcatcatatcggcatggattacatggaaacatttgaaatatcgggaaacggaaaccgttaaaatgccgaccgactatgtcgggcttacattgatggtagtcggtatcggcgcgttacagatgatgctggacaggggtaaggaactcgactggttcgcttcgggagaaatcattaccttgggcgtaaccgcattggtgtgcttgtcgtattttattgtttgggaattgggagaaaaatatccgattgtcgatttatcgctgtttaaagatcggaattttaccgtcggcgtcattgccacgtcattgggttttatggtgtatatggggacgctgaccctgctgccgttagtgttgcagaccaacctgggctatacctccacgtgggcagggcttgccgccgcgcccgtcggcatcctcccagttttcctgtcccccattatcggcaggttcggcaataaaatcgatatgcgcctgctcgtaaccgccagcttcctgacttttgccttcactttctattggcgcaccgatttttatgccgacatggatatcggcaacgtcatctggccgcagttttggcagggggcaggcgttgccatgttcttcctgccgctgaccaccatcacactgtcgcatatgaagggcggacagattgccgccgccggcagcctgtcgaatttcttgcgcgtgctgatgggcggtgtcggcgtatcattcgtcagtaccctgtgggaacggcgcgaagcgttgcaccacacacgctttgccgaacacatcacgccctattccgcaacattgcacgaaacggcggcgcatttgtcccaacaaggcatttccgacattcaaaccctaggtatcatcaacaataccattacccagcagggcttcatcatcggatcgaatgaaatctttatggcaggcagcctgctgttcatcatcatgattcctgtcatatggctggcaaaaccgccgttccacaacggcggcggcggtggacattga

SEQ ID NO: 40055 - DNA, 1368 bp, Neisseria meningitidis
atgtcttccccttcaaataccaatcgtcaaacctgatccagccgattaacctatatcctgaccgttgccggcgcgactgtcggtttcggcgcgacgtggcgtttcccgtatttggtcggtgaaaacggtggtggcgcgtatgtgtttttattctgtatcgcgatgctggttatcggcattccgatgattttggtggaaaatgtcatcggacggcgcaaaggcgtgaacgcgctggatgcgttcggcggtccgatgaacggcaaacccattgctaaaatttggaaactggtcggctggatggggctgctcggcgcgttcggcatcatggcttattacatggcactcggcggctgggtaatcagctatatcgttaatattattggaggaaatttgaatatttccagccccatcgacggtgtggttacaaaaggcttctttgccgaacacattgacagcccttgggaaattgcgttttatacgctgctttttgtcgccgtgaaccaatggattttggtcaaaggcgttatcggcggcattgaaaaagcggcaaaatagctgatgccgctgctgtttttgttcctaatcgcgatggtcgtccgcaacgttacccttccgggcgcaatggaaggggttgctttctatctgaaacctgatttcagcaagattaccgccgaactgttcgtcttcgttttggggcaggtattttttgccctgagcctgggtttcggcgtgatgattaccttgtccagctatttggataaaaacgaaaatctagttcagacggcagttatcacggcaattaccaataccatcatcgccatacttgcgggctttatgattttcccgtcgctcttcagcttcggcgttgcccccgattccggcccgactttggtgttccaaagcttgccgattgtgttctcacatatgtgggcgggatctgtgttcgccgtgattttcttctcgctgctcctgattgccgcgttgacaacttcgctgaccatttatgaagtgttgattacgaccattcaggaaaaaaccaaaatccgccgtaccgccgcgattacgattgtattggctgccatcttcattttcggcaacatcccgtccattttgagctacggcccttggaaagatgtttccatatttggcaaaaatatttttgacgcttttgactacatcagcggcaacatcttgtttatgctgaccgcgctcggttccgcgctgtttgtcggttttgtgatgaaggacgaagcgaaggaagaattgctttataaaggcaaccatacgacggtcaatatttggtttgcctatgtgaaatacctcgtgccgttggtgattctgctgatttttatcagcaacctgttctaa

SEQ ID NO: 40056 - DNA, 4473 bp, Neisseria meningitidis
atgcgcttcacacacaccaccccattttgttccgtattgtccaccctcggtctttttgccgtttcccctgcttactcatccattgtccgcaacgatgtcgattaccaatattttcgcgactttgccgaaaataaaggcgcgttcgccgtaggtgcaagcaatatttccatccaagacaagcaaggcaaaatattaggcagggttctcaacggcatccccatgcccgacttccgagtcagcaaccggcaaaccgccatcgccaccctgattcacccccaatacgtcaacagtgtcaaacacaacgtcggctacggttccatacaattcggcaacgacacccaaaatccagaagaacaagcctatacctaccgcctcgtatcacgcaacccgcacccggactacgactaccaccttccccgcctcaacaaactggttaccgaaatctcacctgccgcactcagcagcgtacccttgcttggaaacggccagccaaaggccaatgcctacctcgataccgaccgcttcccctactttgtacgactcggctcaggcacgcaacaagtccgcaaagcagacggcacgcgtacacgaaccgccccggcataccaatacctgaccggcggcacgccgctgaaagtattggggttccaaaaccacggcttactcgtcggcggcagcctgaccgaccaaccccttaacacctacgcaatcgccggagacagcggttcccccctgtttgccttcgacaagcatgaaaaccgctgggtgcttgcgggcgtactcagcacctacgccggcttcgataatttcttcaacaaatacatcgtcacgcaacccgaattcatccgttccaccatccgccaatacgaaacccggctggatgtcgggctgaccaccaacgaactcatatggcgcgacaacggtaatggcgacagcaccctgcaagggctcaacgaacgcatcaccctgcccattgcaaacccttcgcttgccccacaaaacgacagcaggcacatgccgtctgaagatgccggcaaaacgctcatcctatccagcaggttcgacaacaaaacactgatgctggcagacaatatcaaccaaggcgcaggcgcattgcagttcgacagcaacttcaccgtcgtcggtaaaaaccacacatggcaaggtgcaggcgttatcgtagccgacggcaaacgcgtcttctggcaagtcagcaaccccaaaggcgaccggctctccaaactgggcgcaggcacgcttatcgccaacggacaaggcatcaaccagggcgacatcagcatcggggaaggcactgtcgtactcgcccaaaaagctgcttcagacggcagcaaacaagcattcaaccaagtcggcatcaccagcggcaggggtacggccgtcctcgccgacagccagcaaatcaaatccgaaaacctctatttcggcttcaggggcggacggctcgacctcaacggcaacaaccttgcctttacccatatccgccatgcggacggcggcgcgcagatcgtcaaccacaaccctgaccaagccgcgacactgacgctgaccggcaaccccgtcctcagtcctgagcatgtcgagtgggtgcaatggggcaaccgtccgcaaggcaacgcggcggtttacgaatacatcaacccgcaccgcaaccgtcggaccgactacttcatactcaaacccggcggcaacccgcgcgaatttttcccgttaaatatggaaaactcaacaagctggcaatttatcggcaacaacaggcaacaggccgccaaacaagtcgcccaagccgaaaatgcccgccccgacctaattaccttcggcggatacttgggtgagaacgcgcaaacgggcaaagccgcaccgagttacagcaaaaccaatatcgaatgggtgaatggtccaaacaccccacacaagccctcgccctatacgaatacgccaacccgcacaggggcaggcgtaccgacgattaccgcctcaaagaaggcggcaaccccggcgcctacttcccatggaatgcctacagcacccaagactgggaatttctcggacatgaccggcgaagcagccatagaaaaaaaccgccatatcgcaaatgccgccgtatacggccggcccgaataccgttacaacggcgcactcaacctgcactatcgtcccaaacgcaccgacagcacgctgttgctcaacggcggcatgaaccttaacggggaagtcttgattgagggcggcaatatgattgtgtcaggcaggcccgtaccccatgcctacgaccaccaggccaaacgcgaacccgttcttgaaaacgaatggaccgacggcagcttcaaggctgcacggttcaccctacgaaaccatgcccgactgacagcagggcgcaataccgcgcatctggacggcgacataaccgcatacaatctgtccggcatcgacctcggctttatccaaggcaaaacaccggaatgctaccgctcctaccatagcggcagcacccactgcacacccaacgccgttttaaaagccgaaaactatcgtgcactacctgtaacgcaagtacgcggcgacattacccttaacgaccgttcagagctccgcctgggcaaagcacacctgtacggcagcatccgtgccggcaaagacaccgcagtccgcatggaagcagacagcaactggacactttcccagtccagccacaccggcgcactgacgcttgacggcgcacaaattaccctgaaccccgatttcgccaataatacacacaacaaccgcttcaacacactgaccgtcaacggcacacttgacgggttcggcacattccgattcctgaccggcatcgtccgaaaacaaaatgccccccccaaactggaaggggacagccgcggcgcattccaaatccacgtcaaaaacaccggacaagaacctcaaacaaccgaatcgcttgcacttgtgagcctcaatccgaaacacagccaccaagcccgattcaccctccaaaacggctatgccgatttgggtgcctaccgctacatcctccgcaaaaacaacaacggatacagcctgtacaacccgctcaaagaggccgaacttcaaattgaagccacgcgtgcggaacatgagcgcaaccaacaggcatacaaccaattacaggcaaccgacatcagcagacaggttcaacatgactctgacgcgaccaggcaggcactacaggcctggcagaacagtcaaaccgaacttgcccgcatcgacagccaagtccaatatctgtccgcccaattgaaacagacagacccgctgaccggcattctgacgcgtgcccaaaacctgtgtgccgcacaaggatacagtgtcgatatctgccgtcaggttgccaaagccgccgacacgaacgacctgacactcttcgaaaccgaactggatacgtatatagaacgtgtagaaatggccgaatccgaacttgacaaagcacggcaaggcggcgatgcgcaagccgtcgaaacagcccggcacgcctacctgaacgcactcaaccgtctgtcccgacaaatccacagtttgaaaaccgacgttgccggcatccgtatgccgaacctggccgaactgatcagccggtcggccaacaccgccgtttccgaacaggccgcctacaataccggccggcaacaggcgggacgccgcatcgaccgccaccttaccgatccgcagcagcaaaacatctggctggaaaccggtacgcaacaaaccgactaccatagcggcacacaccgtccctaccaacaaactaccaactatgcacatatcggcatccaaaccggcatcaccgaccgtctcagtgtcggtacgattttaaccgatgagcgcacaaacaaccgttttgatgaaggcgtatccgcccgaaaccgcagcaacggcgcacatctgttcgtcaaaggggaaaacggcgcactctttgccgcggcagatttaggctacagcaacagccgtacccgatttaccgattatgacggggctgccgtccgccgccacgcatgggatgcaggcatcaacaccggcatcaaaatcgataccggcatcaacctcagaccctatgccggcatccgtataaaccgcagcaacggcaaccggtacgtactcgacggcgcagagataaacagcccggcgcaaatccaaaccacatggcatgccggcatccgtctcgataaaaccgtcgaactgggtcaagccaagctgacccccgctttcagcagcgattactaccatacccgccaaaacagcggttccgccctcagcgtcaacgaccgtaccttactgcagcaagccgcccacggcacactgcataccctgcaaatcgacgccggatacaaaggctggaacgccaaacttcatgccgcttacggcaaagacagcaacaccgcccgccacaaacaggcaggaatcaaaataggctacaactggtaa

SEQ ID NO: 40057 - DNA, 1404 bp, Neisseria meningitidis
atgaatttccccaaaacagcggcctccctgctgctgcttctcgcctccctcgccgcacacgcgctcgataccggccgcattccgcaaaacgaaatcgccgtatatgtccaagagcttgacagcggaaaagtcatcattgaccaccgctcggatgtccccgtcaaccccgcctccacaatgaaactcgttaccgcgtttgccgccttcaaaaccttcggcagcaattaccgctgggcgaccgagtttaaaagcaacggtacggtaaacgacggcacgcttgacggaaacctatattgggcgggcagcggcgaccccgttttcaatcaggaaaacctgcttgatgctcaaaaacagttgcgcgaacaaggcatactcaatatcacgggacacctgatgctcgaccacagcctgtggggcgaagtcggcagccccgaccattttgaagccgacagcggttcgccgtttatgaccccccccaatccgactatgctgtctgccggtatggttatggtgcgcgccgaacgcaatgccgccggcagtaccgacatcctcaccgatccgcctttgccgcatattttcgcccaaaacaacttgaaaattaccgcctcccaagccgcctgcccttcggtcaaaaaactgatgcgtgcatctttttcggacaatacgctgaaattgcgcggcaatattcccgagagctgtttgggcaagcctgtcggtgtccggatgttcgcgcttgacgaactgatccggcaaagttttaccaaccactggctgctcggcggcggacggatttcagacggtatcggcatagccgacacgccggaaggcgcgcagacgcttgccgttgcacacgccaaaccgatgaaggaaattttgacggacatgaacaagcgttcggacaatctaattgcgcgttccgtcttcctcaaactcggcggcgacggcaaactgcccgccgtttccgaacaggcggcatctgccgtccggcgcgaacttgccgtgtcgggcatcgatattgcggatttggttttggaaacggttcagcctgtccagaaagaaagggtaacggcgagtgatggcgcaatgttggaaacggcttatttcagcccgtttgcacaagatttcatcgatacgctacccatcgccggcacagacgggactttacgcaaccgcttcaaacaaagcggcgggctgttgcgcttaaaaaccggcacgctcaacaatgtccgcgcccttgcaggttattggctgggcgacaaaccgatggcggtggtcgtcatcatcaacagcggccgcgccgtttccctgctgcccgacttggacaacttcgttgccaaaaacatcatctccggcggcgacggctggctggatgcgaaactgatgtgcaaagaacgccgagcctga

SEQ ID NO: 40058 - DNA, 446 bp, Neisseria meningitidis
atgcataaaattccaaaaggaacggcactggcattcgacttcggcgaagcgcgcatcggcgtggcacaaggagacgcggaattagggctatcccatcctttgagcaccgttaccggcggcagcaacgatgaaagtcgcggcatcgccagctggtcagatggcagccgcgttatttgtcgtcgactgcccgtgcataccgacggcacgaaacatgaatgacgcacctgtcgcggcagttcggaggcaggctgaacggcaggttcaatctccccgtctattgggttgacgaacggctgtcgtccgtctatgccgaaagcctgctttcggaagcacaggtcttcggcaaaaaacgcaaatcggtgctcgaccaagtggcggcgcaagccatcttgcacggttttttcgagggcggtccggcggaatgtttcaacgggcgtgagggttaa

SEQ ID NO: 40059 - DNA, 978 bp, Neisseria meningitidis
atgcaagaaaacccgaccgtgtggctgttcgacctcgacaacacgctgcacgatgccgacgcaggcatcttcacactcatcaaccgcgctatgacacgctatatggcacgccgcctcaaactctccgaatccgccgcgtccgacctgcgtcaagactattggcaccgctacggcgcaacgctcgccggactgcaaatccaccatcccgaaatcgacatcgccgaatttttgcgcgaaagccatccgattgacgaggttttgacccgtctgcacggtatgccggaaacacaaaacaccctgagccgcctaaaagggcgcaaggcggttttttccaacggcccgtcgttttacgtccgtgccgttgtcggcgcactcggtttggaaaaccgtttcgacgcgcttttcggcacggatgatttcgggctgctgtacaaacccaatccgcaagcgtatctcaatgtctgccgcctgttggacgtaccgcccgaatgctgcattatggtggacgacagcgcggacaacctgcatcaggcaaaagcattgggcatgaaaaccgtccggttcggtgcaaaagtgcacgacctgccctttatcgatgcttccgtaagcgatatggcgcaactggctcggtatgcagaaactttgtcagaacaccgccaaaatcattacaatacccacaaccccccgaaaatacgaaagaatgttatgcgtaaaaccttccttatcctgatgactgccgccgcccttttgtcgggctgcgcgtgggaaacttatcaagacggcaacggcaagaccgccgtccgtcaaaaatatcccgccggcacgcccatttattaccaagacggcagctactcgaaaaatatgaactacaaccaataccgtcccgaacgccatgccgtgttacccaaccaaaccggcaacaacgccgacgaagagcatcgccaacactggcaaaagcccaaatttcaaaaccgataa

SEQ ID NO: 40060 - DNA, 1041 bp, Neisseria meningitidis
atgaaagcaatggtttatcacggcgcaaacgacatccgttttgaagaaaaaccccgtccgcagattatcgatccgaccgatgcggtggtgaaaatcgtcaaaaccacgatttgcggtaccgatttgggtatttggaaaggcaaaaaaaccgaagtcgccgacggtcgtattctcggtcatgaaggcatcggtattgtagaagaagtcggcgaggctgtaaaaaacatcaaagtcggcgataaagtcattatttcatgcgtcagcaaatgctgtacttgcgacaactgcaaaatccaactttattcgcattgctgcaacggcggctggattttgggctacatgattgacggcacgcaggcagaatacgtccgcacgccttatgccgacaacagcctcgtgccgctgcccgacaacgtcaacgaagaagtcgccctgttgttgagcgacgctttgccgaccgcacacgaaatcggcgtgcaatacggcgatgtcaaacccggcgacaccgtattcatcgcaggtgccgctcctgtcggtatgtccgccttgttgaccgcccaactgtatagccccgccgccattatcgtgtgcgatatggacgaaaaccgtttgaaactggcgaaagagttgggcgcgacccataccatcagccccgcctcaggcgatgtctccaaacaagtttttgccattgtcggcgaagacggcgtagattgtgccatcgaagccgtcggtattcctgcgacttggaatatgtgccaagacatcgtgaaaccgggcggtcatatcgccgttgtcggcgtacacggccaatccgttgatttcaaactggaaaaactctggattaaaaacctcgccatcactaccggtttggtcaatgccaatactaccgaaatgctgatgaaggcaatttccagcagctcagtcgattacatcaaaatgatgacccaccatttcaaattcagcgaattggaaaaagcctacgacgtgttcaaacacgccgccgaaaaccaagcgatgaaagtggttttggaagcggattaa

SEQ ID NO: 40061 - DNA, 999 bp, Neisseria meningitidis
atgctcgccgaagaagttttcggtttcggtatctacaaagaatccaaaggctcgggcggtcgtttctatgagcgctgttggttgatgggttcggaagacgtcctatacggtcgcgtccattttggcggacaaaacaataccatccttttcgaactgaccggcaccggttgcggcgtcgcaaaagaaggctgggaatcacgacttttcgcattcctgactaatgcaatccgcccaaaaatcacacgcgttgacatcgcaaaagactttttcaacggcgaatacagcccgaaccaagcccgtgaagaccgaaataaaggtatgtttacctgtcatcacgtcaaaccaaaaggcgaatgtttggggtcagattgggaagaagacgatgaagccaaaatgaccaaaggcaagacctatggtatcggctcccgtgaatcgtccaaatatgtccgcgtctatgaaaaaggcaagcagttgggcgataaaacaagcacatggacgcgctttgaaattgaattcaaagcaaaagacatcgttatcccttttgaagttttgcagaatccgggcgaatatttcggcggcgcatatccgatttgcgaacgattcgtccaaaaggcaacgcgcatacacgcggttaaggaagataaggtcatttcagccgaccgttaccttgaatgggaaaaacagttcggacgtgcggcaaacggtctgaaattcatttttcccgaattggacaaagccaaactgtttgaactgattgagccgagtcatcacaagctgcccaagtctttgactcccgaagcctacgactgcgcctttttgaaagctcaagccattcatgaacagcccgcattcaaaccgtacaaagacccttactatatgtacgaatattacgagaatcttgaaaaacagcttgaacagcaaaaacacgtcaacaatgaagaaagctataacaacttcatttacgacaaattcgcaagactaccgatttcatgggcttaa

SEQ ID NO: 40062 - DNA, 510 bp, Neisseria meningitidis
atgggatcaaaattctttttcctgctgctgcgttttgccggttcggggttgccgccgtcacatatgcgcggcatcggcatcgtcggcagacgggtgcgcggttttttggcgcggcgggtttctccgcatatcggacgcggggtcaatatccaacgcggggcgtatgtgtttccggatacggttttgggcgacggctcgggcatcggggcaaactgtgaaatctgccgtgggctggtggtcggcaaaaatgtgatgatggagccggaatgtctgttttattcaaataaccacaagtttgaccgcaaaaaacgctttgagggctacacggaaatccgtccgattacgttggaggacgatgtctggccggggcacagggtgattgtaatggcgggcgtaaccgtcggacgcggttcggtcgtgggcgcaggcgcggtggttacaaaagacattccgccctactctttggcggcaggcaatccggcagtggtgaaaaagaatctgccggaaggt

SEQ ID NO: 40063 - DNA, 429 bp, Neisseria meningitidis
ttgaatatgtattgggaacgcggtctgcacatgtataaggcaagtgccgtcgtgccgacgggatatgtacgggttgggaataccgcgccgctggtcggcgaagacacgcaacggtatgcctctttttggggcgacggctacgacgtgtaccgtcagttgagatggcagcagatatccgaaaaacagagaaaggcattcaaaaaagccgctaaaagcaaaaagaccgtgatgtttgccggacgggaatacggcatatccaaacagaatttgagcgatgtttgggatgattttgaagacgcgatggaattgaaggcgtttccctgcctgtcttcgctgtttctgaccaagtggcataaaaatctatatgatagtggattaacaaaaaccagtacggcgttgcctcgccttagctcaaagagaacgattctc

SEQ ID NO: 40064 - DNA, 267 bp, Neisseria meningitidis
ttgtactgtctgcggcttcgccgccttgtcctgatttttgttaatccactatatgctgatgccggagacgtatattgcgtctataacatcagactgaagcagtacactgcctgccaggttacccgagttgaagaacacggtggcaaaaaaacacgtgcgaccctgctggctttggactggcagggcaacaaaccgcttggggcggcggaactggcggatttgaaaccgctttacaaagacttaaagaataatattggaaatattgta

SEQ ID NO: 40065 - DNA, 345 bp, Neisseria meningitidis
atgaataagcaatatccgaaaattaactatatcggtaataaagagaaaatagcttcctagatttgtgaccagcttccgtctgatgtagatacagttgcagatgtatttagtggaggctgttcctttgcctacgaagccaaaaaacgcggctatcgtgtgattactaacgatattttggcaattaattaccaaattgctttagcattaatagaaaacaaccatgaaacattaaatgacgatgatgtcgcaatgattttttcaggcagcccgcatgccggttttatgagtcagcgttatgccgaaaaattctattttcacgatgaataccaacaacttgatttgtaa

SEQ ID NO: 40066 - DNA, 1035 bp, Neisseria meningitidis
atggggcgtgtgtcgtatttgtgcgtcgatgcggcggagcaggctttgacggatgccggtttgctcggagacgaaagcattactgacggacgcatgggcgttgcctgcggctcttccagcggcagcaccaaagacatcggcgatgtaggcgaattgttgctgaccggcatgtcgcgcaacttcagtgccaacacctatgtgcgtatgatgccgcacaccgccgccgccaatatcggcatctttttcgggctgaaaggacgcatcatcccgacatcgagcgcgtgttcgtccggcagccaaggcataggttatgcctacgaagccatcaaatacggtctgaccgatatgatgctggcgggcggaggcgaagaatttttcccgtccgaagtgtatgttttcgactcgctttatgccgccagccgccgcaacggcgaaccggaaaaaaccccgcgcccatacgacgcgaaccgcgacgggctggtcatcggcgaaggcgcggggattttcgtgctggaagaattggaacacgccaaacggcgcggtgcgaaaatttacgccgaactcgtcggctacggagccaacagcgatgcctaccatatttccacgccccgccccgacgcgtaaggcgcaatccttgcctttcagacggcattgcaacacgcaggtcttgcgcccgaagacatcggctggattaatctgcacggcaccgggacgcaccacaacgacaatatggaaagccgcgccgttgcagcggttttcggcaacaatacgccctgcacgtccaccaagccgcaaaccggacacacgctgggcgcggcggacgcaatcgaagccgcgttcgcgtggggcattgccgaccggcaaagcaatcccgaaggaaaacttccgccccggctttgggacgggcagaacgaccccaacctgcccgccatcaacctgaccggcagcggcagccgctgggaaaccgaaaaacgcattgccgccagctcatcgtttgccttcgggggaagcaactgcgtcttaatcatcggatga

SEQ ID NO: 40067 - DNA, 3045 bp, Neisseria meningitidis
atgttttggatagttatgatcgttattttgttgcttgcgcttgccggcttgttttttgtccgcgcacaatccgaacgcgagtggatgcgcgaggtttctgcgtggcaggaaaagaaaggggaaaaacaggcggagctgcctgaaatcaaagacggtatgcccgattttcccgaacttgccctgatgcttttccatgccgtcaaaacggcagtgtattggctgttcgtcggtgtcgtccgtttctgccgaaactatctggcgcacgaatccgaaccggataggcctgttccgcctgcttctgcaaaccgtgcggatgttccgaacgcatccgacggatattcagacagtggaaacgggacggaagaagcggaaacggaagcagcagaagctgcggaggaagaggctgccgatacggaagacattgcaactgccgtaatcgacaaccgccgcatcccattcgaccggagtattgctgaagggttgatgccgtctgaaagcgaaatttcgcccgtccgtccggtttttaaagaaatcactttggaagaagcaacgcgtgccttaaacggcgcggctttaagggaaacgaaaaaacgctatatcgatgcatttgagaaaaacgaaacagcggcccccaaagtccgcgtgtccgataccccgatggaagggctgcagattatcggtttggacgaccctgtgcttcaacgcacgtattcccatatgttcgatgcggacaaagaagcgttttccgagtctgcggattacggatttgagccgtattttgagaagcagcatccgtctgccttttctgcagtcaaagccgaaaatgcacggaatgcgccgttccgccgtcatgcagggcaggggaaagggcaggcggaggcaaaatccccggatgtttcccaagggcagtccgtttcagacggcacagccgtccgcgatgcccgccgccgcgtttccgtcaatttgaaagaaccgaacaaggcaacggtttctgcggaggcgcggatttcgcgcctgattccggaaagtcggacggttgtcgggaaacgggatgttgaaatgccgtctgaaaccgaaaatgttttcacggaaaccgtttcatctgtgggatacggcggtccggtttatgatgaaactgccgatatccatattgaagaacctgccgcgcccgatgcttgggtggtcgaaccacccgaagtgccgaaagttcccatgcccgcaatcgatattccgccgccgcctcccgtatcggaaatctacaaccgtacctatgagccgccgacaggattcgagcaggcgcaacgcagccgcattgccgagaccgaccatcttgccgatgatgttttgaatggaggttggcaggaggaaaccgccgctattgcggatgacggcagtgagggtgcggcagagcggtcaagcgggcaatatctgtcggaaaccgaagcgttcgggcatgacagtcgggcggtttgtccgtttgaagatgtgccgtctgaacgcccgtcccgccgggcatcggatacggaagcggatgaaggggcgttccaatcggaagaaaccggtgcggtatccgaacacctgccgacaaccgacctgcttctgcctccgctgttcaatcccgaggcgacgcaaaccgaagaagaactgttggaaaacagcatcaccatcgaagaaaaattggcggagttcaaagtcaaggtcaaggttgtcgattcttattccggccccgtgattacgcgttatgaaatcgaacccgatgtcggcgtgcgcggcaattccgttctaaatctggaaaaagacttggcgcgttcgctcggcgtggcttccatccgcgttgtcgaaaccatccccggcaaaacctgtatgggtttggaacttccgaacccgaaacgccaaatgatacgcctgagcgaaatcttcaattcgcccgagtttgccgaatccaaatccaagctgacgctcgcgctcggtcaggacatcaccggacagcccgtcgtaaccgacttgggcaaagcaccgcatttattggttgccggtacgaccggttcgggcaaatcggtgggtgtcaacgcgatgattctgtctatgcttttcaaagccgcgccggaagacgtgcgtatgattatgatcgatccgaaaatgctggaattgagcatttacgaaggcatcccgcacctgctcgcccctgtcgttaccgatatgaagctggcggcaaacgcgctgaactggtgtgttaacgaaatggaaaaacgctaccgcctgatgagctttatgggcgtgcgcaatcttgcgggtttcaatcaaaaaatcgccgaagccgcagcaaggggggagaaaatcggcaacccgttcagcctcacgcccgacaatcccgaacctttggaaaaattgccgtttatcgtggtcgtggttgatgagtttgccgacctgatgatgacggcaggcaagaaaatcgaagaactgattgcccgcctcgcccaaaaagcccgcgcggcaggcatccatttgattcttgccacgcaacgccccagcgtcgatgtcatcacgggtctgattaaggcaaacatcccgacgcgtatcgcgtttcaagtatccagcaaaatcgacagccgcacgattctcgaccaaatgggcgcggaaaacctgctcggtcagggcgatatgctgttcctgccgccgggtacggcctatccgcagcgcgttcacggcgcgtttgcctcggatgaagaggtgcaccgcgtggtcgaatatctgaagcagtttggcgaaccggactatgttgacgatattttgagcggcggcggcagcgaagagctgcccggcatcgggcgcagcggcgacgacgaaaccgatccgatgtacgacgaggccgtatccgttgtcctgaaaacgcgcaaagccagcatttcgggcgtacagcgcgccttgcgtatcggctacaaccgcgccgcgcgtctgattgaccagatggaggcggaaggcattgtgtccgcaccggaacacaacggcaaccgtacgattctcgtccccttggacaatgcttga

SEQ ID NO: 40068 - DNA, 918 bp, Neisseria meningitidis
atggaaaaagcagaacatttgaacagcagccggttcgtcaatctagtcaaaagcggcggcggcagctatgtggagggcagctaccatttcgatactttgtccaacggcatttccatccacggcggcacagtaacggcacggtgtgatttttgcagcagccgcctcgccgaaccttatgtgtcgttcgtgctcttgctggaaggcagtttggacttcggcatcaaccgctgccgcttccaaatcgatgcggacggcggcaagattgtcctaattgctgtcggggaagaagtcctgttcagccgctatctttaccgaggcggcaaaacggtcaaaatgacaattaaaggtatggaacaatggctgctgcgtccggaatacgcgcgtttcgcacccctgctttaccgcgaaccggtcaggatataggatttgcccccgaacctgcgcggcttggcggcatcctgcctgcaagccgtcccaaaggggcatttgggcaaaacattacgccgcgaggcagacgtgttgcggctgctgtcggacttgtgggacacggtttcagacggcatcgggccggcggtggggcaaacggcggaagcagacgctatgccgtctgaagacttcagccgcaccctaaatgccgcgttcgacggcggcgcacaccaagtcaaccgactgacagatgcgctgaacatcagcgaaaggacgctgcaacgccgtatgcgcgaccatttcggcattaccgcaagcgagtggctgcaccacaaacaaatgcagcacgcgctctatctgttgcaaaacggggggaaaagcataggcgaaaccgcatatttatgcggctaccgccacgtttccagctttactcaggcattcaggcaatatttcggcagcacgcctgcggaaaccaaaaaagaaaaccgataa

SEQ ID NO: 40069 - DNA, 1808 bp, Neisseria meningitidis
atcatgaaacggcagtcggacgagctggcggagaagatgccgaaaaccctgccccaagtcagaccggggacggcgatgtcggctcaggcactggctgaagcggccaagctgttgaacgagaaacaacggtcggtggcggatgcgcgatgtgcggtggtggcggcggtattggggattaaatacgaatacgattgctctgccaaggctgcggtggctcagtttttgggcttgctggcagaaggtaaattggacgcggtcacgcttgggaacttggaaaaggccaatgaccgcagccggtcggcgaaggttggcgaacgtactttagacggctggatttctgcttatttgaaagcggaaaacgcgacagagcggttggttgctttggctccgaagacgacgaaggcggttaagccgattgagagctacggttggttgccgatgtttatgcagtttcacagtatcccatccgagccgaaactggcgcacagctaccgccggtttgtgcagtgggcggaagcggaaaatatgccggtcaatgatgtgcctagcttgagtatggtgcggcgcgtttggggcaagctgccgctgattatgcaggagcgtggcaggaaaacgggggcggcttataaatcgctgctgccttatgtgaaacgtgattggggggctttgaagccgaacgatgtttggatcggcgacggccacagctttaaggcgaaggtggcgcaccctgtacacggcagatcgtttaagccggaagtgacggtgattattgatggttgtacgcggtttgtggtcggtttttcggtgtcgttggctgaaagttgtgtggcggtatcggatgctctgcgtatcggggtcaagcactttggtttgccgattatctactactcggataacggcggcggccaaatcggcaagacgatagaccatgaaatcacgggtatcacgtcccgactgggtatccggcatgaaacgggtatcgcgggcaacccgcaagggcgcggcatcattgagcgatggtggaaagacaatctgattgagatggcgcgacagtatgagacgtttacgggcgcggggatggacagcagcacgaagaacctgatgtaccgcaagatggaaagtgcttttaatgctttggaaaaaggcaaggatttgacggaggaacaacagaaatatttgaaaaactgccgagctggtcgcgctttatcgcggatgtggccaagtgtatcgacgaatacaacaaccgcccgcacggcgagctgccccgacatcctgacggcgggcattattcgccgaaggcttatcgggaaatgaggctggaacaggacggtatcgcgccggatatgttgtcggcagaagagctggcgacgatgtttatgccgcaagaggtgcgaaaggtacagcgcggttggctggatttgttcaacaactcttatttctcaactgagctggcggagtatcacaaagacgaggtacgggtcagctacgatttgagcgatgcgtcggcggtcaatgtgtttgatatggacggcaagtttatcactaaggcgcaggccgacggcaatacccgcgaggctttcccgacggctcgtatcgaccaactggcggaaaaacgccgaaaaggcaaaatcaagcgggcggaaaatgcaatcaagctcgcaaacgcggaagtcaatccggcactggaacaggcggcagcttgggacgagctgggacatttgggcggaaacgacatcgaggcggagtatgcggtattgccgaaaacgggcacagacgattttgtgttgtttgaggcggatagaagttaa

SEQ ID NO: 40070 - DNA, 321 bp, Neisseria meningitidis
gtggattggatgggcagtctgttcctgccgggtggcgcactgttgtttctgagcgtggtttcgaccactttacccgcacgtttgggaatgcctttgctgctggtttctcccgccggcgtgttggacggggcggcggaagccttggcgattgcggcgttcctgatgctggtcgcgcgtccgccggcagtgttcggcggtttgtggaaattcaattacagcctgcgtgaaaaggcgtatagccgaatcgaaatgcagtccgacaccgtgcttcaggcggggatttggcgtggtacatcctgcccgacggcaaggtcgatatag

SEQ ID NO: 40071 - DNA, 570 bp, Neisseria meningitidis
gtgaattataaaatatacgatggtgcaaagattattaaaaaagaaaatttatcaattggggattattctcaaattgatgattttgtattttttaattgtggagagaaaagtattttaggaagttttgttcatatatcatcatttaccagtattattggtggtggagaattttatatggatcatttttcaggattaagcgcagggtgtagaattattaccggtagcgatgattttatgggggggggggggttaaccaatccaacagtcccatctaaatatactaatgttaaaaaatctagtgttagaattggaaaacatgcaattttaggaacaaatgtaacagtattaccaggcgttactattggtgatggggttgctgttggagcaggggctatagtgagaaaaaatcttgagccgtggactatttatgtcggggtagattgtaaaccactgaagcgcagatcacaagataaaatattggagttagagaaacatcttgtagcagaatttaatctagatttatgtcctataatcccatccccgaacctgcccaaaccaaaggaaacgcga

SEQ ID NO: 40072 - DNA, 333 bp, Neisseria meningitidis
atgaaagaattaactattaatgatttaaccctagtttcgggtggatttgaagttggtcgtgattatattgaaatagctccagttgtaggtacagcaggtggcgttgcctcttctgtgagagcagcttcaatgactggagaagctggagcaattcttactcgttcaggagtaacaggattacgtgctggagtggtagctattccattgttagcctacaatggtactgtatggcttaatagaaataccaaattacaagataatttaggtagattaatagataaagtaactggcctggatcaatcaggcaatgattatggcgatgggacaagttat

SEQ ID NO: 40073 - DNA, 174 bp, Neisseria meningitidis
atgggggaatacctggaatttgaagaaagcggtacgaaaattaccgttgaaatcggcagcgcgtggcattttaatgaaactataagaaatattaatacacatttaagaggtacgaaacttccaggttctaactggagagttcaagataaggggcattttcatctttggaaaaga

SEQ ID NO: 40074 - DNA, 3201 bp, Neisseria meningitidis
atgcgaacgaccccaaccttccctacaaaaactttcaaaccggctgccatggcgttagctgttgcaacaacactttctgcctgcttaggcggcggcggcggcacttctgcgcccgacttcaatgcaggcggcaccggtatcggcagcaacagcagagcaacaacagcgaaatcagcagcagtatcttacgccggtatcaagaacgaaatgtgcaaagacagaagcatgctctgtgccggtcgggatgacgttgcggttacagacagggatgccaaaatcaacccccccccgaatctgcataccggagactttacaaacccaaatgacgcatacaagaatttgatcaacctcaaacctgcaattgaagcaggctatacaggacgcggggtagaggtaggtatcgtcgatacaggcgaatccgtcggcagcatatcctttcccgaactgtatggcagaaaagaacacggctataacgaaaattacaaaaactatacggcgtatatgcggaaggaagcgcctgaagacggaggcggtaaagacattaaagcttctttcgacgatgaggccgttatagagactgaagcaaagccgacggatatccgccacgtaaaagaaatcggacacatcgatgtggtctcccatattattggcgggcgttccgtggacggcagacctgcaggcggtattgcgcccgatgcgacgctacacataatgaatacgcatgatggaaccaagaacgaaataatgtctgcagccatccgcaatgcatgggtcaagctgggcgaacgtggcgtgcgcatcgtcaataacagttttggaacaacatcgagggcaggcactgccgaccatttccaaatagccaattcggaggagcagtaccgccaagcgttgctcgcctattccggcggtgataaaacagacgagggtatccgcctgatgcaacagagcgattacggcaacttgtcctaccacatccgtaataaaaacatgcttttcattttttcggcaagcaatgacgcacaagctcagcccaacacactgaccctattgccattttatgaaaaagatgctcaaaaaggcattatcacagtcgcaggcgtagaccgcagtggagaaaagttcaatggctccaaccattgcggaattactgccatgtggtgcctatcggcaccctatgaagcaagcgtccgtttcacccgtacaaacccgattcaaattgccggaacatccttttccgcacccatcgtaaccggcacggcggctctgctgctgcagaaatacccgtggatgagcaacgacaacctgcgtaccacgctgctgacaacggctcaggacatcggtgcagtcggcgtggacagcaagttcggctggggactgctggatgcgggtaaggccatgaacggacccgcgtcctttccgttcggcgactttaccgccgatacgaaaggtacatccgatattgcctactccttccgtaacgacatttcaggcacgggcggcctgatcaaaaaaggcggcagccaactgcaactgcacggcaacaacacctatatgggcaaaaccattatcgaaggcggttcgctggtgttgtacggcaacaacaaatcggatatgcgcgtcgaaaccaaaggtgcgctgatttataacggggcggcatccggcggtagcctgaacagcgacggcattgtctatctggcagataccgaccgatccggcgcaaacgaaaccgtgcacatcaaaggcgatctgcagctgggcggcgaaggtacgctgtacacacgtttgggcaaactgctgaaagtggacggtacggcgatgaccggcggcaagctgtacatgtcggcacgcggcaaaggggcaggctatctcaaccgtaccggacaacgtgttcccttcctgagtgccgccaaaatcgggcgggattattctttcttcacaaacatcgaaaccgacggtggtctgctggcttccctcgacagcgtcgaaaaaacagcgggcagtgaaggcgacacgctgtcctattatgtccgtcgcggcaatgcggcacggactgcttcggcagcggcacattccgcgcccgccggtctgaaacacgccgtagaacagggcggcagcaatctggaaaacctgatggtcgaactggatgcctccgaatcatccgcaacacccgagacggttgaaactgcggccgccgaccgcacagatatgccgggcatccgcccctacggcgcaactttccgcgcagcggcagccgtacagcatgcgaatgccgccgacggtgtacgcatcttcaacagtctcgccgctaccgtctatgccgacagtaccgccgcccatgccgatatgcagggacgccggctgaaagccgtatcggacgggttggaccacaacgctacgggtctgcgcgtcatcgcgcaaacccaacaggacggtggaacgtgggaacagggcggtgttgaaggcaaaatgcgcggcagtacccaaaccgtcggcattgccgcgaaaaccggcgaaaatacgacagcagccgccacactgggcatgggacacagcacatggagcgaaaacagtgcaaatgcaaaaaccgacagcattagtctgtttgcaggcatacggcacgatgcgggcgatatcggctatctcaaaggcctgttctcctacggacgctacaaaaacagcatcagccgcagcaccggtgcggacgaacatgcggaaggcagcgtcaacggcacgctgatgcagctgggcgcactgggcggtgtcaacgttccgtttgccgcaacgggagatttgacggtcgaaggcggtctgcgctacgacctgctcaaacaggatgcattcgccgaaaaaggcagtgctttgggctggagcggcaacagcctcactgaaggcacactggtcggactcgcgggtctgaagctgtcgcaacccttgagcgataaagccgtcctgtttgcaacggcgggcgtggaacgcgacctgaacggacgcgactacacggtaacgggcggctttaccggcgcgactgcagcaaccggcaagacgggggcacgcaatatgccgcacacccgcctggttgccggtctgggcgcggatgtcgaattcggcaacggctggaacggcttggcacgttacagctacgccggttccaaacagtacggcaaccacagcggacgagtcggcgtaggctaccggttctga

SEQ ID NO: 40075 - DNA, 255 bp, Neisseria meningitidis
atgagcggacatgactatgcggtagaacttgaagaagcgcgagagattctgaacagccttcgaaaagcctacaaggaacatgcggcaggcaggggcatgaccaagcggtacaaaatcaaagaccgcgaaatggagttttccagccttgccgatttgttgaagcagatacggttctggcagcaggaaatcaagcggctggaagcggcggcgggtgtttccccgcgccgttcaggccgtatcatcacgcgattttag

SEQ ID NO: 40076 - DNA, 294 bp, Neisseria meningitidis
ttgcacaaacaagtgcaacatattactacaaagctattttatttcaaaataactgatatatcttttttcatagattttaaatttcatatttttaatattttaggaattttattccaaagaaaaagaaacagattgataaaaacaatacccgccattcattcggacaaaaccgcacggaacatccgttttcccatttccacgacaatccggtacagaacaccccgctgccgattccgcctgcacatccggcaaaatttcatacgcaaggaaaatgttgaaaacaaaaagaactaa

SEQ ID NO: 40077 - DNA, 375 bp, Neisseria meningitidis
atgattatggaccaatactatatggagttaaagaataagttatctaacagaccaatcctactggataatactaatgattttctttttgttttagtaaatacagtgaaagctatgatagaaaatactgataaaagtcagctttcagagttagataaaattttagacggtgtcacaagtcaagaattgaaacttgcctatgatttttgtcaagggaaattcggtcaagcaggtttttcttatcgtaggcacccgaattatttttatttgtccagtttaattgcgacttttccagaatttgagttgtctaaagcagaccgagattacctcaaaggaatcataaattttgataactaccttttatatgagttagattag

SEQ ID NO: 40078 - DNA, 234 bp, Neisseria meningitidis
ttgaaacgattggaggacatgattatgggtttttggaatggtgtggcaaaagcagcaaaagcagtgggagagggaatgattgaagccggcaatgagcataaggcgttgaaaatggaatatgcggagaaatcaagtgaggagctgcatgaaatcgtcaagagtgatggtttttttaaaaattccacacgggagaaaagtgcggcttatgctattttaaaagagcgtggcgaggtg

SEQ ID NO: 40079 - DNA, 381 bp, Neisseria meningitidis
ttgtactgtcttcggcttcgtcgccttgtcctgatttttgttaatccactatacatcatcgctactaccgttccggcgcaacaggcattcctcgatgccgccgaactgatgcaatggagtatagaaaccgaagggctgggcttgaacgtcatctcgcacaagatactcggcaaagaccacgcccaagtcgaatttgaagcctacttccgagacggacaacaccgatccgcgcatcacgaactgtccggcttcgtcaacatcggcggacaatggtattttatcgatcccaccgttccgcatcctgcgatgaaacaaccctgcatttgcggatcgggcaaaaaattcaaagcctgctgcggcaaatatctgaaacctgtcgca

SEQ ID NO: 40080 - DNA, 237 bp, Neisseria meningitidis
atgcgtattttggatatttttaaaaacccagcgacaggcaatgtgtcgcactcgaaactgtgggcaaacgttgcctgcgcggcggggacggttaagtttgtgatgctgcccgacccgtcggcggagatttgggcggtgtatttgggcattgtcggcggctatgcggtggcgcgttcgttggtcagcgtcaaacgtcaggaggtcgagaatgaatctcgtgaaactgctggcgaataa

SEQ ID NO: 40081 - DNA, 228 bp, Neisseria meningitidis
atggcaaaaatcaaaattatcccgacccgtagttttttcgatggtgaacagacgtttgccacagggaaaaaatattcggtggacgaatctgcggcggctgtctatatccgcgaaggttgggcggcagaagcgcctgccaaagaggccgaatcccctgttgccgatggcggcgaagctgaagatagcggtaacgcatccggtgagggcggcgaggacggcagtgtttaa

SEQ ID NO: 40082 - DNA, 189 bp, Neisseria meningitidis
atgaacacgaatcaagatacgattccatttggcggcaaccttgtgatttgctgttcgacgggaaacggcggggacgggcggttttcttgtctgattaccaatcagataccggatttaaatcttgtcagaagcgggcaggcgttcccgatgttcatttatgagtacgaaactagagaaaaaaggaaagcc

SEQ ID NO: 40083 - DNA, 198 bp, Neisseria meningitidis
gtggataccgttggcagtttagcgattggttatgccacaggcggcaatgctggggcttttactggtgcgaatgcagattggaataatcggcagttgcattcgagtgaatataaattagcagaacaatatgcagacatagtagcttctcgtctaaacatttcaaaagaaacttgtacggtaatttatttgggaataaac

SEQ ID NO: 40084 - DNA, 480 bp, Neisseria meningitidis
atgacacacataagctcgccccgtaacgaatttatacgcggcatcaaagaaagttcgcccatgctgatcgggcttttgccttgggcattaatactcggtatgcagggtggacaaaaaggcatgagctggctggaaatgttgttgatgaccggtatgaacttcgccggcggctccgagtttgccacggtcaacctgtgggcggaacctctgccgatactgcttatcgccaccgtaacctttatgattaattctcggcatatcctgatgggggcggcacttgccccgcacctgaaagaaataccgctgaaaaaagccgtgcccgcactgttttttatgtgtgatgaaagctgggcgatggcattctccgaaatccaaaaacggaaggcagccggtttgcccgcattcaatatgcctttttatagtggattaacaaaaaccagtacagcgttgcctcgccttagctcaaagagaacgattctc

SEQ ID NO: 40085 - DNA, 360 bp, Neisseria meningitidis
ttggaaaggaaaaataacatcattgaactatccattgaggatctggagctaatttatggcggaggcttaggggagagaatccttgaaggaggagcaaatggtgcacaaataggaggatcaattggtgcaggtattggtctgggtgccggtatagtttctggtggtattcctgccggaccggctattattctcggtggcacagttggtgctgctgttggtgctgcaactggtatgggtgttgcagcatatgagtattaccaagaaactcagcccaaagggacagtaacggtcggtccgatttctgcttttgctgtggacaaatcaggaaacggctacactgacagcacaaattactgctga

SEQ ID NO: 40086 - DNA, 243 bp, Neisseria meningitidis; identical to SEQ ID NO: 37332

SEQ ID NO: 40087 - DNA, 234 bp, Neisseria meningitidis
atgttgcgtgtccaaaaatgggggaactcggcggccgtccgactgcctgccgacatgctgaaacaattggattttaaaatcggcgacgctttggtagcggaagtacataacggcgaactccgtgtgcgtgctgcccgacgtttccgcttggcagacttgcttgccgaaatggaagaaaccccgccgcgcgtagaaggctgggaaatcttggatgatgtcggcaacgaggtcgtc

SEQ ID NO: 40088 - DNA, 207 bp, Neisseria meningitidis
atgaatattattggtaaattgaaagaagctgcttcctattttcttacaaaattgattggagaaaatcctagtaatgagcaggtaaaccgcgcacttatacagatgccaaatgttcgtccgatacacacctatccacgcccaaatttaagaaactcaggcgtggcagccgcgaaacgcgcggcgcgcaaacgcaagaatcgtcgttaa

SEQ ID NO: 40089 - DNA, 204 bp, Neisseria meningitidis
atgaatatactatccataaataatcaaaactcaactatttcactaactcaagatgaagtttttgttttacgagctatcttgaatgagatatatgcgggcgtatgtgtagattcaagagaatttgaaaatgtatctggtgttagaaaacatgaagtagataatttacaacaacagtttgctggaatttataaaaaaatgacaact

SEQ ID NO: 40090 - DNA, 441 bp, Neisseria meningitidis
atgaagtggttattaaatatgataatgagacctattaaatttagtatggtaaatacgttattatttattgttatatgtagttcattttttgatctgctcgttcaattatgtacaattttatttcatagccaaaaaatatactttattacattatttttattatttatttttaattttgttacaaaatctatctatatggcaattatttatcctattttatatttttttacgataaaaaaatattatccttactctaggaaagtgataattctattatcattagcattatctatatattttagttttatggacttttactttttttccatatattcagataaccttagctatgaaacggagtctttacatttatacatccctattattattaattttttctcacttttagtttctaattttattttatcttttatcaacaag

SEQ ID NO: 40091 - DNA, 195 bp, Neisseria meningitidis
atgtcctatgatttatcgaaacgacttgtaatcggcttagcatcaagtgccctattcgacttatccgaatcggataatatatttagaatggaaggggcagaaacctataggcaatatcagagagaaaaacaaaaccatcccctaaaaaaggcgttgtctttccatttattaaaaaacttctgtcaatcaatgaaa

SEQ ID NO: 40092 - DNA, 396 bp, Neisseria meningitidis
ctatgttcgagtaattcttattctgaacctgtaagattagaaagatcacaaattaaatttcaatcaagtaataatttaaaatcaagtggttttaaattagattcaagttctaagagttttgccaaattcatagaagcggcaaattttgagcacatccctacgggcgcaaaagcccgaatcaacgccaaaataaccgccagcgtttcccgcgccggcgtattggcgggggtcggcaaacttgcccgcttaggcgcgaaattcagcacaagggcggttccctatgtcggaacagcccttttagcccacgacgtatacgaaactttcaaagaagacatacaggcacgaggctaccaatacgaccccgaaaccgacaaatttgcaaaggtctcaggctaa

SEQ ID NO: 40093 - DNA, 303 bp, Neisseria meningitidis
atgacttgggtcggaggctcaggtaatgcgtaacaaagctcatattattgcgaaatttgcgaatctgcagggcttaacgatacgggaaatcctgataaatctttaggattgccaaacaatacgttcagtaatccgcctggttggggagctacaatcggagctttagcaggtagccgcatagggatgcctgaatttggtacgtttgcgagccatgccattgaaaatttcgactggtcatggtatcgacgttatagggaaattgccgaaacgattgaacgagaatattcaggcggtttgccttaa

SEQ ID NO: 40094 - DNA, 219 bp, Neisseria meningitidis
atgggcggcaaagtgcagcacaataaaggcaaaatacgcgacaatgctttaaaagccttagtgaaatccgatttgttccggcacaaggtggaacggaaaaggaaaggcaaaggcagctacaacaggcaggaagcgaaaaaatggcgggacggttttgatactgtcccgccgtttttatgccttaaacgtggaagctttcgccgcagccgcaggagtctt

SEQ ID NO: 40095 - DNA, 216 bp, Neisseria meningitidis
atgagtatgcccgaaatgcccaaatggtacgacgatgacggacagatcgtgtcctgtaccgaaaaggtcaaagtgatgtccgaaaatatggccgagctgtatcagacggcacaagacgcgtttgaagacgcgctgctgatgggttgcggcgaacgtcagttgcgcgattacctgctcgcgctgattgaaggtttggaaaatccctaccgcaaagtc

SEQ ID NO: 40096 - DNA, 222 bp, Neisseria meningitidis
atgaatcaaaagtatattttatctgcaaacaataatagtttgatagaagaaattcacaatacagtacagagtattgggtattgtattgttcgaggtcttaatctaaaccatcttgatggcagccggagaaacaagaaattatttgactttctatctcaattaggaatgctgacaaaccacaaaggcgatggttttaaatctatattttgggatattaaatat

SEQ ID NO: 40097 - DNA, 2121 bp, Neisseria meningitidis
atgggcaaagccaacgcctttaccgcgccgattaccgtcgtcaactacgacgaacaagccctcaacaacaccgaagcgcgtactttggtggatgccgtagcgaaaaaagacgcttccgtttggcagttcggcggagaaagcaacacgctgaccggactgtatttcagaggttatcagcttgatgcgcgccaattcagcgtcaacggtttggcaggtatgtacggcacgcaaggcacggccagcgtgcaagtcggctccgcacaactgattaaaggcgcgtccaccgccgtaaacggcatgaaccctgaaggtgcggtatccggttccgtcaatatcgaaaccaaaaaagccgccgatgaaggcaaccgcaaaatcggtttgggccggtttagcaacaaccgcgcccaaggtacgttcgacttgggtcaacgcttcggcgaaaacaaagcattcggcgtacgcgccaacggcaaactgcgccacggcgacactccgcgccacggttacagcgaagacaacaaagaatttgcggtaaatgccgactatcgcggcgaaacactgcgcgtagcgttcgattccatctacgcaaaacgcaaaaccaacggcggtcgcgcgcgtatgcaggacattcaaaacgccggcggacgcttgtttggcgcgcccgatggtaaaaccaacctgctgccttcttggaactggcaaaataccgccggccaaaccaatatgcttacgtttgaatgggatgcgtttgataatgcacagattacaggcggtatcggctacaacaaggcacgctattacggcacgctgatttccccgaccgtatgtttgaatgctaccagcacttgtaccgatatgcaaaacacaaacgccagcggcaaagtaacggcacgcaactatgactacaataccggtactgcgcgcctgaccgaccaatatttccgcacattgagtatgaacctgaccgcacgcggcgaatttgaaaccagcccggtaacacataactggagtacggctttcgaccgcgttatccgccagcggaaaaccattcgcggaacggcagccggcgctggcaaggtagaagtgaaggcaaacgaaaatattgcgaatcaattggcatcgttcaaagccgactatcccaattcttgggagaactctgccaacttggatgccaatatcaaagtcaacagcctggctttgtccgacaccttgggcttcgtggataacaaataccgcctgactttgggcggacgtttccaagcggttgaatacaccaataagaaaaaatcacagagcggcgatgccaaacgcttcagcccgatgctgatggcggcgtgggtgccgcaacctgatttggttgtgtacggcaactatatggaagacttggagcctgccgatatcaaaaccgatgattccggcgaaacgacaatggcgaaaccgcgtgtcagccgtcagtttgaagtgggcgtgcgtaaaaactggggcaatttcgtaaccacgttaaacgcgttccaaatcaaacgcccgggctactggcgcggtcatacaactaccaagacaacaaaaggggtaacaacaacgctgacctatggcaacaattccgatttcgcccgctataaggcgcaaggcggcgcggccggcgacgagcaaggtatggaacgcaatcgcggtattgagttcaacacctacgcgaacttgctcaacaatactttgcgtccgactttgggtctgatgtatctgcaatcgaccgtgaaagagtatccaaattcacgcgatatgctggttaacggcgtacaagtcgccaatccgcgcgtaattgccaaggcaggtttggaatgggatacaccgtttgccaaaggcttgactttaaacagcaatgtttcgtatttcggcaagtcttaccaagacacgcaaaaacaatacgctttcccgtcttacactttggttgacgtaggcgcgcgctacaaaaccaagctcggcaaaaatacgttgaccgtcagcagctcggtggaaaacctgttcaacaaaaactactggcaggtacagcgcggccaatacgaccgcagcttcgccgtcgtcggtatgccgcgtacttactggttgaaagcggaattggatttc

SEQ ID NO: 40098 - DNA, 213 bp, Neisseria meningitidis
ttgcgtataggcaatgacctctttgtcaaacgtgtgcaacgtataccgggcaaactgcttgtaacgtctgaaaatccacgttacgcaccgtttgaaatagatttgagtaatacccaagacgacatcgccatcataggccgtgttgagtggtatggccggagtattccccacaggaaaacgtcgctctgttccgccacaacggcgaaatcctgt

SEQ ID NO: 40099 - DNA, 447 bp, Neisseria meningitidis
ttgacagaagaaatgatgaaaaagcagcggcatatcctgtgtgtcggctgcctgtatattattattgaaggtcaacgtatttcccaataccggctggatggaagcgtcgaaagggatgcagggcatgtcgttcagtaccttcggatacgcggatgctccgggctatacattcagccgcattggccatactttaattttcctacttggaaagaccacagggacacgtacaactgtttccgatagttcgcataatgtatattatgttaaattatatatttgtgcaaacggtctgcttcggattcgtccttgcgttacacccctaactccaaggcattaagctgttgtttgatgctttgccagtttgggagaaagttgtccatatgcgccataaaacgggcgttgcgatggcgttcgagcaaatgggtcagttcgtggacgacgacgtat

SEQ ID NO: 40100 - DNA, 1230 bp, Neisseria meningitidis
atgccttctgcccattatcctgaaatgagcgaaaaactgatggcggttttgatggcgatgctggttacgctgatgccgttttccatcgatgcctacctgcccgcgattcccgaaatggcgcaatcgctgggcgcggatgtccaccgtatcgaacagagcctgagtgtgtttatgttcggtacggcgttcggacaggtagtcggcggttcggtgtccgacatcaaggggcgcaaacccgtcgcgctggcgggtctgaccgtttactgccttgccgttgccgccatcgtatttgcttcgagtgccgaacagctcctcaacctgcgcgtcgtgcaggcattcggtgcgggcatgactgtggtcatcgtcggcgcaatggtgcgcgattattattccggacgcaaagccgcccagatgtttgcccttatcggcatcattttgatggttgtgccgctggtcgcacccatggtcggcgcattgttgcagggcttgggtggctggcaggcgatttttgtttttctggcggcgtattcgctggtgctgctcggtttggtacagtatttcctgcccaagcccgccgtcggcggcaaaatcggacgggacgtgttcgggctggtggcggggcggttcaagcgcgtattgaaaacccgtgccgcgatgggttatctgttttttcaggcattcagcttcggttcgatgttcgcctttctgaccgaatcttccttcgtgtaccagcagctctaccgtgttacgcctcatcaatacgcttgggcgtttgcactaaacatcatcacgatgatgtttttcaaccgcgttaccgcgtggcggctcaaaaccggcgtgcatccgcaaagcatcctgctatgggggattgtcgtccagtttgccgccaacctgtcccaactcgccgccgtgctgtttttcgggttgcccccgttttggctgctggtcgcgtgcgtgatgttttccgtcggtacgcagggcttggtcggtgcaaacacgcaggcgtgttttatgtcctatttcaaagaagagggcggcagcgcaaacgccgtattgggtgtattccaatctttaatcggcgcgggggtgggtatggcggcgaccttcttgcacgacggttcggcaaccgtgatggcggcaacgatgaccgcgtccacctcttgcggcattgcgcttctgtggctctgctcgcatcgtgcgtggaaagaaaacgggcaaagcgaatacctt

SEQ ID NO: 40101 - DNA, 411 bp, Neisseria meningitidis
ttgccgagcgataaagaagcgcgggcagggtgcttatctttgcctgccaataacggtataattcgggcgttatcaccgccttttaccggtataaacatcagactttttgccgccttgggtctcctgtccctttccggcgcggcggcgcaagcctccgtataccattgcaactcaaatggcaaaagcgtatatacatcagccccagcaggatcgtgcgccgatgcggatttacctaaaatcagcagccatcagggaggcggataccgcctgaaaattaaaaaactcagtcaagaagccaaaatacacatagaaagtaaaaagaaaaacaaaaaacctgccgggaaaaagaacaggcaggctgccaaagccccgaaagaaaatcaaaagcaaccaaccgaaaagaaaagcccg

SEQ ID NO: 40102 - DNA, 204 bp, Neisseria meningitidis
atggatgaagcggtttttgccgattgggcgttgaaaatctgcctgaccggcttgattatttttttgggttttatcgtttggaatttgggcaaggagtccaaagcaggcaaattcggcatcgccattttgtttttggttttgggcttgggcgtgttcggttttgtattcaaagaactgctgattaagtttttggtattgccgaaa

SEQ ID NO: 40103 - DNA, 213 bp, Neisseria meningitidis
atgatggaaacccttatcctcgacatcggcggcatgagctgcggcggctgcgtcaaaagcgttacccggatattggaaggcgtaaaaggcgtggcaagcgtcgaagtcagtcttgaaaacaaaagtgcgaccgtcggatacgaccccgcgcaaaccgatgcaggggcgttgattgaagccgttgaagacggcggctatgatgccgcgttgaaa

SEQ ID NO: 40104 - DNA, 213 bp, Neisseria meningitidis
atgaaaaccctgctccttaccttcggcatcttcctgaccgtcatcatcggtatggcggtcggctatattttctccaaacgcagcatcaaaggcagttgcggcggcattactgccttgggtatgaaaaaaatgtgcgactgcgacacaccttgcgacaccctgcaaaagaaactggatgaagaaaaacaggcaggcggcatacgggttgaccgt

SEQ ID NO: 40105 - DNA, 186 bp, Neisseria meningitidis
gtgatggaaagcatgtttatattggtgcccatcagcattattttggcgtttgtcatcggctggtttttttggtggtcgggcaaaaacgggcagtttgacgacttggaagggccggcgcaccgcatcctgatggatgatgattcgacaagtaaactgattgaaaaagagagggaaaacgatgtacgc

SEQ ID NO: 40106 - DNA, 336 bp, Neisseria meningitidis
ttgtttgtatgctttgaaaaatgtttgtttccggattttgccattcccatccggttttgcgctgtacgatgtgttttagcgcggacttgctcaaaatcgcatgtgattccggtatttgaggctttgattagggatgcggactttcaatatattttcagctacaacaacgaaggcttgatgtctgtcgggcaggtaagggagatttttgagtgtttcggcaaatatgatttggttcaaacggaataccggcgttttaaggcagataagacagaaaaccgtaaccataaggcaaattcgacattcgaatatctgcatattttagaaaagaccttttaa

SEQ ID NO: 40107 - DNA, 1161 bp, Neisseria meningitidis
gtgcatattaacttttcaatggaatataaagaatttaatgaaaattatttatataaaaagccgtttatttttaaaaaagctttagacgtaagttctatctcatggaaagaaattaatgagttgtatcaacgtgcagaccctactgattggcaatttaaatttcgcaaaggggaaataatccccaaagaagcctatgttgaatcattcaatgatgtgggtagaatacgtcatcggtttaataaaacagccgtatatcagtatctgcaagatggtgcaacaatggtttataaccgtattgataatgagccatttgttgacagtattgctaaacaaattgcccagtttgctcaagcacaaactgttgttagtggttatttggcgtttggtagttctccatcatatcgtaatcattgggatactcgtgatgtgtttgcggttcaattgattggcaaaaaacactggacagtttctgctccaaattttgatatgccattgtatatgcagcaagcaaaagatatgccgcacattactccgcctacaacagtagatatggaagtcattttagaagcaggagatattttatatatcccgcgtggttggtggcataatcctatgcctatgaattgtgaaacattccatttagctattggaacttttccgccaaatggttataattatatggaatggttgatgaaaaaaatacctgatatccagagtattcgtcaaaatttcatagactgggaacacgaccaaaatatagataatgcggctcaggcagttactgaaatgatgaagaaccaagaaaattatcaagcattcatacaagattttttgggaaatcaacgcgtaaatactgcatttaatatgcaaatttttggaaatctggataatgacagattacctgaaaatagtacaattaaactcaattcgttggataaccgtacaattaaacaaggatatatcatagcgaatggcatcaaaaccaacttggacaatgatagccaaacgattttgcaatggattgctgacaaacatagtgttaagttaactcaactgtatgaattttgccaaaatcaaaacattaatttggaaaaagtggaaaaattagtgtttgatttgacaatgatcgatgtattggaatgtttaactgatgaaagataa

SEQ ID NO: 40108 - DNA, 1072 bp, Neisseria meningitidis
atgcggccgtttttcgtcggtgcggcggtacttgccatactcggcgcgttggtgtttttcatcagccccggtgccgtcgtcctgcaccgccaaatcttcttagaactcatgctacctgcggcatatggtggtttcctgactgcggctttgttggactggacggttttttcgggtaacctgaaacctgtcgcgactttgatggcggcattattgctcgccgcatccgctatactgcccttttcgccgcaaactgcctcgtttttcgtcgcctcctattggctggtgttgctgctgttctgcgcccggctgatttggctagaccgaaacaccgacaacttcgccctgctaatgttacttgccgcgttcactgtttttcagacggcatatgccgtcagcggcgatttgaacctgttgcgcgcgcaagtgcatctaaatatggcggcggtgatgttcgtatccgtgcgcgtcagtattcttttgggcgcggaagccctgaaagaatgccgtctgaaagaccctgtttttattccaaatatcgtttataaaaacatcgccattactttcctgctcttgcacgccgccgccgaactttggctgcccgcacaaaccgccggttttaccgcgctcgccgtcggcttcatcctgctcgccaagctgcgtgagcttcaccatcacgaactcttacgtaaacactacgtccgcacttattacctgctccagctctttgccgccgcaggctatttgtggacaggcgcggcgaaattacaaaacctgcccgcctccgcgcccctgcacctgattaccctcggcggcatgatgggcggcgtgatgatggtgtggctgaccgccggactgtggcacagcggctttaccaaactcgactacccgaaactctgccgcatcgccgtccccatccttttcgccgccgccgtttcacgcgctgttttaatgaacgtgaacccgatattcttcatcaccgtccccgcgattctgaccgccgccgtgttcgtgctttatcttttcacgtttgttccgatttttcgggcgaatgcgtttacaggcgatccggaat

SEQ ID NO: 40109 - DNA, 402 bp, Neisseria meningitidis
atggcaaaccgatttcggcagcgcaaatccgcataccgccgccttagcggcaagccgttgttttcagacggcattgcggccaacctttgcggcgggcgaaaaaccttgtcctataatttatcccgcttcaaaatcagcatacggtcggaaatgcaaaaaatatctttcaatttgttgaaacctgcaaccccctaaatagggaaacgccgccccggtttgaacggcgcgccgcatattccgatgccctccccccgataccttccggcaagcccagaaatgcccggcaacaatatccatccggcaaaaatccgaaacaacacacccggtggcaggcagagtcaaaccgccccgcaaagcatccgccatcagaaaaacaaaccgcctccgagggcttcatcctaa

SEQ ID NO: 40110 - DNA, 657 bp, Neisseria meningitidis
atgataaaaaatctttataaattgataaattatgcggctttgattggtttcgccccaaatatagtttttgcttggcctatgtttgttgaccccccgccttaccaaaacatccatgtacgaagttggaaagcacggcgagattccggcatagtaaaacaagatttggatttttcttgcggcgcggcttcgattgccacgttactgaataatttttatggcagacattattctgaagcggaaatcttggacaaaatggataaaacccaaatgcgtgcttcttttgatgatatgcaacgcataatgcccgaactgggttttgaagcacaaggttatgctttgccatttgaacagttggtacaactaaaaattcctgtaattgtgtatttaaaataccgtaaaaacaaccatttttcggtattgaacggtattaacggagaaactgttttgctggctgatccatcgctggggcacgtctcaatgagcaaatcacaattcttgagcgcatggaaaacacgtgatggcgaaatggaaggaaaaattttagccatcgtgccaaaaaatactgattttgttagaaatcagatgttttttaataagaatcccgttcgtcaaacacgttttacggtagaacaaatccaaatgcggcaaaaacgataa

SEQ ID NO: 40111 - DNA, 1158 bp, Neisseria meningitidis
atgaaacgccaagccttagctgcaatgattgcttccttattcgcattagccgcctgcggaggcgaacctgccgcgcaagcccctgccgcttccgcagaagccgcaagttccgccgcacaaaccgccgccgaaacgccgacaggcgaactgcccgttatcgatgcagttaccacccacgctcctgaagtacctcccgcaatcgaccgcgactatcctgccaaagtccgcgtaaaaatggaaactgtcgaaaaactgaccatggaagacggtgtggaataccgctactggacatttgacggcgacgttccgggtcgcatgatccgcgtacgcgaaggcgatacggttgaagtggaattttccaacaacccgtcttctaccgttccccataacgtcgacttccacgccgcaaccggtcagggcggcggtgcagccgcaacctttaccgccccgggccgcacttccacattcagcttcaaagccctgcaaccgggtctgtacatctaccactgcgccgtcgcgccggtcggtatgcacatcgccaacggtatgtacggtctgattttggtcgagcctaaagaaggtctgccgaaagtggataaagagtcctacatcgtccaaggcgacttctacaccaaaggcaaaaaaggcgcgcaaggtctgcaaccgttcgatatggacaaagccgttgccgaacagcctgaatacgtcgtattcaacggtcacgtaggtgctatcgccggcgacaacgccctgaaagccaaagcaggcgaaactgtacgtatgtacgttggtaacggcggcccgaacttggtgtcttccttccacgtcatcggtgaaatcttcgacaaagtttatgttgaaggcggcaaactgattaacgaaaacgtacaaagcaccatcgttcctgccggcggttctgccatcgtcgaattcaaagtcgacatcccgggcagctacactttggttgaccactccatcttccgcgcattcaacaaaggcgcactgggtcaattgaaagtagaaggtgcagaaaaccctgaaatcatgactcaaaaattgagtgataccgcttacgccggtaacggtgcagctcctgctgcttccgctcccgcagcttctgccccggcagcctctgcatccgaaaaaagcgtttattaa

SEQ ID NO: 40112 - DNA, 1671 bp, Neisseria meningitidis
atgcttctaacactttctttgcgtgattttgtcattgtcgaaaatctgaatctggattttcaaagcggctttaccgtattgaccggagaaactggcgcgggcaagtccattactttggatgcgattggtctgctgttgggcgataaagccgattacagccaagtccgcagcggcgcaaaagaagcgcagttgtcggcgttgtttgatatttcccatttacctgttttaaaagcagaattgtatgaacaggggcttttaaacgacggagaagaagaactcagtatccgccgcattatcgatgccaaaggcaaaagccgcagctttatcaacaatcaggccgctaccttggcgcaactcaaagccgtcggcagccagcttatcgacatccacgggcaaaacgcccatcattcgcttaatcaggaagccgctcagcgcgaattgttggacgcatttgcgggcagcagggcgcaggcggaaaccgtcaggcagctttatcaaaactgggcaaactcaaaaaaagcattgcaggaagcgcaggaacaggcagaaaacattgcactcgaacaagagcgtctggaatggcagtttaacgaattgaatcagttggacattaaacaaggcgaatgggaagccctcagccaaagccacgacagccttgcccattctgccgagctgttgcaggctgccgaagaagtcggaagcaagattgacggcgacaacggcatccaacgccatatctatcaatgtcaaaaactattggccaatctgcaaaacatcgagccgcgctttgccgagagcctgaatatgttggcaagcatcgaggccgaattgggcgaaatcagtgccaatatgcgcgatgtggcaggcagcgacatcaaccccaatgaattggcggcacaggaacagcgtatgggcgaactgatggggatggcgcggaaataccggatcgagcctgaagagttgcctgccaagttggcagaaatcgaagaacgcctgcaaagcctgcaagctgccgccgatttggacgcgctcgagcataatgttgcccacaattttgccgaatatcaggaagctgcccacatcctttctgccatgcgccatcaggcggcagagcgtttgagcggcgaaacgaccgagcatatgcaacaccttgccatgaaaggtgcacgtttcgacatcgtcctgttgccctcgtcgccgacggcacacggtttggagcaggttcaatttcaagttgccgccaacaaaggcaatccgccccgtccgctgaataaagttgcctccggcggcgaattggcgcgtatcagccttgccttacaggttgttgccagccaatatacccaagttcccaccctgatttttgatgaggtcgataccggtattggagggggagtggctgaaatggtcggcaaggcattacgtgcgttgggcagaaaacatcaggtgcttgccgttacccatcttccgcaagtcgcatcctgcggcgaaaaccactggcgggtgcgcaagcacagcgagggagagcaaaccgtcagcgaaatcagtatattggatgaaatccaacgggtcgaagaggttgcccgtatgttgggcggagaagtcattaccgatacgacgcggcaacatgcggcagaattgctgcaacttgcgtcgaaaaatagtttattttaa

SEQ ID NO: 40113 - DNA, 327 bp, Neisseria meningitidis
atgaacttcaaacgccttttcttgaccgccgccgcaaccgcactgatgggcatttccgcccccgcactcgcccaccacgacggacacggcgatgacgaccacggacacgccgcacaccaacacagcaaacaagacaaaatcatcagccgcgcccaagccgaaaaagcagcgttggcgcgtgtcggcggcaaaatcaccgacatcgatctcgaacacgacaacggccgtccgcactatgatgtcgaaatcgtcaaaaacggacaggaatacaaagtcgttgtcgatgcccgtaccggccgcgtgatttcctcccgccgcgacgactga

SEQ ID NO: 40114 - DNA, 5145 bp, Neisseria meningitidis
  misc_feature 5126, 5127, 5128, 5129, 5130: 'n' is a, c, g or t
atgaataaaggtttacatcgcattatctttagtaaaaagcacagcaccatggttgcagtagccgaaactgccaacagccagggcaaaggtaaacaggcaggcagttcggtttctgtttcactgaaaacttcaggcgacctttgcggcaaactcaaaaccacccttaaaaccttggtctgctctttggtttccctgagtatggtattgcctgcccatgcccaaatcaccaccgacaaatcagcacctaaaaaccagcaggtcgttatccttaaaaccaacactggtgcccccttggtgaatatccaaactccgaatggacgcggattgagccacaaccgctatacccagtttgatgtcgacgctaaaggtgctgtactgaacaacgatcgcaacaacaacccgtttctggccaaaggcagtgcgcagttgattttgaacgaggtgcgcggtgcggccagcaaactcaatggcatcgttaccgtaggtggtcaaaaggccgatgtgattattgccaaccccaacggcattaccgttaatggcggcggctttaaaaatgtcggtcggggcatcttaactaccggtgcgccccaaatcggcaaagacggtgcactgacaggatttgatgtgcgtcaaggcacattgaccgtaggagcagcaggttggaatgataaaggcggagccgactacaccgagatacttgctcgtgcagttgctttgcaggggaaattacagggtaaaaacctggcggtttcgaccggcgcacagaaagtagattacgccagcggtgaaatcagcgcaggtacggcagcgggtacgaaaccgaccgttgccctcgatactgccgcattgggtggtatgtacgccgacagcattaccctgattgccaatgaaaaaggcgtaggcgtcaaaaatgccggcacactcgaagcggccaagcaattgattgtgacttcgtcaggccgcattgaaaacagcggccgcatcgccaccactgccgacggcaccgaagcttcaccgacttatctctccatcgaaaccaccgaaaaaggagcggcaggcacatttatctccaatggtggtcggatcgagagcaaaggcttattggttattgagacgggagaagatatcagcttgcgtaacggagccgtggtgcagaataacggcagtcgcccagctaccacggtattaaatgctggtcataatttggtgattgagagtaaaactaatgtgaacaatgccaaaggctcggctaatctgtcggccggcggtcgtactacgatcaatgatgctactattcaagcgggcagttccgtgtacagctccaccaaaggcgatactgaattgggtgaaaatacccgtattattgctgaaaacgtaaccgtattatctaacggtagtattggcagtgctgctgtaattgaggctaaagacactgcacacattgaatcgggcaaaccgctttctttagaaacctcgaccgttgcctccaacatccgtttgaacaacggtaacattaaaggcggaaagcaggtggtactgatggctgatggcgacattcaggcaaaagcctccaatctgaatgcatccggcaatctgtatattcatgcaggtaaggatctggatttgaatgccgataaagacttatcaacacaaagtatcagcctgagggcagacaacaccgccctcatcagtagcaacggtaacaccttgactgcagaaaagaatctggatattcaggcaggtagcttgagtgtgcgtcaaagtaatctgcaatccagtggcggtaatgtgcagatgagcgcgactaaaggcaacatcagcttgaatcagagttggataaatgccagtcagaatattgatacggcagcacttcaaggcaatattatttcagacggtctgactgctgttgccgaagttggacgcgtatctcttcttgccaacggcaatgttgatttcaacggtctaaataccttgattgcggaaggagacattaatgctggttcagtcggtaaaggccgtctgaaaatggacaataccgatatttatgcttctgcaggcgatgtgaaactggttgccggaggtcaattagatttaggcaacggcaccgttaacggcggtcatatcagcttagacagcaataaaggcagcatggtggtgcaggatgtacacctgaatgcccgcgcatcactgaaagtggatgcggatcaaactttaaccattaataacagcaagctcaattccggtcacaatacccagattaatacaaatcatggtcatatgacgcttaatcagcttgatgctcattcacgtcgtcatatgagtatcagtgcacagggtaaaggcaaaggaaaagacagcggtcaaattttacaaaacgaccagcaaaacagtaaaagtactttggcggcagatggtgtattgtcattgaacagcagcgcattacaggttttggacaatactaccctgcgcggtggcgcgataaacatcaaagctggcggaggcatcatcaaacggggctatatcgattgggaaacccaagatacggctactatgcgttcagcggaactgaaaccactgtctggtatgatgtcgatagaatcgggcggtgataaccctttaaccgttgaacccggtaaccgtatcgtttctgcaggtgatttggccgtgaaccacaacggcacattccaaatcagtgccagagcaggaaataacggcaatccgagtgcgcaaacagccagcgtttcagctaaaggcaatatcgggattgtggcgggagaggtggatattgatgcagcaaatattgccgcagggaaagatttggctttagtggcaactaaagggaatatttcactaaacagtattaggaatacgtttagtaactatcaattgaaaacagataaacacaatatcacacagcaacttactgatgtagagcaggagcttagtaagttaacgagcgatcctaaatatcgtaaagcacaggatcttccacaaatgttgaggcgtaaatataagaggcgtgacaaagtattcggtgatagtgaggccagattacgtggtttacgagcagagataaatgctgctgatgaggcttgggcagaactccaatccccagtaaaagcgttacttgaacgtaaacaattgttacaacaagcccttttaacagtttcccaaccgggtagtggtcacgaaaaccaaggtagcacccttagcggtcaaaatatcaaactgctcgctgcaggtggtatccgtatccagggctccaaagttgctgccacccaacaggcaaatatccaagctgcaggatttttacctgcaccagccgcagaggaactgcaagaaggtcgacttcaatcagccattgacatcagcggtgtatttgatacttttgaatatggtcagcaaggcagcgataaatacggctatgccattttcagcaggccatctgaaatttcaggaaaaacaggtgttaccctctctgcaccaaatgccaatgagaacagccgcatcagtctgagtgcggcaaacatcgaagctgaaaacggcaaaatcaaactgcaatcctacggcgaccaatcctattacgccgggcagggcgaactctataccttagaacgccgcagctacaaaaccggcaaatggtacaaccgcaaacacattaccgaagtcaaagaacacaaaaacgccaagcccgacgcagtaaacctcagcgcatcccaaggcatcgacatcaaatctggtggcaacatcgacgcctacgccaccgcattcgatgcccccaaaggcagcattaacatcgaagccgggcggaaattgacactctatgccgtagaagagctcaactacgacaaacttgacagccaaaaaaggcgcagatttctcggcatcagctacagcaaagcacacgacaccaccacccaagtcatgaaaaccgcgctgccctcaagggtagttgcagaatcagccaacctccaatcgggctgggataccaaactgcaaggcacacagtttgaaaccacactgggtggcgcaaccatacgcgcaggcgtaggcgagcaggcacgggcagatgccaagattatcctcgaagggatcaaaagcagcatccacacagaaaccgtgagcagcagcaaatctactctatggcaaaaacaggcaggacggggcagtaacatcgaaaccttgcaattgccgagtttcaccggtcccgttgcgcccgtactgtccgctcccggcggctatatcgtcgacattccgaaaggcaatctgaaaaccgaaatcgaaaagctgtccaaacagcccgaatacgcctacctgaaacagcttcagacggccaagaacgtcgattggaaacaggtgcagctggcctacgacaaatgggactataaacaggaaggcttgaccggagccggtgcagcgattgtggtgattattgtaaccgctctaacttatggatacggagcggctgcagcgggtagcgtaactgccgcaggaagtagtacagccgcagctgcaacaacgacagcggcagcaactaccactgtttctactgcagctgccatgcaaaccgcagctttagcctccttgtatagccaagcagctgtagccatcatcaataataaaggcgatgtaggcaaagcattaaaagatctcggcaccagtgatacggtcaagcagattgttacttccgcactgacggcgggtgcattaaaccagatgggagcagatattgcccaattgaacagcaaggtaagaaccgaactgttcagcagtacgggcaatcaaaccattgccaaccttggaggcagattggccaccaacctcagcaatgcaggtatctcagctggtatcaataccgccgttaacggcggcagcttgaaagacaacttaggcaatgccgcattgggagcattggttaatagcttccaaggggaagccgccagcaaaatcaaaacaaccttcagcgacgattatgttgccaaacagttcgcccacgctttggcgggttgtgttagcggactggtacagggaaaatgtaaagatggggcaattggcgcagcagttggggaaatcgtagctgaatccatacttggcggcagaaaccctgctacactcagcgatgcagnnnnncacacacttaattaa

SEQ ID NO: 40115 - DNA, 1290 bp, Neisseria meningitidis
atgaaccggacttatgccaatttctacgaaatgctcgccgccgcctgccgcaaaaacggcaacggcacggcagtgttcgacggcaaggaaaaaaccgcctaccgcgcgctcaagcaggaggccgaagccgtcgcggcgtatctgcaaaatatcggcgtgaagttcggcgacacggtcgcgctggcggtttccaattccacagaatttattaccgcctatttcgccgtctccgccatcggcgcggtcgccgtaccgatgaacacatttttgaaaaacagcgaatacgcgtatatcctgaacgactgcaaggcgcgcttcctgttcgcctcggcgggcctgtcaaaagagttggcgggcttgaaggcgcaaacgcccgtcgaaaaaatcatttggacggacaaaagccgtccggccggcgaaatggcggaaggcgatgccttttttgaagacgtgcgccgcttccccgaaaaacccgacttgggccgccaaccccggataaatgatttggcacacatcatctacacctccggcacgacggggcatcccaaaggcgcgctaatcagttacgccaacctgttcgccaacctgaacggcatcgaacgcatctttaaaatctccaagcgcgaccgctttatcgttttcctgccgatgttccacagcttcacgctgacggctatggtgctgctgccgatttatatgacctctcccgtcgtcgccgtcaatacgcccgagaggcaaaaagcccgcagcgtcggcatccccctgcccggtttggaagccaaagccgtcgatgaagaattggtcgaagtgccgcgcggcgaagtgggcgaactgatcgtcaggggcggttcggtgatgcggggctacctcaatatgcctgccgccaccgatgaaaccatcgtcaacggctggttgaaaacgggcgatttcgttaccatagacgaagacggctttatctttatcgtcgaccgcaaaaaagatttgattatttccaaaggtcaaaacgtctatccgcgcgaaatcgaagaagaaatctacaaactcgatgccgtcgaagccgctgccgtcatcggcgtgaaagaccgttatgccgacgaggaaatcgtcgccttcgtccaattgaaggaaggtatggatttgggcgagaacgaaatccgccgccacctgcgtaccgtgctggcaaatttcaaaatccccaaacaaatccactttaaagacgggctgccgcgcaacgctacgggcaaggtattgaaacgggtgttgaaggagcagtttgacggaaacaaatga

SEQ ID NO: 40116 - DNA, 2670 bp, Neisseria meningitidis
gtgctgaagacaccccctacgcttgctgcagaactttcgggtaaaaccggtgtgagcattagcgcaccgtatgccaatgagaacagtcgcatcctgctcagcaccacggatatcagttcggaaaacggcaaaatcaaaattcaatcctacggcgaccaatcctattacgccgggcagggcgaactctataccttagaacgccgcagctacaaaaccggcaaatggtacaaccgcaaacacattaccgaagtcaaagaacacaaaaacgccaagcccgacgcagtaaacctcagcgcatcccaaggcatcgacatcaaatctggtggcaacatcgacgcctacgccaccgcattcgatgcccccaaaggcagcattaacatcgaagccgggcggaaattgacactctatgccgtagaagagctcaactacgacaaacttgacagccaaaaaaggcgcagatttctcggcatcagctacagcaaagcacacgacaccaccacccaagtcatgaaaaccgcgctgccctcaagggtagttgcagaatcagccaacctccaatcgggctgggataccaaactgcaaggcacacagtttgaaaccacactgggtggcgcaaccatacgcgcaggcgtaggcgagcaggcacgggcagatgccaagattatcctcgaagggatcaaaagcagcatccacacagaaaccgtgagcagcagcaaatctactctatggcaaaaacaggcaggacggggcagtaacatcgaaaccttgcaattgccgagtttcaccggtcccgttgcgcccgtactgtccgctcccggcggctatatcgtcgacattccgaaaggcaatctgaaaacccaaatcgaaaccctcaccaagcagcccgagtatgcttatttgaaacaacttcaagttgcgaaaaacatcaactggaatcaggtgcagcttgcttacgataaatgggactacaaacaggagggcatgacacccgcagcagcagctgtcgtcgttatcgtcgtaaccgtattgacctacggtgcactgtccgccccggcagccgccggaacggcgggcgcggcaggcgcaggagcgggaggagccgcagcaggaacggcagccggaactggagtagcagcaggaacggcagccacaaccggagtagcagcaggcacatcagctgcagctatcaccacagccgcaggcaaagccgcactggccagtctcgccagccaagccgcagtttccctcatcaacaacaaaggagacataaaccataccctgaaagaactgggcaaaagcagcaccgtcagacaggccgccaccgccgccgtaaccgcaggcgtactgcagggcataagcgggctgaacacccaagcagccgaagccgtcagcaaacattttcacagtcccgcagcaggcaaactgaccgctaacctgatcaacagcaccgctgccgcaagtgtccataccgccatcaacggcggcagcctgaaagacaatttgggcgatgccgcactgggtgcgatagtcagtaccgtacacggagaagtagcgagcaaaatcaaatttaatctcagcgaagactacattgcccacaagattgcccatgccatagcgggctgtgcggcagcggcggcgaataagggcaagtgtcaggatggtgcgataggcgctgcagtcggtgagattgttggtgaggctttggttaagaatactgatttcagtcgtatgagtgcgaccgaaatcgaaaaagctaaagcgaagattactgcctattcaaaactggttgccggcactgcgtctgccgttgtaggcggggatgtgaatacagcggcgaatgcggcacagatagcggtggagaataatactttgtatcctagatgcgttggtgcaaagtgtgatgaatttcaaaaggaacaacaaaaatggatacgtgaaaatcctgaagaatatcgagaagttttgcttcttcagacaggatttattccaattatcggtgatatacagagttttgtacaagcacagaccgctgccgatcacctgtttgctttgctgggtgtggttccgggtatcggtgaatcgatacaggcctataaagtagcgaaagcggcaaaaaatttacaaggcatgaaaaaagccttggacaaggcagcaaccgttgccactgcacagggctatgtcagcaaaaccaaaatcaaaatcggtcaaattgaattaagggttactgcagcaactgacaaacaattgctgaaagctattggcgaaggaagggacacgacaggtaaaatgaccgagcagttatttgactctgtagctaaacaaaatggcttcagagtgctttcgggcggcaaatacggcggaaataacggttttgatcatgtatggcaggctgccgatggtagtgtcgttttgattgtagaaagtaagcagattaggaacggtacggtacagctgaatccgaatggtgcgggtggatatacgcaaatgagtgaggattggattaaacaagttgcaaatagcttacctgatggtagtcctgctaaagctgctgtcttcaaagcggagcgggaaggcaaattaaaaacggcaatagcaggcgttgatcgtcaaacaggtaaggccgttattctttctgtcaaagttccttctaaaaccaatataaggagataa

SEQ ID NO: 40117 - DNA, 1518 bp, Neisseria meningitidis
atgttgtatttcagatacggttttttggttgtttggtgtgcggcaggtgtttctgccgcctatggggcggatgcgcccgcgattttggatgacaaggcattgttgcaggtgcagcggtcggtgtcggataagtgggcggaatcggattggaaagttgaaaatgatgccccgcgcgtggttgacggggattttttgttggcgcatccgaaaatgttggaacatagtttgcgcgacgcgctcaacggcaatcaggcggatttaatcgcttcgttggcggatttgtatgccaagctgccggattatgatgcagttttgtacggcagggcgcgggctttgctggcgaaattggcgggaaggccggcggaggcggtggcgcggtatcgggaactgcacggggaaaatgcggcagacgagcggattttgctggatttggcggcggcggagtttgacgatttccggctgaagtcggcagaaaggcattttgcggaggcggcaaaattagatttgccggcgccggttttggaaaatgtggggcgtttccggaaaaaaacggaggggctgacgggctggcgtttttcgggcggcatcagcccggcggtcaatagaaatgccaataatgccgcgccgcagtattgccagcaaaacggaggccggcagatatgcagtgtcagccgggcggagcgggcggcagggttgaattatgaaatcgaggcggaaaagctgacggcgttggcggataatcattatttgttgttccgttccaatatcggcggcacgagctattatttcagtaaaaaatcagcttatgatgacgggttcggcagggcgtatttgggttggcagtataaaaatgcgcggcagacggcggggattttgccgttttatcaggtgcagttgtcgggcagcgacggctttgatgcgaaaacaaaacgggtaaacaaccgccgcctgtcgccgtatatgctggcgcacggagtcggcgtgcagctgtcccatacttaccgcccaaacccgggatggcaattttcggtcgcgctggaacattaccgccaacgctaccgcgaacaggatagggcggaatacaataacggcaggcaggatgggttttatgtttcgtcggcaaaacgtttgggcgaatcggcaactgtgttcggcggctggcagtttgtgcggtttgtgccgaaacgcgaaacggtgggcggcgcggtcaataatgccgcctaccggcgcaacggtgtttatgccggctgggcacaggagtggcggcagttgggcggtttgaacagtcgggtctccgcgtcttatgcccgccgcaactataagggcgttgcggctttctcgacagaggcgcaacgcaaccgcgaatggaatgtctcgctggctttgagccacgacaagttgtcgtacaaaggtatcgtgcctgcgttgaattatcgtttcggcaggacggaaagtaatgtgccgtatgcgaaacgccgcaacagcgaggtgtttgtgtcggcggattggcggttttga

SEQ ID NO: 40118 - DNA, 1056 bp, Neisseria meningitidis
atggaactcaaaatagacattgcaaccaacaacttcaaacacggcggcggcacggaacgctacacattggatttggtaaagggtctgaacagacaaaacatcacaccggccgtttatgcgacgaaatttgatcacggcattcctgaatacgccatgatcgaaccccatcttgtcgatcaacaccggacgctgaaaaaactacgctcattcctcttttcaagtcggctcgctcaaaccagaaaaaacagtgccgccaaactgattgcctgccaccacgccgattacgccgacctcctcatctgcggcggcacacacttgggctacctgcaccatatggcgcaaaaaccgaacctgctcgaccgtctcgccatacgccgcaaccgcagcaactacgccaccgccaaactgattatggcgcattcccatatgatgcggcgcgaactggtcggactgtacggcgttccccctgaaagaatccaagtgccccccccccccgcagatacggaacgcttctttccacaacccggagaaactgccgacctgcgcgccaaatacggctttgccgaccatgaaaccgttttcctgttcccatcgaccggccacacgcgcaaaggtctggaactgcttgccgactttttcgaacataccggcctgcccgtcaagcttgccgttgtcggctccccgctcccccgccctatgaaaaacgtcgtcggactgggcttctgcaccgatatgcccgaactctaccgcgccgccgactttaccattatggcatccctgtacgaacccttcgggctggtcggtgtcgaatccgtcctatgcggcacacgcgtcgtcctctccgaaaacatggcatgtacagaggtcatgaacgaagaagccggattctttttctcacgccaaaacccggaaaccctggcgcaagccgttgcccaagccgtcagccttaaaaaacagggcggacaccgcctgtccgacccgatgcgtgcactgaactacaacccgtccctgtcgcaccacatcgaccgactgaccgacatgctggcatccgtataa

SEQ ID NO: 40119 - DNA, 657 bp, Neisseria meningitidis; identical to SEQ ID NO: 40110

SEQ ID NO: 40120 - DNA, 369 bp, Neisseria meningitidis
atgtctttcggctatttgattgcaacatcgcaaccttgcgaattgttgacaaaatctcgaggtgaaactttttctttaattatggataaatggatttatttcagattttgtgaaggaaatatttatacaataaggaagaatgaaactgaatcttgtcttacagaaagaggaggcaaatggttgaaacatatttatgaatttaatcggggaagttttattttttcttatgtgcttctaaaaaagagagaaagcgaagagaattttgcagaaattgttttaaaatcaataaaaaataataaaattttgacagttaaggtacggtcaggcttgcattttgacttaagaaatatttatcgtattgagatgtaa

SEQ ID NO: 40121 - DNA, 1758 bp, Neisseria meningitidis
atgggttttcctgttcgcaagtttgatgccgtgattgtcggcggtggtggtgcaggtttacgcgcagccctccaattatccaaatccggtctgaattgtgccgttttgtctaaagtgttcccgacccgttcgcataccgtagcggcgcagggcggtatttccgcctctctgggtaatgtgcaggaagaccgttgggactggcacatgtacgataccgtgaaaggtcactggttgggcgaccaagatgcgattgagtttatgtgccgcgccgcgcaagccgtaattgagttggaacacatgggtatgccttttgaccgtgtggaaagcggtaaaatttatcagcgtcctttcggcggccatactgccgaacacggtaaacgcgcggtagaacgcgcctgtgcggttgccgaccgtacaggtcatgcgatgctgcatactttgtaccaacaaaacgtccgtgccaatacgcaattctttgtggaatggacggcacaagatttgattcgtgatgaaaacggcgatgtcgtcggcgtaaccgccatggaaatggaaaccggcgaagtttatattttccacgctaaagctgtgatgtttgctaccggcggtggcggtcgtatttatgcttcttctaccaatgcctatatgaataccggcgatggtttgggcatttgcgcgcgtgcgggtattccgttggaagatatggaattctggcaattccacccgaccggcgtggcaggtgcgggcgtgttgattaccgaaggcgtacgcggcgagggcggtattctgttgaatgccgacggcgaacgctttatggaacgctatgcgccgaccgtaaaagacttggcttctcgcgacgttgtttcccgcgcgatggcgatggaaatctacgaaggtcgcggctgcggtaaaaacaaagaccatgtcttactgaaaatcgaccatatcggcgcagaaaaaattatggaaaaactgccgggcatccgcgagatttccattcagttcgccggtatcgatccgattaaagacccgattcccgttgtgccgactacccactatatgatgggcggtattccgaccaactaccatggcgaagttgtcgttcctcaaggcgacgaatacgaagtgcctgtaaaaggtctgtatgcggcaggtgagtgcgcttgtgcttccgtacacggtgcgaaccgcttgggtaccaactccctgttggacttggtggtattcggtaaagctgccggcgacagcatgattaaattcatcaaagagcaaagcgactggaaacctttgcctgctaatgctggtgagttgacccgccaacgtatcgagcgtttggacagccaaaccgatggtgaaaacgttgatgcattgcgccgcgaactgcaacgctccgtacaattgcacgccggcgtgttccgtactgatgagattctgagcaaaggcgttcgagaagtcatggcgattgccgagcgtgtgaaacgtaccgaaatcaaagacaagagcaaagtgtggaataccgcgcgtatcgaggctttggaattggataacctaattgaagtggcgaaagcgactttggtgtctgccgaagcacgtaaagaatcacgcggtgcgcacgcttcagacgaccatcctgagcgcgatgatgaaaactggatgaaacatacgctgtaccattcagataccaatactttgtcttacaaaccggtacataccaagcctttgagcgtggaatacatcaaaccggccaagcgcgtttattga

SEQ ID NO: 40122 - DNA, 1848 bp, Neisseria meningitidis
atgcacgacacccgtaccatgatgatcaaaccgaccgccctgctcctgccggctttatttttctttccgcacgcatacgcgcctgccgccgacctttccgaaaacaaggcggcgggtttcgcattgttcaaaaacaaaagccccgacaccgaatcagttaaattaaaacccaaattccccgtccgcatcgacacgcaggatagtgaaatcaaagatatggtcgaagaacacctgccgctcatcacgcagcagcaggaagaagtattggacaaggaacagacgggcttcctcgccgaagaagcaccggacaacgttaaaaccatgctccgcagcaaaggctatttcagcagcaaagtcagcctgacggaaaaagacggagcttatacggtacacatcacaccgggcccgcgcaccaaaatcgccaacgtcggtgtcgccatcctcggcgacatcctttcagacggcaacctcgccgaatactaccgcaacgcgctggaaaactggcagcagccggtaggcagcgatttcgatcaggacagttgggaaaacagcaaaacttccgtcctcggcgcggtaacgcgcaaaggctacccgcttgccaagctcggcaacacccgggcggccgtcaaccccgataccgccaccgtcgatttgaacgtcgtcgtggacagcggccgccccatcgccttcggcgactttgaaatcaccggcacacagcgttaccccgaacaaatcgtctccggcctggcgcgcttccaaccgggcacgccctacgacctcgacctgctgctcgacttccaacaggcgctcgaacaaaacgggcattattccggcgcgtccgtacaagccgacttcgaccgcctccaaggcgaccgcgtccccgtcaaagtcagcgtaaccgaggtcaaacgccacaaactcgaaaccggcatccgcctcgattcggaatacggtttgggcggcaaaatcgcctacgactattacaacctcttcaacaaaggctatatcggttcggtcgtctgggatatggacaaatacgaaaccacgcttgccgccggcatcagccagccgcgcaactatcggggcaactactggacaagcaacgtctcctacaaccgttcgaccacccaaaacctcgaaaaacgcgccttctccggcggcatctggtatgtgcgcgaccgcgcgggcatcgatgccaggctgggggcggagtttctcgcagaaggccggaaaatccccggctcggatgtcgatttgggcaacagccacgccacgatgctgaccgcctcttggaaacgccagctgctcaacaacgtgctgcaccccgaaaacggccattacctcgacggcaaaatcggtacgactttgggcacattcctgtcctccaccgcgctgatccgcacctctgcccgcgcaggttatttcttcacgcccgaaaacaagaaactcggcacgttcatcatacgcggacaagcgggttacacccttgcccgcgacaatgccgatgtcccctcggggctgatgttccgcagcggtggcgcgtcttccgtgcgcggttacgaactcgacagcatcgggcttaccggcccgaacggatcggtcctgcccgaacgcgccctcttggtgggcagcctggaataccaactgccgtttacgcgcaccctttccggcgcggtgttccacgatatgggcgacgccgccgccaatttcaaacgtatggagctgaaacacggttcgggactgggcgtgcgctggttcagcccgctcgcgccgttttccttcgacatcgcctacgggcacagcgacaagaaaatccgctggcacatcagcttgggaacgcgcttctaa

SEQ ID NO: 40123 - DNA, 321 bp, Neisseria meningitidis
ttgggcgaaaaaattaaagacggcaaaaaaaccgtactttcccgcgaagaagaacaaaaaatctgcaatactttcacgaacaaacaggcagtggaagatttcagtgtggtaatcggctacgatgaaatcaaagcgaagaatcacagcttgtcggcggggcagtatttcgaggtaaagattgattatgtggatatttccgccgacgaatttgcgcaaaaaatggcgggattttcagcggatttggataaacttttcgccgaatctgccgaattggaaaaagagattaaggatagattggcgatgttgaaattcaattcataa

SEQ ID NO: 40124 - DNA, 402 bp, Neisseria meningitidis; identical to SEQ ID NO: 36186

SEQ ID NO: 40125 - DNA, 1311 bp, Neisseria meningitidis
atggacacttcaaaacaaacactgttggacgggatttttaagctgaaggcaaacggtacgacggtgcgtaccgagttgatggcgggtttgacaacttttttgacgatgtgctacatcgttatcgtcaaccctctgattttgggcgagaccggcatggatatgggggcggtattcgtcgctacctgtatcgcgtctgccatcggctgttttgttatgggttttgtcggcaactatccgattgcactcgcaccggggatggggctgaatgcctatttcacctttgccgtcgttaagggtatgggcgtgccttggcaggttgcgttgggtgcggtgttcatctccggtctgattttcatcctgttcagcttttttaaagtcagggaaatgctggtcaacgcactgcctatgggtttgaaaatgtcgattgctgccggtatcggtttgtttttggcactgatttccctgaaaggcgcaggcattatcgttgccaatccggcaaccttggtcggtttgggcgatattcatcagccgtccgcgttgttggcactgttcggttttgctatggtggtcgtattgggacatttccgcgttcaaggcgcaatcatcatcaccatcttgaccattaccgtcattgccagcctgatgggtttgaatgaatttcacggcatcatcggcgaagtaccgagcattgcgccgacttttatgcagatggattttgaaggcctgtttaccgtcagcatggtcagtgtgattttcgtcttcttcttggtcgatctatttgacagtaccggaacgctggtcggcatatcccaccgtgccgggctgctggtggacggtaagctgccccgcctgaaacgcgcactgcttgcagactctaccgccattgtggcaggtgcggctttgggtacttcttccaccacgccttatgtggaaagcgcggcgggcgtatcggcaggcggacggaccggcctgacggcggttaccgtcggcgtattgatgctcgcctgcctgatgttttcacctttggcgaaaagtgttcccgcttttgccaccgcgcccgccctgctttatgtcggcacgcagatgctccgcagtgcgagggatattgattgggacgatatgacggaagccgcacccgcattcctgaccattgtcttcatgccgtttacctattcgattgcagacggcatcgccttcggcttcatcagctatgccgtggttaaacttttatgccgccgcaccaaagacgttccgcctatggtatgggttgttgccgtattgtgggcactgaaattctggtatttgggctga

SEQ ID NO: 40126 - DNA, 816 bp, Neisseria meningitidis
atggaacgcattgatttagcattgaatttagttgaagagagaagccgacttggatactctcgaaagaattttgctgagcaaactggatgtagtgcagaaagtttgagactgtatgaaagcgggcaggtcaacattcctgcggactttttacttgctgctgtccaattaggggtggatattcaatttgtctttacaggcattcattcggcaaatttaaatgctgtttcagacgaccttaataaaaaattggacgacgctattggcaaatcaaacgttgagaatcagattaacggcaacgtcagtaacgctgttatcgcctcatctggttcggttgttcatcaaattaatacccaaaatcacgtcatcagaacccgtgtcgattcaaaacccggcaaggaacatataacgcttgagcaagcttcaaagctgcaacaacttgttaaacaagttgccgcagcagaagagattgccaaacggtcgccaaaatcaatccgtgcaatttgggctagtctgaatgctcactgtaaagttccaagttacaaactaatcgcattgagcgattacgacaaagcagaaacttatctcagaaaatggctgggtaggttgagcaatacagcaacatcaaagaacaacgatcccgactggcgaaaaaagaaatacgcttatatcaaattaaatgtaaaacagcttgagcttgaagattggttgaaaagttacctcgaaaaaaatttctcagtagaaagcctgactgaattaagtgatgaagatttgcaaaaaacatatgcagcagtatcgactaaaaaacggaaaaaatag

SEQ ID NO: 40127 - DNA, 804 bp, Neisseria meningitidis
atggcagacatcctgccatccgacaagcggcggcaaccgccaaaaacgaaaggaaatccaatgaacataatcgaacaagaaatgaaacactccagtctgagaaaagtagatgccgaaatcgccaaaatcattgcagacgcgcacaaaatcaacgccgaatccgtaaaaatagcccaagagtcccgctggtatcccatgatagcggccaccgggctggttaccgccatcgccgccgtgttggcactgatattcaaatttgcctgaccacaagccccgcgaggggctttatcccaacaaaatgaacagagccgcactattcaaccgctaccccgaatggattatcgggcaagacggcgcaagccgtttcattacccattgccgctatccccgcctgattgccaaaatccacaggcagacagacggcgaatgcccgggcgggcattaccgccattccgaaaacggcatcaccctttacgattttatttttttcgacggcaaaccggcagacgaagcccgatttgccgccgtccttaccgaaacctgccgcagggcagtcaaaaaaatatgcgaaacaaaataaaccgcaacgacatggaactcggctacacgccttacaaccttcgcacccttcgcaaccgctgcaaactgacacaggccgagttggcgcaaatcgtcggggtgaagcactacatacaggtaggccgctgggaagccgaacccgataccgaaacccgtcgggccgatatgccgctggaaaaatggcggcagttcctcgattggatagaaaaaacaaacgccgtctga

SEQ ID NO: 40128 - DNA, 431 bp, Neisseria meningitidis
atgtttgtgaacgagaaagatccttatgcggctctgtttgcgggactggtgtttttgacgctgccgtttgcgttggcggtgcatgatgcctttgcgcttgcgttcggacgggcggggctgctggtgtcggtgtcggacggcggattcggctggcgtggcggttgggacggcactgtttggtttgtgttcggtgtgtttgcgtttttgaatgtggttgtgtcggcgggcctgacgaaactggcgtacaaaaagatgatgcggcggcattcgcgtggattttcgagctgctgtttggcagtgccgccttgggcgggctgcgtggggaggcggtgttggaatatgcgtttgccgtgtggctggtgtcgatgctgacactgcccaaacgcttgacgcgcgcgccggtgcagccggtggtgtttcacaggaaaaaa

SEQ ID NO: 40129 - DNA, 195 bp, Neisseria meningitidis
atgccgtctgaaaaccgcagcgcggggtttgtggtgcattataccgtattgcaggacaaggcacagggcagggcggcggggtgcatcgtagcaactgtatttttgcccgacggggtgaaaaatacagttgctacacccactgataatgaaaaaagagagcaatgccgtctgaaccgcgtgttgcggcgagcataa

SEQ ID NO: 40130 - DNA, 699 bp, Neisseria meningitidis
atgacggaacctgcggccgaaggcggtaaagctgccaaggcgttaaaaaaatatctgattacgggcattttggtctggctgccgattgcggtaacggtttgggtggtttcctatatcgtttccgcgtccgatcagctcgtcaacctgctgccgaagcaatggcggccgcaatatgttttggggtttaatatcccggggctgggcgttatcgttgccattgctgtattgtttgtaaccggattatttgccgcaaacgtattgggccggcagattcttgccgcgtgggacagcttgttggggcggattccggttgtgaagtccatctattcgagtgtgaaaaaagtatccgaatcgctgctgtccgacagcagccgttcgtttaaaacaccagtactcgtgccgtttccccaatcgggtatttggacaatcgcattcgtgtccggtcaggtgtcgaatgcggttaaggccgcattgccgaaggacggcgattatctttccgtgtatgttccgaccacgccgaatccgaccggcggttactatattatggtaaagaaaagcgatgtgcgcgaactcgatatgagcgtggacgaagcattgaaatatgtgatttcgctgggtatggtcatccctgacgacctacacgtcaaaacattggcaggacctatgccgtctgaaaaggcggagttgcccgaacaacaa

SEQ ID NO: 40131 - DNA, 933 bp, Neisseria meningitidis
atggacatcgtatttgcggcagacgacaactatgccgcctatctttgcgttgcggcaaaaagcgtggaagcggcccatcccgatacggaaatcaggttccacgtcctcgatgccggcatcagtgaggcaaaccgggcggcggttgctgccaatttgcggggggggggtaatatccgctttatagacgtaaaccccgaagatttcgccggcttcccccttaacatcaggcacatttccatcacgacttatgcccgcttgaaattgggcgaatacattgccgattgcgataaagtcctgtatctggatatagacgtattggtcagggacagcctgaagcccttatgggataccgatttgggcgataactggcttggcgcgtgcatcgatttgtttgtcgaaaggcagaatgcttacaaacaaaaaatcggtatggcggacggagaatattatttcaatgccggcgtattgctgatcaacctgaaaaagtggcggcagcacgatattttcaaaatggcctgcgaatgggtggaacaatacaaggacgtgatgcaatatcaggatcaggatattttgaacgggctgtttaaaggcggggtgtgttatgcgaacagccgtttcaactttatgccgaccaatgatgcctttatggcgaacaggtttgcgtcccgccataccgacccgctttaccgcgaccggacttatacggcgatgcctgtcgccgtcagccattattgcggcccggcaaagccgtggcacagggactgcaccgcgtggggtgcggaacgtttcacagaattggcgggcagcctgacgagcgttcccgaagaatggcgcggcaaacttgccgtcccgcaccgtgtgtttccgacaaagcgtatgcttcaaagatggcgcagaaagctgtctgccagattcttacgcaagatttattga

SEQ ID NO: 40132 - DNA, 267 bp, Neisseria meningitidis
gtgtttgctgttattttcttttcgacattgggctgtattttagcatggataagagatattcctaaaataaaatcaaaaaaaattttggcaagatccttatatattataggaataataaatgtaataatcagctatgtattaattaaaaatatattttctgtttcggatggaggtggaataaaatatgttgcaatatatttatcaaatctttttttttggacagtattgatgtatgttcttgtgaaaagattatctaaaaagccaagc

SEQ ID NO: 40133 - DNA, 426 bp, Neisseria meningitidis
atgtctgaaccgattattacccctgccgccgtttatatttttggcggcgtggtcggcgcaggttatctgttggggatgcctgtcgatgcagtcgtgctgggcgcagtggcttcggcggcggtaacgatgataagcgagccgaaaagccgctggatggtagtggcctatatcgttatcggcgggcttttgggtggcgcttttgccccaccgctgacgcatttcttaatcggcgaagtagttggcagccatccgtcgctgggtgagcagcgcatacagtttgcacatgcctttgcccccgtcgttgtcggcttgttgtggcaggtattgttgagatttgcccgcgctgtctggccatcgttcgaaaagcatgcagacgatattgtggagtggctgctgaatcttctgccgtggagaccgaaaaaatga

SEQ ID NO: 40134 - DNA, 276 bp, Neisseria meningitidis
atgaaattacttttgattctttctgccgccccatcactgatttcggcgtacttgatgatttgtcgtctgaacgggcgcaaatggagtgcattgtcgccggaggcgtgggcgtatctcgcctttttaggtggagcgatctataccttttacatagtctttgcttacggactgacgccgagcttaggcaaatttatgatggatattgccgcctgtgtatatttcggcagccgttcggtacgggttgtcaaatggcggcatcggcatggtttgaaatag

SEQ ID NO: 40135 - DNA, 1398 bp, Neisseria meningitidis
atgaccccttccacactgaaaaaaaccgtcctgctgctcggcactgcctttgccgccgcatccgtccacgcatccggctaccacttcggcacacagtcggtcaacgcgcaaagcacggcgaatgccgccgccgcagaagccgccgacgcatcgaccatcttctacaaccccgccggcctgaccaaactcgacagcagccagatttccgtcaacgccaatatcgtatttccaagcatccgttatgaagcggattccgccaccgactttaccggcattcccgtccaaggttcgaaaagcggcaaaatcaccaaaaccacggttgcgccccacatctacggcgcatacaaagtcaacgacaatctgaccgtaggcttgggcgtgtacgtccccttcggctctgccaccgaatacgaaaaagattccgtattgcgccacaacatcaacaaactcggtctgaccagcatcgccgtcgaacccgtcgccgcgtggaaactcaacgaacgccattccttcggcgcaggcatcatcgcccaacatacttctgccgagctgcgcaaatatgccgactgggggatcccaaaaaaagcgcaaatgctgcaagcaacaccttctaatcctactgccgctgctcaaatcaaagccgacggacacgccgatgtcaaaggcagcgattggggcttcggctaccaactggcgtggatgtgggacatcaacgaccgcgcacgcgtgggcgtgaactaccgttccaaagtctcacacacgctcaaaggcgatgccgaatgggcggcagacgacgcaatggcgaaacaactgtggaatagcaatatgctcgcaccgctcggctacacgccaagcgaaaaagcccgcgttaaaatcgttacgcccgagtctttgtccgtacacggtatgtacaaagtgtccgacaaagccgacctgttcggcgacgtaacttggacgcgccacagccgcttcgataaggcggaactggtttttgaaaaagaaaaaaatattgctaatggcaaaaaatccgaccgcaccaccatcacgcccaactggcgcaacacctacaaagtcggcttcggcggctcttatcaaatcagcgaaccgctgcaactgcgcgccggcatcgcttttgacaaatcgcccgtccgcaacgccgactaccgcatgaacagcctgcccgacggcaaccgcatctggttctccgccggtatgaaataccatatcggtaaaaaccacgtcgtcgatgccgcctacacccacatccacatcaacgacaccagctaccgcacggcgaaggcaagcggcaacgatgtggacagcaaaggcgcgtcttccgcacgtttcaaaaaccacgccgacatcatcggcctgcaatacacctacaaattcaaataa

SEQ ID NO: 40136 - DNA, 363 bp, Neisseria meningitidis
ttgtgcgaaggcgatattgttttcttcggcggtcgggacggggccgctgtcgggaatatctttttcgacggcttcgcagacggcggacactttggggacggtgcgcaatacggcttcgcaaccttcaacgctgtcgatgccgcgagcgattcggcgggcgggattgcgggtgctgccgttttggaaatagtagaggacgaggattttgagggggatttgggttcatgggcggattccgttaaaatggttcggtcttcagacggcataacagttgttccgatgccgtctgaaacagccgcagttcaggcatttgttcctgacggcaaaattggctataacatcgggcatcaatgcccaacttac

SEQ ID NO: 40137 - DNA, 2226 bp, Neisseria meningitidis
atgaaactcgaagcaagcaagcagcagaagtttaaaaaatcatttattataagtctatttttttctattctttatacctctcctcttttggctgttgattatgtttacgacaaaaccaagctcactgatgatgaaattacccgcttaaaaaaacttcgcaatagaaatagtgaatattggaaagatgatttgttcaggattgatataccaaaagaaactggtctccgtcatgacattgagggggcagcaacaggaaatttctcgtatccaattttttcttataagacttttgataacgatactattgatcctgacaaaaagatctcttttttcgacagcccttatacccccggctacacggctgctttcgtgcagggatttggcgttaaagaaagaaatggcgatacggaagaacaggctaaaaaatatatcgatgaattgagaacaaaattaaaaaccgctcctataatcgcagccgcccagctgggatattttcaattaaatgatggaagcggcgatagctggctgtataattattatcgcaatgatattttcaattcttatggaacagtaaaacatagcaatattaacagtgaaattcttgctgttggtaatgttgctgatttgtattataaacacttcataagaaatccatttatatatgtggattggtctttatggactagctcccttcctagattaaaagtttccgaaaattcccacgttattgggcaaattattcatctttaccgattggacttagaaaattctctttgggagcctcgttgggattctgatgttagttatttaaatttattcaatagccatattcgttttaataccaaaaatgaaagccttgttgtaggcgaaagccgcattagaccaacccccgataatgcctcatcacccgaaaaatttttcaaaagagaatttaccgatataggttatcagagtggctcgccagtcattacgtgtgattactcgggatgccgtgatggttattcgggtaactcaagtattcactttgcttatgatttaagcgaaagagaggctgacaagcccgtattaacgttaaaaagcaaggtaacagggaaaacagctattgtttttgaagaaaaagccttaaacaatttaaaaaacctgacttaccgacagctcatcaaaacagaaaccgatgttgaaccagatgcgttttttcttttagaagaatataaaaaaggcagatatcgtttatttttacgacaatgtccaaacggtttttgtatcggtgtagaaaaactcgccattccgactcatcttgtcgcctcctatgcacaacaggctcaagccgccaataccttattctccttgcgtttgaacgacaaaaacagcgatatttttgaccgcactttaccacgcaaaggcttgtggttgcgtgtgattgacggacattctaagcaatgggtgcaaggcaaaacagcacctgtagaaggctatcgtaaaggtgtgcaactcggtggcgaggtgttcacatggcaaaacgaaagtaatcaactttccgttggcttaatgggcggacaagcagaacaacgtagtactttccgcaacccagatacagacaatcttacaacgggaaatgtgaaaggctttggtgcaggcgtttacgccacttggcaccaacttcaggacaaacagacaggtgcgtatgcggatagctgggtacaatatcaacgtttccgccaccgtattaacactgaagatgctacagaacgttttacttcaaaaggtattactgcctcaattgaagcaggttacaatgctttattggcggaacacttcactgaaaaaggcaaccgtgttcgtttttacctgcaaccacaggcacaattgacttatttgggggtaaacggaaaattcagcgatagcgaaaatgcccaagtgaatttgcttggcttccgccaattacaaagccgagtgggcgttcaagctaaagcgcaattttcgctctataaaaatatcgctattgaacctttcgccgctgtgaacgcgctttaccacaacaaacctttcggtgtggaaatggacggagagcgtcgagtgataaacaataagacggcaattgaaagccaattaggtgtagcagtgaaaatcaaatctcacttaactttacaagcctcattcaaccgccaaacaagcaaatatcatcaggctaaacaaggtgcgttgaatttgcagtggacgttttaa

SEQ ID NO: 40138 - DNA, 2082 bp, Neisseria meningitidis
atgacactgaaagcaagcaagcaagcaagcaagcaagcaagcaagcaagcaagcaagcaagcaagcaagcaagcaagcggtcgggttaatctattaacattatctgttttatcgctgttttgcacgccatatgtttgaggttcggatgcgtacgatcccgtcaaagaagccgagattaaaaacaaatttattttagaagcggcggaagacagaaattcccacgtttggcgcggcccgtgcagtgtgtcttttgattgcttcggtgctttcagttatcagcccggttcggatactcgttctacaaatattggcgatgctgccgatttttcattttcagacaagccggcaaacggcgtttcccattatttttccagcggtaaaaccgatccaaattcatctgaagccttgtatgacgaaatcaatatcacgggtaaaaactacaatagcggcatcctcgccgtcgataatatgcccgttgttaagaaatatgttacagagaattacggagctgatttaaagcaggcggttaaggatcaattaaaggatttatataaaacaagacccgaagattgggaaaaaaataaaaaaatagttgaggaagcgataataaaacaatatggaatacctagaaataaaattaataaatttagaaaagttattgatccaattatagaagaagctgtactcactcctcatagtaatacaacaccgaccaatctcgacaacatcttcaataaaaaattacacgtcaaaatcgaaaacaaatcccacgtcgctggacaggtgttggaactgaccaagatgacgctgaaagattccctttgggaaccgcgccgccattccgacatccatacgctggaaacttccgataatgcccgcatccgcctgaacacgaaagatgaaaaactgaccgtccataaggattatgcgggcggcgcggatttcctgttcggctacgacgtgcgggagtcggacgaacccgccctgacctttgaagacaaagtcagcggacaatccggcgtggttttggaacgccggccggaaaatctgaaaacgctcgacgggcgcaaactgattgcggcaaaaacggcggattccggttcgtttgcgtttaaacaaaattaccggcagggactgtacgaattattgctcaagcaatgcgaaggcggattttgcttgggcgtgcagcgtttggctatccccgaggcggaagcggttttatatgcccaacaggcttatgcggcaaatactttgtttgggctgcgtgccgccgacaggggcgacgacgtgtatgccgccgatccgtcccgtcaaaatatacggggtggcgcggctgcggacgggcggcgcaaaggcgtgcaaatcggcggcgaggtgtttgtacggcaaaatgaaggcagccggctggcaatcggcgtgatgggcggcagggtcggccagcacgcatcagttaacagcaaaggcggtgcggcaggcagtgatttgcatggttatggcgggggtgtttatgctgcgtggcatcagttgcgcgataaacaaacgggtgcgtatttggacggctggttgcaataccaacgtttcaaacaccgcatcaatgatgaaaaccgtgcggaacgctacaaaaccaaaggttggacggcttctgtcgaaggcggctacaacacgcttgtggcggaaggagttgtcggaaaaggcaataatgtgcggttttacctgcaaccgcaggcgcagtttacctacttgggcgtaaacggcggctttaccgacagcgaggggacgggggtcggactgctcggcagcggtcagtggcaaagccgcgccggcattcgggcaaaaaaccgttttgctttgcgtaatggtgtcaatcttcagccttttgccgcttttaatgttttgcacaggtcaaaatctttcggcgtggaaatggacggcgaaaaacagacgctggcaggcaggacggcgctcgaagggcggttcggcattgaagccggttggaaaggtcatatgtccgcacgcatcggatacggcaaaaggacggacggcgacaaagaagccgcattgtcgctcaaatggctgttttga

SEQ ID NO: 40139 - DNA, 501 bp, Neisseria meningitidis
atgtcaaactaccgaagggacttcacgcgcggggcacactattttttcacattggctttgcaagacaggacgaaggattacctgatacggcatatcgacaggctgcgcctcgcctatcgtgaaacgaaaatacgctatccgtttgaaacggcggcaatctgcgttttgccggatcatctgcatttcattatgcggctgcccgaaggcgaccacgattacccgatacggattgcatatttgaaaacacggttttcccaactcatccccaaaaaataccgcgcccccaacgaaagtaaaacaaaaaaacgcgaagccggcatttggcagcgcaggttttgggaacacctgatccgggacgaacaagatttaaacaaccaccgggattatatttatttcaaccccgtgaaacacgggtatgcggcgagtgtgaaggaatggcgttattcttccttcttcaaagacgttgaaaaaggcatttaccctttggattggggagggtaa

SEQ ID NO: 40140 - DNA, 459 bp, Neisseria meningitidis
atggaaaccccgaaactcagtgtcgaagccattgaaaaaggtacggttatcgaccatattcccgccggcagggggctgaccatcctgcgccagttcaaacttttgcactacggcaacgcagtaaccgtgggcttcaacctgcccagcaaaacccaaggcagcaaagacatcatcaaaatcaaaggcgtgtgcttggacgacaaagccgccgaccgcctcgccctgttcgcccccgaagcggtggtcaataccatcgacaatttcaaggtcgtgcagaagcggcatttgaacctgcccgacgaaatcgccgaagtgttccgctgtccgaacacgaattgcgccggccacggcgagccggtcaaaagccggttttatgttaaaaaacacaacgggcagacgcggctgaaatgccattactgcgaaaaaacctacagccgggattcggtggcggaagcctga

SEQ ID NO: 40141 - DNA, 921 bp, Neisseria meningitidis
atgcctaatccgctttacagacagcatatcatctccatttcggatttgtcgcgcgaacagttggaatgcctgcttcagacggcattgaaactgaagtcggagccgcgcggcgacctgctggaagggaaacttatcggttcgtgcttctttgaaccgtccacgcgcacgaggctgtcgtttgaaacggcggtgcagcggctgggcggcaaagttatcggtttctcggacggcgcgaataccagtgccaaaaaaggcgaaacgcttgccgataccgcccgcatcatttccggctacaccgacgcaatcatccaacgccaccccaaagacggcgcggcgcgcgtggcagcggagttttcgcgcgtccccgttatcaacgccggcgacggcacgaaccagcatcccagtcagacgctgctcgacctggttaccatttatgaaacacagggacgtttggacaagctcaaaatcgccatggcgggcgacttgaaatacggacgtaccgtgcattcgctttgtcaggcgttgaaacgctggaattgtgaatttgcctttgtttcgccgcccagcctagccatgcccgactatattaccgaagagttggacgaagccggctgccgataccgtatcctcggcagtttggaagaggcggcggaatgggcggacatcctgtatatgacccgcgtccagcgcgaacgtttcgatgaacaggaatttgccaaaatccaaggcaaattcaacctcgaagcgtctatgctcgcccacgccaaaccgaacctgcgcgtgctgcaccctttgccgcgcgtggacgaaatccatcccgatgtcgatgccacgccgcatgcctattatttcgagcaggcaaccaacggcgtttatgcgcgtatggcgatattgtcgctggtgttgaacgaagaagtgtga

SEQ ID NO: 40142 - DNA, 288 bp, Neisseria meningitidis; identical to SEQ ID NO: 36549

SEQ ID NO: 40143 - DNA, 576 bp, Neisseria meningitidis
  misc_feature 553, 554, 555, 556, 557: 'n' is a, c, g or t
atgatgatgcacgcttctgtccaaagccgtttcgcaccgatactttatgttttgattttctttgccggttttttgaccgcgcaaatctggttcaatcagaaagcctatactgaagagctgcctccgcttctgtccgcattgtccgctgtcgcgctggtgtggctggcgtgggcgttcgtgtcggcgcgttcaaaggctaaggcggaaaagttctaccgcgaaaaaatgatacagaacgaaagcatacatcccgtcctgcacgcttctttgcaacacttggaacacaagccgcaaatgctcgccctgctggtcaaaaaccacggcaaagggatggcggaacaggtcaggttcaaggcggaagtgctgcccgacgacgaagacgcgcgcacgattgccgccgagttggcaaaaatggatatgtttgcattggggacggacgcggtcgcctcgggcgaaacctatggacgcgtgttcgccgatattttcgagttgtcggcggctttggaagggcgcgcgttcaaaggaatgttgaaactgacggcggaatataaannnnncacacacttaattaattaa

SEQ ID NO: 40144 - DNA, 120 bp, Neisseria meningitidis
atggcgggaaataaaacaaaagcgcgcgtatcaaaaaataacaatgcaaagaacggtgttggcaattttaaggtttgcgccttagccgcacttattcgcaaaaaaaccgcacggcgttga

SEQ ID NO: 40145 - DNA, 639 bp, Neisseria meningitidis
  misc_feature 624, 625, 626, 627, 628: 'n' is a, c, g or t
atgaagataacgcactgcaaattaaagaaaaaagtacagaaagaactgctccgtttttttgtactggaagttaccgcccgttctgccgccgatattttgggtatccatcccaattcggcagcactgttctaccgtaaaatccgcacggttatcaaccatcatttggccttggctgccgatgaggtttttgagggccctgtcgagcaggacgaaagcgatttcggcggacggcgtaaaggcagacgtggtcggggtgcggcaggaaaagtggttgtcttcggcattctgaaacacaacggacgggtctataccgttatcgtagataatgccaaatctgaaacgttactccctgtcatcaaaaagaaaatcatgccggacagtattgtttataccgatagtctgagcagctgcgacaagttggacgtgagcggttttatccattaccgcatcaaccattccaaggaatttgcagaccgtcagaaccacattaacggcattgagaacttttggaatcaggcaaaacgcgtcttgcgaaaatacaacggaatcgatcgtaaatctttcccgctgttcttgaaagaatgcgaatttcgatttaacttcggcacaccgtctcaacagctnnnnncacacacttaa

SEQ ID NO: 40146 - DNA, 2085 bp, Neisseria meningitidis
  misc_feature 6, 7, 8, 9, 10: 'n' is a, c, g or t
gtgtgnnnnntcggcgcgtacggcaacttcaacgccaaccgcaacacttccgagccggaaaacttttccgaagtaaccatcaccaaaggcgcggactcgctcaaatccggcagcggcgcattgggcggcgcagtcaattaccaaaccaaatccgcaagcgattatgtttccgaagacaagccctaccatttggggataaagggcggcagcgtcggcaaaaacagccaaaaattcagcagcatcaccgccgccggcaggctctttggtttggatgccttattggtttatacccgccgcttcggcaaagaaaccaaaaaccgctcgaccgagggcgatatcgaaattaaaaacgacggatatgtctataacccgaccgatacaaacggacccagcaaatggctggattacgtagccacaggggttgcgcgctcccaacccgacccgcaagaatgggtaaacaaaagcaccctgttcaagctgggctacaatttcaacgaccgcaaccgcatcggctggatttttgaagactcccgcaccgaccgttttaccaacgagctgtctaatttgtggacgggtacgaccacgtctgccgcaacgggcgactaccgccaccgccaagacgtgagctaccgccgccgctccggcgtcgaatacaaaaacgaattggaacacggcccgtgggacagcctcaagctgcgctacgacaagcagcgcatcgatatgaacacttggacttgggacatcccgaaagattacgatacaaacggcatcaacggccaggtttaccattcgttccggcatatccgccaaaacaccgcgcaatggactgccgattttgaaaaacaactcgacttttccaaagccgtttgggcggcgcaatacggcttgggtggcggcaagggggacaatgccaactcggattacagctatttcgcaaaactgtacgaccccaaaatcctcactaccaaccaaggcaaaatcacaatgctgatcgaaaaccggtcgaaatataaatttgcctattggaacaatgcgtttcacttgggcggcaacgaccgcttccgcctgaatgcgggcatacgctacgacaaaaacagcagcagcgcgaaagacgatccgaaatacaccaccgccatccgggggcagattccccatttgggttcggaacgcgcgcacgcgggcttcagctacggcacggggttcgactggcggtttaccaagcatctgcacttgttggcaaaatacagcaccggcttccgcgcaccgacttcggacgaaacctggctattgttcccgcatcctgacttttaccttaaagcaaaccccaacctgaaggcagaaaccgccaaaaacttcgagctgggacttgccggcagcggcaaagcaggaaactttaaattctccggtttccaaacccgctaccgtaattttatcgaactgacctacatgggcgtatcctcagacaagcctaacagccctaattatgcgccgatttccgacggtactgcattggtcagctcgcccgtttggcaaaaccaaaaccgctcctcggcatgggtgaaaggtttggaatttaacggcacatggaacctcgacagcatcggtttgccgcaaggcacgcacgcaggtgtcaatgtcagctacatcaaaggcaaggccaaacaaaccaacggacaggaaacccctattaacgccctttcgccatggagtgcggtttacaatctgggctacgacgctccttccaaacgttggggcatcaacgcctacgccacgcgcaccgccgccaaaaagccgtccgacaccgtccacagcaacgacgacttgaacaacccgtggccttatgccaaacacagcaaggcctatacgctgttcgacctttccgcctacctcaacatcggcaaacaggttacgctccgcgccgccgcgtacaacattaccaacaagcagtactacacttgggaatctttacgcagcatccgcgagttcggcacggtcaaccgcgttgacaacaaaacccacgccggcatccaacgctttacctcgccgggcaggagctacaatttcaccatcgaagcgaagttctaa

SEQ ID NO: 40147 - DNA, 129 bp, Neisseria meningitidis
ttgcattgttattttttgatacgcgcgcttttgttttatttcccgccatcccaaaaacgaagagcggcaggaatttatcggaaaaacagcaacctttccgccgtcattcccgcgaaagcgggaatctag

SEQ ID NO: 40148 - DNA, 525 bp, Neisseria meningitidis
  misc_feature 506, 507, 508, 509, 510: 'n' is a, c, g or t
atgacttataccattacccccatcggcaccgcccgatcgccctacaaacagaaattcggcatcgcccgccagcccggtttagcctctgccgcagaagtatgcatcgagctgaatcccgaatttaccgcagacagcgtgcgcgggctggaagatttcgattatgtgtggataagttttatttttcacggcgtattggatgaaggctgggcgcaaatggtgcgcccgccacggctcggcggcaaacaaaaaatgggcgtgttcgccacgcgcagcccccaccgccccaaccatctcggactctcgctcctgaaactcgaacgcatcgaaaccggcaaacccgtccgcctctattgcagcggcgcagacctgttggacggcacaccaattatcgacataaaaccctacatcccctttgtcgaatccaaacccgatgcatcatcccggcttcgtcagcggcaaacccgagagcttgaagttgtatggctggaaaacatcggcgcggaaannnnncacacacttaattaa

SEQ ID NO: 40149 - DNA, 159 bp, Neisseria meningitidis
atgaaaacccccctccccatctgcaccctgtcggcactcgccgcctgcaccctttccggacaaggcggcactcaggtttacggcgaaatcaaagcccgagacctttgcgttaccgctcctatcctgctttctgctttctgtcttgcctgctctcgttga

SEQ ID NO: 40150 - DNA, 1635 bp, Neisseria meningitidis
atggcagcaaaagacgtacaattcggcaatgaagtccgtcaaaaaatggtaaacggcgtgaacattctggcaaacgccgtgcgcgtaaccctgggtcccaaaggccgcaacgtggtggttgaccgcgctttcggcggcccgcacattaccaaagacggcgtaaccgtcgctaaagaaatcgaactgaaagacaagtttgaaaatatgggcgcgcaaatggtaaaagaagtcgcgtccaaaaccaacgacgtggcgggcgacggtacgactaccgccaccgtactggcgcaatccatcgttgccgaaggtatgaaatacgttaccgccggtatgaacccgaccgacctgaaacgcggtatcgacaaagccgtcgccgctttggttgaagagctgaaaaacatcgccaaaccttgcgacacttctaaagaaatcgcccaagtcggctctatttccgccaactctgacgaacaagtcggcgcgattattgccgaagcgatggaaaaagtcggcaaagaaggcgtgattaccgttgaagacggcaaatctttggaaaacgagctggacgtggttgaaggtatgcaattcgaccgcggctacctgtctccttacttcatcaacgatgcggaaaaacaaatcgccggcttggacaatccgtttgtattgctgttcgacaaaaaaatcagcaatatccgcgacctgctgcctgttttggaacaagtggccaaagccagccgtccgctgttgattatcgctgaagacgtagaaggcgaagccttggcgactttggtggtgaacaacatccgcggcattctgaaaaccgttgccgttaaagctccgggcttcggcgaccgccgcaaagcgatgctgcaagacatcgctatcctgaccggcggcacagtgatttccgaagaagtcggcctgtctttggaaaaagcgactttggacgacttgggtcaggccaaacgcatcgaaatcggtaaagaaaacaccaccatcatcgacggcttcggcgacgcagcccaaatcgaagcgcgtgttgccgaaatccgccaacaaatcgaaaccgcaaccagcgattacgacaaagaaaaactgcaagagcgcgttgccaaactggcaggcggcgtggcagtaatcaaagtcggtgccgcgaccgaagtggaaatgaaagagaaaaaagaccgcgtggaagacgcgctgcacgctacccgcgcagccgttgaagaaggcgtggttgcaggcggcggcgtagccctgttgcgcgcccgtgccgctctggaaaacctgcacaccggcaatgcagaccaagacgcaggcgtacaaatcgtcttgcgcgccgttgagtctccgctgcgccaaatcgttgccaacgcaggcggcgaacccagcgtggttgtgaacaaagtgttggaaggcaaaggcaactatggttacaacgctggcagcggcgaatacggcgacatgatcgaaatgggcgtactcgaccccgccaaagtaacccgttccgcgctgcaacacgccgcgtctatcgccggcctgatgctgaccacagactgcatgattgctgaaatccctgaagacaaaccggctatgcctgatatgggcggcatgggtggtatgggcggcatgatgtaa

SEQ ID NO: 40151 - DNA, 843 bp, Neisseria meningitidis
atgttagtctgcaacccctacgaagtcgtcatccacggcacaacgagttccggcaagattttccgtcccagcgactgggcggaacgcctgtgcggcattctgtcctcgttcaccaaagaccacaggctttcctattcgaaatgggtgcgccccatgctggtggacaacatccgctgcgtcgccgtcgataaaaaactggaaaccgacaacccccaaatgttccgcttcctgatggactttgccgccgacaacgacctgcgcgtcatcgactgcaaagccctgctcgaagaacgcgaacagggcggacaaaacaaccctgccgacgaacacgtcatgctggcacaggcaatcgaagaaaaacacgccgccgagaaagcacaggaacagaccgcctcgggcgcatcctacgttttgcgcgaaatcggcgcggacgacaccgccaccgcctttgcagccttgagcgttttgcgttccgccctgaccgacatcaaccgctttaccgaacaaatcaacaaaatccaacgcccccaaggctaccgcctgctgggtatttttgaagaaggcaaacacaacgccgtcgccgtctgcggcttccacgaagcctgcaccctcgccggcggccgccacatccacatcgacgacatcgttaccctgccgcaaagccgccgcaaaggctacgcctcgcgccttttggaagaagtccgcaaaatcggcgcggaaacaggggtaaccaaaatccacctcaacgtccacgtcaaccacgaccgtgccgacgcgcaccgcctgtatttcaaaaacggttttgaaatctgcgcataccacttccgttgcgaccccaaatga

SEQ ID NO: 40152 - DNA, 444 bp, Neisseria meningitidis
atgaaagcaatccaaaaaggtttcactctgatcgagctgatgatcgtcatcgccatcgtcggtatcttggcagccgtcgccctgcccgcataccaagactacaccgcgcgtgcccaaatgtccgaagccctgactttggcggaaggtcaaaaaaccgcagtggtcgagtattattccgacaacggcgtgttcccgaaaaacaatgcttctgcgggtgttgccagtgcttctgagattgtaggtaagtatgtggctaaggtagacgtttcgggtaataccattacgtctacaatgaaaacttccggtgtaaacaaagatatcagcggagcaacccttgtactggaaggcgcgcaaaaatctggctcgttcacgtggacttgtaaagcgggttcttcaaatggtgtgaaagacaaattcctgccgtcttcctgccgcgccaaataa

SEQ ID NO: 40153 - DNA, 747 bp, Neisseria meningitidis
  misc_feature 728, 729, 730, 731, 732: 'n' is a, c, g or t
atgctcgctatttattctatcaatattttgatttataatgaaaaaatgtttttcagagtgactttttactttgtaaaaaactttgtatcattctcaaaaactagaaaatcaaacgaaatgatgcaaaaacacaaatgtctaatagattttattttgactgttgccagccaaattgcttatgctgacttacctttaagtttggaagaattattgactgacaagggtaaattcaaactagaaagcagtattagctacatcaacactgaacgcaatcaaagcgaatttgctaatcctatttatgtgcaaaccagcgcaacgaaaattgcaactgtaatggctatgatgattacacctgtaatggcgcaaaatttagacagccaagtttttgacagccaaaatgtgaaagcaattcaattatcacaggctgaaatgaaagaaacacaaggtgaatttgttcccattattgcagccgctgcttttggcggtgcattaggtgcatgggggtatcatggtgctaatttgtataatcatggtaaattaggaactgcgcaaggcgcggctactgcggcaggaatcggtgcggcaacaggagtagcggcaacagggctggctgctgctgccggaggcggattggctgggaatttggcatggagaccgggtattcatgcactaggttttggtgccaatgctgccaacaatgcagtcaattctcggaaatatagtggatnnnnncacacacttaattaa

SEQ ID NO: 40154 - DNA, 741 bp, Neisseria meningitidis
atgaatcttttaatctccgacttccaaactccgcaacaacgcacccccgtcatcgtcgcccttgattttgccaacgaaaaagacacgctcggattcgtccgcaaccttgacccgacattgtgtcaaatcaaaatcggcaaagagctgtttaccgcgacgggacgcaatttggcagaaagcttaatcaatcaaggtttcaaacttttcctcgatttgaaataccacgatattccccacaccgtcgcgcaagcctgcaaagtcgctgccgacatgggcgtttggatggtcgatatgcacgcgtcgggcggccgccgtatgatggaagccgcagcagaagccgttgccggatacggtacaaagccgctcttaatcggcgtaaccgtgttgaccagcatggaacaaagtgatttggcggaaatcggtttgaacatcgctcccgaagaacaagtcatccgtttggcgaaactggcgcaaagttcgggcttggacggcgtggtctgctccgcccaagaagccgcaccgctgcgccgcgagttgggacaagattttgtcttggtcacgcccggtatccgcttggacgttgccggcaacaacgacgaccaacgccgcatcatgacgcccgccgaagccttggcggcaggttcgacttatctcgtgatgggccgccccgttacccaagccgccaatccgctagccgtattgcgcgaagtgaaccgcgtggcaaaccttgaagcaaactga

SEQ ID NO: 40155 - DNA, 1551 bp, Neisseria meningitidis
atgaaaaaacctttgatttcggttgcggcagcattgctcggcgttgctttgggcacgccttattatttgggtgtcaaagccgaagaaagcttgacgcagcagcaaaaaatattgcaggaaacgggcttcttgaccgtcgaatcgcaccaatatgagcgcggctggtttacctctatggaaacgacggtcatccgtctgaaacccgagttgctgaataatgcccgaaaatacctgccggataagctgaaaacagtgttggaacagccggttacgctggttaaccatatcacgcacggcccttttgccggcggatttggcacgcaggcgcacattgaaaccgagttcaaatacgcgcctgaaacggaaaaagttttggaacgcttttttgggaaacaagctccggtttcccttgccaataccgtttattttaacggcagcggtaaaatggaagtcggcgttcccgccttcgattatgaagaactgtcgggcatcaggctgcactgggaaggcctgacgggagaaacggtttatcaaaaaggtttcaaaagctaccggaacggctatgatgcccccttgtttaaaatcaagctggcagacaaaggcgatgccgcgtttgaaaaagtgcatttcgattcggaaacttcagacggcatcaacccgcttgctttgggcagcagcaatctgaccttggaaaaattctccctagaatggaaagagggtgtcgattacaacgtcaaattgaacgaactggtcaatcttgttaccgatttgcagattggcgcgtttatcaatcccaacggcagcatcgcaccttccaaaatcgaagtcggcaagctggctttttcgaccaagaccggggaatcgggcgcgtttattaacagcgaagggcagttccgtttcgacacgctggtgtacggcgatgaaaaatacggcccgttggacatccatatcgctgccgaacacctcgatgcttctgccttaaccgtattgaaacgcaagtttgcacaaatttccgccaaaaaaatgaccgaggagcaaatccgcaatgatttgattgccgccgtcaaaggcgaggcttccggactgttcaccaacaatcccgtattggacattaaaacttttcgtttcacactgccgtcgggaaaaatcgatgtgggcggaaaaatcatgtttaaagacatgaagaaggaagatttgaaccaattgggtttgatgctgaagaaaaccgaggcagacatcagaatgagtattcctcaaaaaatgttggaagacttggcggtcagtcaggcaggcaatattttcagcgtcaatgccgaagatgaggcggaaggcagggcgagtcttgacgacatcaacgagaccttgcgcctgatggtggacagtacggttcagagtatggcaagggaaaaatatctgactttgaacggcgaccagattgatactgccatttctctgaaaaacaatcagttgaaattgaacggtaaaacgttgcaaaacgaaccggagccggattttgatgaaggcggtatggtttcagagccgcagcagtaa

SEQ ID NO: 40156 - DNA, 1002 bp, Neisseria meningitidis
atgattgacagacaaacaaacgaacccaaacaaaaaacccgaatcatccttgcccccatgcaagggctggtagacgatgtaatgcgcgacctgctgacgcgtattggcggctacgacgaatgcgtcagcgaatttgtacgcattacccataccgtgcattcccgatccatatggttaaaatatgtccccgaaatcgccaacggaaacaaaacgcccgtcggcacgccctgcaccgtccagcttctaggcagcgatgcggacaatatggcggcgaatgcgctggaagccgtccgcttcggtgcggacaaaatcgatttgaacttcggctgccccgccccgacagtcaacaggcacaaaggcggcgcaatccttttaaaagagccgcaactgatattccacatcgtcaaaacgctgcgcgaacgtttgcccgcacatattccgctcaccgcaaaaatgcggctcggctatgaagacaaaagccgggctttggaatgcgcctgtgcgattgccgaagggggcgcatgcggactgaccgtacacgcgcgtaccaaagccgagggttacgaaccgccggcgcattgggaatggataaggaaaatccgagacagcgtcaatattcccgttaccgccaacggcgacgttttcagcctgcaagactatatcggcatcaaaacaatcagcggctgcaacagcgtgatgctcggtcgcggcgcggtcatccgccccgatttggcgcggcaaatcaagcaatacgagaacggcgggccggtcaaagacacggattttgccgaagtttccaaatggatacggcagtttttcgagctgtgcctgacaaaagaggcaaacaataaatacccgattgcccgccttaagcaatggctggggatgatgaaaaaaacgtccggcccggcgcaaacgctgtttgaccgcgtccgaacggttaaggatgcggatgaagtccgccgaatcctgaacgcatttgagcatgagatgaatgtttga

SEQ ID NO: 40157 - DNA, 234 bp, Neisseria meningitidis
atgaaccgccgaaaaatctatctgttgtctgttgccctcttcacactggcatttatgctgctcgtcctcttgggtgcttatctgctgaccgtcggcagcaaagccttcgccgtcgcgtccttccttttcgcattcggcgcactgttcggacaaatcggcagcctcgccctctacctgcggcacaaatccctacgcgccgcccaatccgccgcaaaggaaaaccgctatgtctga

SEQ ID NO: 40158 - DNA, 1413 bp, Neisseria meningitidis
gtgaaaatcctcattttaggcaacggacaggtaggttctaccgtcgcacaaaaccttgccgccatacccaacaacgacgtaaccgttatcgacatcgacgaaaaagcattgcaggaaacaggcagccgcctcgatgtccaaaccgttttcggcaacggcgcatcccccttcacattagaacgcgccggcgcggaagatgccgacttgctgctcgcgctctcccgcagcgacgaaaccaacatcgtcgcctgcaaagttgccgccgacctgttcaacatccccggccgcatcgcgcgcgtccgttccagcgaatacctcgaatacctcagccccaagctcgaaaacaacgaaaacggcagcctttccatattcggcataaccgaaaccatcagccccgaacagctcgttaccgaacagcttgccggcctgatagactgcccgggcgcattgcaggttttacgttttgcagacgaccgcgtgcggatggtcatcatacaggcgcggcgcggcggactgcttgtcggacgcagcattgccgacatcgcccaagatttgcccgacggggccgactgccaaatctgcgccgtttaccgcaacaaccgcctcatcgtccccgcgccgcaaaccgtcatcatcgaaggcgacgaaatcctatttgccgccgccgccgaaaacatcggcgcggtcatacccgaattgcgccccaaagaaaccagcacccgccgcatcatgattgccggcggcggcaacatcggctaccgcctcgccaagcagctcgaacacgcatacaacgtcaaaatcatcgaatgccggccgcgccgtgccgaatggatagccgaaaacctcgacaacaccctcgtcctgcaaggttcggcaaccgacgaaaccctgctcgacaacgaatacatcgacgaaatcgacgtattctgcgccctgaccaacgacgacgaaagcaacattatgtccgcccttttggcgaaaaacctcggcgcgaagcgcgtcatcggcatcgtcaaccgctcaagctacgtcgatttgctcgaaggcaacaaaatcgacatcgtcgtctccccccacctcatcaccatcggctcgatactcgcccacatccggcgcggcgacatcgttgccgtccaccccatccggcgcggcacggcggaagccatcgaagtcgtcgcacacggcgacaaaaaaacttccgccatcatcggcaggcgcatcagcggcatcaaatggcccgaaggctgccacattgccgccgtcgtccgcgccggaaccggcgaaaccattatgggacaccataccgaaaccgtcatccaagacggcgatcacatcatctttttcgtctcgcgccggcgcatcctgaacgaactggaaaaactcatccaagtcaaaatgggctttttcggataa

SEQ ID NO: 40159 - DNA, 924 bp, Neisseria meningitidis
atgccgtccgaacacccgttttcagacggcatttccacacccaaccccaaagaaaccatgaacgacaccgcccaaattaccgccagctacggccgccgctacatcgtgcgcacgcccgacggcacaacctacgaagccagcacgcgcaaaaaacgcgtcgatttcgcctgcggcgaccgtgtccgcatcagccccgtcaacgccgaacaagttgtgattgaagattttttaccgcgccaaagcctgctctaccgccaagacgcgtggaaaaccaaactcatcgccgccaacgttacccaactcctcatcgtaaccgccgccgtcccgagtccgagcgtgcggctgctgcaacgcgccctgcttgccgccgaagccgccggtattgaagccgtcatcgtcctgaacaaagccgacctgcccgaaaccgccctttggcgcgaaaaactcaaattctacgaaacgctgggttatcccgtcatcgaaacccgtgcgctggaaaacgccgacctcctgcgccccgtcctgcaagggcacagcaacatcctgctcgggcagagcggtatgggcaaatccaccctgaccaacgcccttttaggcagccaaaccgcccgcaccggcgacatttccgccgcactcgactcgggaaaacacaccaccacccacgcccggctttatgatttgaacggcgaaacccaactcatcgactccccgggtttgcaagaatttggtttacaccacctccaagccgccgatttgccgcgctatttccccgatttccgccaccttgtcgggcaatgccgcttccacaactgcacccaccgcgccgaacccagctgcgccttcaaagccgccgccgaaaccggggcggcaagccccgaacgcctcgcctttttgcagggcatcaccgacgaactgcccgggtaa

SEQ ID NO: 40160 - DNA, 897 bp, Neisseria meningitidis
atgtttcgtttacaattcgggctgtttccccctttgcgaaccgccatgcacatcctgttgaccgccctgctcaaatgcctctccctgctgccgctttcctgtctgcacacgctgggaaaccggctcggacatctggcgttttaccttttaaaggaagaccgcgcgcgcatcgtcgccaatatgcgtcaggcaggcatgaatcccgaccccaaaacggtcaaagccgtttttgcggaaacggcaaaaggcggtttggaacttgcccccgcgtttttcagaaaaccggaagacatagaaacaatgttcaaagcggtacacggctgggaacatgtgcagcaggctttggacaaacacgaagggctgctgttcatcacgccgcacatcggcagctacgatttgggcggacgctacatcagccagcagcttccgttcccgctgaccgccatgtacaaaccgccgaaaatcaaagcgatagacaaaatcatgcaggcgggcagggttcgcggcaaaggaaaaagcgcgcctaccagcatacaaggggtcaaacaaatcatcaaagccctgcgttcgggcgaagcaaccatcgtcctgcccgaccacgtcccctcccctcaagaaggtggggaaggcgtatgggtggatttcttcggcaaacctgcctataccatgacgctggcggcaaaactggcaaacgtcaaaggcgtgaaaaccctgtttttctgctgcgaacgcctgcctgacgggcagggtttcgatttgcacatccgccccgtccaaggggaattgaacggcgacaaagcccatgatgccgccgtgttcaaccgcaatgccgaatattggatacgccgttttccgacgcagtatctgtttatgtacaaccgctacaaaatgccgtaa

SEQ ID NO: 40161 - DNA, 204 bp, Neisseria meningitidis
atggcaaccggtatcgtaaaatggtttaacgacgctaaaggttttggtttcatcacgcctgatgaaggcggcgaagatttgttcgctcacttctcagcaatcaatatggaaggtttcaaaaccctgaaagaaggccaacgcgtctctttcgacgtaaccaccggccctaaaggcaaacaggccgccaacattcaggctgcttaa

SEQ ID NO: 40162 - DNA, 1092 bp, Neisseria meningitidis
atgagtttaaaatgcggcatcgtcggtttgcccaacgtcggcaaatccaccctctttaacgcgctgacccagtcgggtatcgaagcggcaaactatcctttctgtaccatcgaacccaacgtcggcatcgtcgaagtgcccgacccgcgtatggctgaattggcaaaaatcgtcaatccgcaaaaaatgcagcccgccatcgtcgaatttgtcgatatcgccggtttggttgcaggcgcgagcaaaggcgaaggtctgggcaaccagttcctcgccaacatccgcgaaaccgatgccatcgtcaacgtcgtgcgctgctttgacgacgacaacatcgtccacgtttccggcaaagtcgatccgattgccgacatcgaaaccatcggtacagagttggcgcttgccgacttggcaagtgtggaaaaagccatcgtccgcgaagaaaaacgcgcccgttcaggcgacaaagacgcgcaaaagctggtcgatttgtgcaaaaaactgctgccgcatctggacgaaggcaaacccgtgcgttccttcggtttggacgcggaagaacgcgcgatgctcaaaccgctgttcctgctgaccgccaaaccggcgatgtatgtgggcaacgttgccgaagacggttttgaaaacaacccgcacctcgaccgcctgaaagaattggcggcaaaagaaaacgcccccgtcgtcgccgtatgcgccgcgatggagagcgaaattgccgaattggaagacgacgaaaaagccgagttcctcgccgaaatgggcttggaagaacccggcttgaaccgcctgatccgcgccggctacgacctcttgggcctgcaaacctacttcaccgccggtgtgaaagaagtccgcgcgtggacgatacacaaaggcgataccgccccgcaagccgccggcgtgattcatacggattttgaacgcggcttcatccgcgcccaagtgattgcctacgatgattttgtctcgctcggcggcgaagccaaagccaaagaagccggcaaaatgcgtgtggaaggtaaggaatacgtcgtgcaggatggggatgtgatgcactttttgtttaatgtgtaa

SEQ ID NO: 40163 - DNA, 423 bp, Neisseria meningitidis
ttgtccgccgtttttattgcaccttacctgacggcatttcacgaacaagaaaaaacattcgaatatgcggaattgaccgttaccgcccccaaccgcagcggacgggcaatcaaactggatgcagacgggcagcattaccggctttcctgctatgggttcgacagtttgtgcacaggcggcaatatcggcagaaccatcagggcggagcaggttagagccgttttaagcgaaaccgtcggcaaaggttttttaaacggcgttctgttggaataccgcaacagtggcagtgtctatagcaataaagattttgcccgcacggaagaccgccttgtcgaagtgttggcacaacctgccgttttcagcctgaaactgggtattttgcttttattgcccgccattttcctgcgtttgaaaagaatgtga

SEQ ID NO: 40164 - DNA, 837 bp, Neisseria meningitidis
atgttactgctcaaaacgcccggcgtactgcccggcttcaaactcagccttggtctgaccgtattgtgcctgtcgctgctggtggttttgccgtttgcgatgatggcggcgaaggcggctgaaatcggctggggcggcttttggaacacgattgccgagccgaacgtattggcggccgtctggctgagtttgcggatgtcgttttatgcgatgctgaccaatgtcgtgttcggcacgctggtggcgtgggtattggtgcgctatgaatttccgggcaagggcttggcgaacgcgctggttgatttgccgtttgcgctgccgacggcggttacgggtatcgcgttggcgaccctgtatgcgcccaacggttggataggccgttttttcgagcctttgggcatcaaaatcgcgtttacacccgtcggcatttggattgcgctggtcgtcgtcagcctgccctttatcgtccgcgccgtgcagccggtgttggaggaattatcgggcgaatatgaggaagcggcggcgactttgggcgcaaaccgctttacgacgttccgccgcgtgctgctgccggaaatcacgccggcactcttgactggcgcgggaatgatgttcgcgcgggcaacgggggaatacggctcggtgatttttatcgcgggcaatattccgatggtttctgaaatcctgccgctgattattacgggcaagctggaacagttcgacgtacagggcgcgtcggcggtggcgttgtttatgctgctggtttcgtttgtgattctgtttgcgctgaacgtgatgcagtgggcgttgggcaggcgttcgggcgcgaagggttga

SEQ ID NO: 40165 - DNA, 783 bp, Neisseria meningitidis
atgaccgacatcctcaataaaatccttaccgccaaggcacaggaagttgccgcccaaaaagccgccgtcaacgccgaacacatccgcgcacttgccgaaaacgcaccgcccgtccgcagctttatcggttcgatacgcggcaaacaccgcctaaacctgcccgccgtcattgccgaaatcaaaaaggcaagcccgagcaaaggcctgatccgtccggacttccgacctgccgagattgcccgcgcctatgaaaacgccggagcggcgtgtttgtccgtactgaccgacgaaccctatttccaaggttcgcccgaatacctcaaacaggcgcgcgaagccgtatcgctgcccgtcttgcgtaaagacttcatcatcgacgaatatcaggtttatcaggcgcgcgcctggggggcggatgccgtcctgctgattgccgccgcactggaacgggaacaattggaacgctttgaagcggtggcgcacgaattgggtatgaccgtcctgctcgagctgcacgatgaaagcgaattggaaaaatgccgcaacctgaccacgccgttgtggggcgtaaacaaccgcaacctgcggacttttgaagtctccctcgaccaaaccctgtcgctgctgcccgcgctggaaggcaaaaccgtcgttaccgaaagcggcattacaggtaaggcggatgtggaatttatgcgggcgcgcggcgtgcacaccttcctgatcggcgaaacgtttatgcgtgccgacgatattgaagcagaagtgggcaaactcttctaa

SEQ ID NO: 40166 - DNA, 708 bp, Neisseria meningitidis
atggaaaaaatgagttttgaaatttaccgttacaacccggatgttgatgccaagccttatatgcagcgttacgagttggaattggaaccgaccgacgtgaaacttttggatgctttggtacgcctgaaagcacaagacgataccttgtctttccgccgctcctgccgcgaaggcatttgcggttctgacggtatgaacatcaacggcaaaaacggcttggcgtgtttgaccgatctgcgtggcttgaaacagccggttaaaattcgtcctctgccaggtctgcctgttatccgtgacctgattgtggatatgacccagttcttcaaacaataccattccgtcaaaccttatgttgtcaacgataatccgattgatgcggacaaagagcgtctgcaaactcaggaagagcgtaaagagttggacggtttgtacgagtgtattttgtgcgcctgctgttcgactgcctgcccgtcattttggtggaaccctgataaattcgtcggtccgtccggtttgctgaatgcttaccgtttcattgcggacagccgtgataccatcactaatgagcgtttggataatctgaacgacccataccgtttgttccgttgccacaccattatgaactgcgtagacgtatgtcctaaacacttgaatccgacccgagccatcggtaagattaaagagattatgttgaaacgggccgtttaa

SEQ ID NO: 40167 - DNA, 225 bp, Neisseria meningitidis
atgaagaaaaacgccccgaaatcgtttgaagaagccttgtcgcgcctcgaatcgctgacgcagtctatgcagggcgaaatgcccttggaagacgcgcttgccgcctatcaggaaggcaacgagctggtcaggtactgccaaaccaagctggcgcaagtcgaacagaaattacaggttttggatgcggacgggctgaaggagttgaaccttgaatccgacgaatga

SEQ ID NO: 40168 - DNA, 606 bp, Neisseria meningitidis
atgccgtctgaaatgcggatgtcccgattgatgttattgctgtcggcatttgtgcttgctgcgtgtaatgcccaaaaccggcaatcctgtgtacggcatcaggatttcgcacgtgtagccgtcgatttgtttcggagtgcctgcgtcctgactcaaggcagttttgaatcggtttccaagtttgccgctgtcggacattttgtccctgtcggaaaggaagacctgtcccatctgccgcccgctgttgcagaacccgatgtacaggtgttgtggacgcttgaacgcgatggcggcatttattatttgagcctgacgcgcgacagttgcagtgtgaaagccgagcgggcagacagtgccgcgctgttggaacattttgacggacttatccgacagccgccgaaaaataccaatatagaattaagggcagaacagtcggtgcaggcaccgtttgaaaccaggcaaatcagctatgcctggcgggaatcgggcagctccgaagaaaccgtattgaccgcacaaaccgccgattccccggatttacccgtacaggcagttttgaacctgacgcaccgttcccacaacgggaaacccctaattctcccctaa

SEQ ID NO: 40169 - DNA, 1332 bp, Neisseria meningitidis
atgaacacaacatcccaatttaccagtaatttctggaatatatatattgcagttattgtcttactgagctttatcgctttggcttggctgctgctgtctcaaaatgttgtcaaacgtccgaagaagggcgaagaagtacaaactacgggtcatgagtgggacggcattgccgaatacgacaatccgctgccccgctggtggttttggctgtgtgttttgacgtggctgttcggtatcggttatttggttatgtatccgggtgtcggcgactacaaaggtctgctgaaatggaccagccataaccaatatgaaaaagaggtcaaaaaagccgatgagcaatacggcaaactgtatgccaagtttgcggatatgccgattgaaaaagtggcaaaagaccctcaagccaagcaaatcgcccaaaacctgtttaacacttattgtatccagtgccacggctctgatgctaaaggctctaaaggttttccgaatctgaccgatagcgattggttgtggggcggtgatcccgataaaatccacgagaccatcgaaaaaggccgtgttgcgactatgcctgcctggggccctgctttgggcgaagaaggcgtgaaagacgttgcccattatgtgatgtccctttcaaaacccgaaggtcagtatgatgaggaacgtgccgcacgcggacaagccttgttcagcggtccgcctgccaactgtttcacttgccacggcgataagggacaaggtatccaaggtttgggtccgaacctgactgatgacgtgtggttgtggggcggtacgcaaaaatccattatcgaaaccattaccaacggccgcagcagccaaatgcccgcttggggacatttcttggataaagacaaactgcatattatgactgcttatgtatggggtctttccgataaagacggtaaagctccggtgaaaaaagccgagcctgcaccgactcccgcaccggcggcagaacccgcagcctctgctcctgcagaagcagcacaagccgcgtccgaagccaaacctgccgcagcagaacctaaagccgaggaaaaagccgcacctgctgccaaagcggacggcaaataggtttatgaaaccgtttgtgccgcctgccatggcaatgcgattccgggtattccccatgtaggcatcaaagccgattgggccgaccgcatcaaaaaaggcaaggacacgttgcacaaacacgcgatcgaaggtttcaatacgatgcccgcaaaaggctgtcgcggcgatttgagcgatgatgaggttaaagctgcggttgactatatggtcaaccagtcaggcggcaaattctaa

SEQ ID NO: 40170 - DNA, 423 bp, Neisseria meningitidis
atgaataaaaaccgtaaattactgcttgccgcactgctgctgattgcctttgccgccgtcaagctcgttttgttgcaatggtggcaggcgcagcagccgcaagctgtggcggcgcaatgcgatttgaccgagggttgcacgctgccggacggaagccgcgtccgcgccgccgccgtttcaaccaaaaaaccgtttgatatttatatcgaacacgcgcccgccggcacggaacaggtcagcatcagcttcagtatgaaaaatatggatatgggtttcaaccgctatatgttcgagcggcaaccgtcggggacttggcaggcagtacgcatccgcctgcccatctgtgtcgaaggcaggcgcgattttacggcggacattacaatcggcagccggacatttcagacggcatttaccgccgaataa

SEQ ID NO: 40171 - DNA, 567 bp, Neisseria meningitidis
atgagtctttacgctttgctcttgattgcgctggggatgtcgatggatgcgtttgccgtcgcattggcaaagggtgcggcggtcaggatgcctccgcgcaaaattgcagcaacggccttggtgttcggctcggttgaagcactcacgccgctggcaggctgggtaggcggtttttatgccaaaccgtttatcagcgaatgggaccattgggcggctttcgtcctgctgggcgggctgggtctgaaaatgatgcgcgaagggctgtccggcaaggcggaagatgtacgcgaaagcaaacgggaaagcctatggatgacggttttgactgcttttggaaccagtattgattccatgatagtcggggtgggcttggcgtttatggaggtaaacatcgcctttgccgccgcaatcatcggtatggcgacgacggtgatggtggcggtcgggctgacggcggggcgagtattgggcggattgttcggcaaacgcgccgagtttgccggaggtttggtgttgattgccatcggtacatggacgctcttgtcgcatttgggtttgattcaatga

SEQ ID NO: 40172 - DNA, 1161 bp, Neisseria meningitidis
atgagcaccttctttcagcaaaccgcccaagccatgattgccaagcacatcgaccgtttcccactattgaagttggaccaggtaattgattggcagccgatcgagcagtacctgaaccgtcaaaaaaaccgttaccttagagaccaccgcggccgtcccgcctatcccctgttgtccatgttcaaagccgtcctgctcggacaatggcacagtctctccgatcccgaactcgaacacagccccatcacccgcatcgacttcaacctgttttgccgtttcgacgaactgagcatccctgattacagtatagtggattaacaaaaaccagtacggcgttgcctcgccttagctcaaagagaacgattctctaaggtgctgaagcaccaagtgaatcggttccgtactatttgtactgtctgcggcttcgtcgccttgtcctgatttttgttaatccactatactttatgccgctaccgcaattggctggctcaagacaataccctgtccgaattgctcaaactgattaactgccaactgactgaaaaaggtttaaaaatagagaaagcatccgccgccgtcgttgatgccaccattattcagaccgccggcagcaaacagcgtcaggctatagaagttgacgaagaaggacaaatcagcggccaaaccacaccgagtaaggacagcgatgcccgttggatcaagaaaaacggcctctacaaactcggttacaaacaacatacccgtaccgatgaggaaggctatatcgagaaactgcacatcacccccgccaatgcccatgagtgcaaacacctgccgcctttgctggaagggatagccgaaggtacgaccgtctatgccgacaaaggctatgacagtgcggaaaaccggcaacatctggaagaacatcagttgctggacggcattatgcgcaaagcctgccgcaaccgcccgctgtcggaaacgcaaaccaaacgtaaccgatatttgtcgaagacccgttatgtggtcgaacaaagcttcggtacgctgcaccgtaaattccgctacgcccgggcagcctatttcggactgattaaagtgagtgcgcaaagccatctgaaggcgatgtgtttgaacctgttgaaagcggccaacaggctaagtgcgcccgctgccgcctaa

SEQ ID NO: 40173 - DNA, 1383 bp, Neisseria meningitidis
atggagaggtgtgggaaacggtctgtcggagtagaatacgcgtttgcgtttgaatacagtaagaagaaaagagagaaacttatgccgtctgaacatcaacacatatcatcattgctcgattttgaccgtacccatctgcttcatccctatacttccatgaccgatccgctgcccgtttatcctgtcaaacgtgcagaaggggtgtttatcgaattggcggacggcacgcggttgattgacgggatgtcctcctggtggtgtgcgatacacggctacaatcatcctgttttgaatcaggcggttgagacgcagatgaaacaaatggcgcacgtgatgttcggtggtttgacgcacgagccagcggtggagctgggcaagttgttggtcgggattttgccgcaggggctgaaccgtattttttatgcggattcgggttcgatttcggtggaagttgcgctgaagatggcagtgcaataccagcaggcgcggggtttgacggcgaagcagaatatcgcgacggtgcgccgcgggtatcacggcgatacttggaacgcgatgtccgtctgcgatccggaaacggggatgcaccatattttcggcagcgcgttgccgcagcgttattttgtcgataatccgaaaagccgtttctacgatgaatgggacggggcggatttgcagcctgtccgcgccttgtttgaagtgcatcatgcggatattgccgcctttattttagagccggtcgtgcagggcgcgggcggcatgtatttttatcatccgcagtatcttcgcggattgcacgatttgtgcgacgaatttgatatcatgctgatttttgacgaaatcgccactggattcgggcgcacgggcaagatgtttgcctgcgaacacgcggaggtcgtgccggatattatgtgtatcggcaagggtttgagcggcggctatatgacgctggcggcagcaatcacttcgcaaaaagttaccgaaacgatttcgcgcggcgaagcgggcgtgtttatgcacggcccgacgtttatggcaaacccgctggcgtgtgccgttgcctgcgcttcggtcaaactgcttttgtctcaagactggcaggcaaatatccgccgcattgaaagcatcttaaaaggccgtctgaaagccgcgtgggacattcgtggtgtgaaagacgtgcgcgttttgggcgccatcggcgtgatcgagttggaaaaaggcgtggatatggcgcgttttcaagcggattgcgtggcgcagggcatttgggtgcgcccgttcggcaggctggtgtatctgatgccgccttacatcatttcagacggcgttttgaccaaacttgccgacaaaaccgtgcaaatcttgaaggaacacagcaaatga

SEQ ID NO: 40174 - DNA, 225 bp, Neisseria meningitidis
ttgcagaaattctatgtgattgattttctttctttaaagtctatttttttaaataaatttgcgttaaaatatagtggattaaatttaaatcaggacaaggcgacgaagccgcagacagtacagatagtacggcaaggcgaggcaacgccgtactggtttaaatttaatccactatacagaaaatttatccaatggattgaccgtgaagaaaataaggtcgtctga

SEQ ID NO: 40175 - DNA, 786 bp, Neisseria meningitidis
atgagcagaatccggcaggcttttgccgctttggatggcggaaaggcattgattccctatattacggtgggcgaccccgatattcggacaactttggcaataatgcacagtatggttgcaaatggtgcggatattttagagttgggtgtgcctttttccgacccgatggcagacgggtcggttattcagcgtgcggcggagcgggcgttggcaaacgggatttcgctgcgcgatgtcttggatgtcgtcagaaaattccgtgaaaccgacacgcaaacgccggttgttttgatgggatatttgaaccctgtacataagatgggttatcgggagtttgctcaggaagccgcaaaggcgggtgtggacggcgtgttgacggtggattcccctgtcgaaaccatcgatccgctctatcgcgagctgaaggataacggggtcgactgtattttcctgattgcgccgacgacgacggaagaccgtattaaaaccattgccgagctggcaggcggatttgtctattatgtttcgctcaagggcgtaacgggcgcggcaagtttggatacggatgaggtttcgcgtaaaatagagtatttgcatcagtatatcgatattcccatcggtgtcggtttcggcatcagcaatgcggaaagtgcacgcaaaatcggccgggttgccgacgcagttattgtcggcagccggattgtgaaagaaatcgaaaacaatacaggcaacgaggctgccgccgtcggtgctttggtaaaagagttgaaggatgccgtgcgctga

SEQ ID NO: 40176 - DNA, 822 bp, Neisseria meningitidis
atgagcagtccgcgccatgtgttttacatttccgaccgtaccggtctgactgccgagaatatcggcgaggctttgctgaaccagtttggcaatctgtcgttcaaacgccatacgcatccgtttgtcgatacgccggaaaaggcgcgcgcggtggtggagaaggtcaatcggagccggcaggaaaacggtcagcgtccgattgcgtttgtcagtgtggttgatgacgaaatccgtcggattatcaaaggggcggatgcttttcagattaatttctttgagacttttttgggactgttggagaaagaactcaataccgaagccacggcatccgagcaggggcatcacagtatcggtaatacgaagcgttacgatgcgcgtatggaggcggtaaatttctcattgaaccacgatgacggggtcagcgataagaaccttcaggaagcggatgtaatcttgatgggtgtatcgcgttcgggcaaaacgccgacctgcctttacctcgccctgcaatacggcatccgtgcggcaaactatccgctgattcctgacgatttggaatcggccgatctgccgcgtatggtcaagccttatagggataagctgttcgggttgaccatccagccggaacgtttgcaggccatccgccaagagcgccgcccgaattcaacttatgccaaaatcgatacatgccgcagcgaggtggcagacgcgcagagtatgttcagacggcatggcattccgtttgcgaatacgacggataaatcggttgaggaactggcggtacacatccttcaggcgtgcaagctcaaacgcaggttttga

SEQ ID NO: 40177 - DNA, 1341 bp, Neisseria meningitidis
ttgcacacccttctagcttttatcttcgccatcctgattttggtcagtctgcacgaattcggacactacgccgttgcaaaattatgcggcgtaaaagtgctgcgtttttccgtcggcttcggcaaaccgttttttacccgaaagcgcggcgataccgaatggtgtttggcacccatccccttgggcggctatgtcaaaatggtcgatacgcgcgaaggcgaagtatcagaagccgatttaccctacgcttttgacaaacaacaccccgccaaacgcatcgccatcgtcgccgccggcccactgaccaacctcgcactggcggttttgctgtacggactgagcttttccttcggcgtaaccgaactgcgcccctacgtcggcacagtcgaacctgacaccattgccgcccgcgccggcttccaaagcggcgacaaaatacaatccgtcaacggcacacccgttgcagattggggcagcgcgcaaaccgaaatcgtcctcaacctcgaagccggcaaagtcgccgtcggcgttcagacggcatcgggcgcgcaaaccgtccgtaccatcgatgccgcaggcacgccggaagccggtaaaatcgcaaaaaaccaaggctacatcggactgatgccctttaaaatcacaaccgttgccggcggcgtggaaaaaggcagccccgccgaaaaagcaggcctgaaaccgggcgacaggctgactgccgccgacggcaaacccatcgcctcatggcaggaatgggcaaacctgacccgccaaagccccggcaaaaaaatcaccctgacctacgaacgcgccggacaaacccataccgccgacatccgccccgatactgtcgaacagtccgaccacaccctgatcgggcgcgtcggcctccgtccgcagccggacagggcgtgggacgcgcaaatccgccgcagctaccgtccgtctgttgtccgcgcattcggcatgggctgggaaaaaaccgtttcccactcgtggacaaccctcaaatttttcggcaaactaatcagcggcaacgcctccgtcagccatatttccgggccgctgaccattgccgacattgccggacagtccgccgaactcggcttgcaaagttatttggaatttttggcactggtcagcatcagcctcggcgtgctgaacctgctgcccgtccccgttttggacggcgggcacctcgtgttttatactgccgaatggatacgcggcaaacctttgggcgaacgcgtccaaaacatcggtttgcgcttcgggctcgccctgatgatgctgatgatggcggtcgccttcttcaacgacgttacccggctgctcggttag

SEQ ID NO: 40178 - DNA, 666 bp, Neisseria meningitidis
atggaaaatattgaagaatacgcactgctgtctcccgaagccctgctggaacgcctggataccgttttgagtatcagaatcggcggtaagggctgggaatccagtatgaccgccaactttgcacagacgctggtcgaaatacaggacagtctgtacagggttgtgtcaaccgtccaatacggggatgacaacctcaagcggttgacagcggacaaacggaagcagtatgagttgaacttcaagatttccgagggttctacgcgtgtagagtccgactttaaagagactttggttcggttcggtagagatatgcttcaagatatgccccctaaaatccgttcggcaacgctggtagcgttgacgaccctgcttgtcggaggggcgttgggttacggttatttggaatacctgaagcaggttgcttcggaagggtatcagaccgagcgtctgtataatgccgtcgaccgtcttgcagaatcccaagaacggataacgtccgccatcctgaagggtgctagaggtgccgatttcgtgcaaatcggcagacgttcctacagtagggaggatatatcggaggcaaatagacgtgcagagcgtgtcccgtatggcgcagagttggtttcagacggcaattttaccgctgttttatctgatatagtggattaa

SEQ ID NO: 40179 - DNA, 315 bp, Neisseria meningitidis
atggcgatgctgcccgaattgagacggatagcgggtttggccggcattgccccgcacccgagggagagcggggaaaccaaattcaaaagccgctgctttggcggaaggtctgcggtgcgtaaggcactgcatatggctaccgtggcagcgacacgttttgaaccgcttattcgggatttctaccaacgcctgccgtccgagggtaagccgtataaggttgccgttacggcatgtatgcgcaaactgctgacgatatcgaatgcccggatgcgtgattattttgccgaaaacgataccgccgaaaacggtatctaa

SEQ ID NO: 40180 - DNA, 279 bp, Neisseria meningitidis
atgccggccgtcgatttgatccgcgaacgcctgcagacgctcgatccgctggtgttggaaatcggcgatgagagccatctgcacaaaggacacgcgggcaataccggcggcggacattatgccgttttggtcgtcagcggccgttttgaaggcgtaagccgcctgaaccgccagaaaacggtcaaatcgctgctcaaagatttgttttcaggcggcatgattcacgcgctcggcatccgggcggctacccctgacgagtatttccatacggcggactga

SEQ ID NO: 40181 - DNA, 1458 bp, Neisseria meningitidis
atgaaaccaaccatcgcgcttgtcggccgccccaacgtcggcaaatctactttattcaaccgtttgacgcgcaccaaagacgcgctcgtacacgacctgcccggtctgacgcgcgaccgccattacggacacggcaaagtcggcagcaaaccttatttggtcatcgataccggaggtttcgagccggttgtggacagcggcattttgcacgaaatggcaaaacaaaccttgcaggctgtcgatgaagccgatgccgtcgtatttttggtggacggccgcaccggtctgaccccgcaagacaaaatcattgccgaccgtttgcgccaaagcccgcgccctgtttatctggcggtaaacaaaggcgaaggcggcaacagggccgtgcttgccgccgagttctacgaacttgctttgggcgacccttatgttatttccggtgcgcacggcgacggcgtgtattacctgattgaagaaattttagaaaacttccccgagccggaagtcgaagaagccgatgcaaaacatcccgtttttgccgtcatcggtcgtccgaacgtcggcaaatccacgctggtaaacgccattctcggcgaagagcgcgtgattgccttcgatatggccggcacgacgcgcgacagtatccatatcgatttcgagcgcgaaggcaaaccgtttaccatcatcgataccgcaggtgtgcgccgtcgcggcaaagtggatgaagcagtggaaaagttctccgttatcaaagccatgcaggcggttgaagcggcaaacgtcgctgttttggtattggacgcgcagcaggacatcgccgaccaagatgcgacgattgcaggtttcgctttggaggcaggccgtgctttggtggtggcggtcaataaatgggacggcatcagcgaagaacgtcgcgagcaagtgaaacgcgatatcaaccgcaaactgtatttcctcgattttgccaagttccactttatttccgcattgaaagagcgcggtatagacggtttgtttgacagcattcaggctgcctacaacgcggcgatgattaagatgccgacgccgaaaatcacgcgcgtcctgcaaagcgcaatcgagcgtcagcaaccgccgcgtgccggcttggtgcgtccgaaaatgcgttatgcccaccaaggcggcatgaaccctcccgtaattgtggtacacggcaattcgctgcacgcgatttccgacagctatacgcgctatctgacccaaacgttccgcaaagccttcaacctgcaaggcacgccgttgcggattcaatacaatgtttcagaaaacccgtatgaaaacgccgacgacaaaccgaagaaaaaaccgctgcgccgcgtcagcctgagcaaccgtattgagaaacgcgaaggccgcaaagaagagaaaaaccgcttcaagaagaaaaccaaagtcagtgtgaaaaaacaattcagcaaataa

SEQ ID NO: 40182 - DNA, 609 bp, Neisseria meningitidis
atgaaacccaaaccgcacaccgtccgcaccctgattgccgccattttcagccttgcccttagcggctgcgtcagcgcagtaatcggaagcgccgccgtcggcgcgaaatccgccgtcgaccgccgaaccaccggcgcgcaaaccgacgacaacgttatggcgttgcgtatcgaaaccaccgcccgttcctatctgcgccaaaacaaccaaaccaaaggctacacgctccaaatctccgtcgtcggctacaaccgccacctgctgctgctcggacaagtcgccaccgaaggcgagaaacagttcgtcggtcagattgcacgttccgaacaggccgccgaaggcgtgtacaactatattaccgtcgcctccctgccgcgcactgccggcgacatcgccggcgacacttggaacacatccaaagtccgcgccacgctgttgggcatcagccccgccacacaggcgcgcgtcaaaatcgttacctacggcaacgtaacctacgttatgggcatcctcacccccgaagaacaggcgcagattacccaaaaagtcagcaccaccgtcggcgtacaaaaagtcatcaccctctaccaaaactacgtccaacgctga

SEQ ID NO: 40183 - DNA, 423 bp, Neisseria meningitidis
atgctgattgggctgctgccttgggcattaatactcggtatgcagggcggacaaaaaggcatgagctggctggaaatgttgttgatgaccagtatgaacttcgccggcggctccgagtttgccacggtcaacctgtgggcggaatctctgccgatactgcttatcgccaccgtaacctttatgattaattcgcggcatatcctgatgggggcggcacttgccctgcacctgaaagaaataccgctgaaaaaagccgtgcccgcactgttttttatgtgtgatgaaagctgggcgatggcattctccgaaatccaaaaacggaaagcaaccggtttgcccgcattcaatatgcctttttatagtggattaacaaaaaccagtacagcgttgcctcgccttagctcaaagagaacgattctctaa

SEQ ID NO: 40184 - DNA, 567 bp, Neisseria meningitidis
atgccgtctgaagcctgttggcgtttcagacggcatattctgattgaaaagatgatgacactgaaaaccgccccgctcaaacgccgctttgccgccatgctgtacgaaatgctgctggtcggtgcggcaacctgtttggcagcattgtttgccggtattgccgccatttttctgaatcccgtttctatcgcggtttctgcattggtaacaagtatcctgataatgggagcatggtggctttatttccgcgccaactggcatggtcaggggcagaccttggcgatgaggacatggaaaatcggcttgtgcgaccttaacggcatacagccgtctttgcacctgctgcgcctgcgctttatttgggcgtgcatatttatcgtatttatccctatgttagcctatgccggattacgccacttcctcggcattccgcccaagggcgcggccggcgcggcattgatttggctgattttaccgtgggggtttgccctgctgaatcccgatcggcagtttctgtatgattttcttgcaggaacaagattggtggcggtcaaaggaaagccttaa

SEQ ID NO: 40185 - DNA, 1011 bp, Neisseria meningitidis
atgtccatcaaaatcctgattatttctcccagttggataggcgactgcgtgatgacccagcccttgttccgccgtttgaaggaacttcaccccggttgcacgattgatgtgttcgcaccgaagtggtcgatggaggtgtttgagcgtatgccggaagtgaatgagattcttgaaaatccgttcggacacggtgcgttggagttgaaacgccgttggcgggtcggtagggatttggggcggcgcggatacgatcaggttatcgtgttgcccggttctttgaaatcggcaatcatcgcgctggcgacaggtatcggtaaaaggacgggttatgtcggtgaaagccgttattttctgttgaacgatatacgcaggctggataaggaacgtctgcctttgatggtggaccggtatacggctctcgcgcatcagagtcaggaagattttgacgggcattcgggattccccgagttttccattgatgaacggcggcgggaaatttctgtcgaaactttcggtttgaatcttggaaagcctgttctggctttttgcccgggtgcggaattcgggccggcaaagcgttggccgacaaggtattttgctgagttgggcaaacattattcggcggcgggttggcaggtttggctgttcggttcgcaaaaagatgatgaaattgccgaggaaatcaaccgcctttcagacggtatgtgtgtcaatttgtgcggcaaaaccgatttgtcgcaggcaatggatttgctgtcgttggcggacacggtcgtgtgcaacgacagcgggctgatgcacttggcggcggcattgggcaggaaagtggtggcggtttacggttcttccagcccgacgcatacgccgcctttgagcgacagggcgaaaatcgtcagcctgcacttggaatgttcgccctgttttaagcgggaatgtccgctggggcataccgactgcctcaacaggctgtatcccgagaagattgtgcaggcggttgaagaggcggtatga

SEQ ID NO: 40186 - DNA, 1968 bp, Neisseria meningitidis
gtggggaacacctttaaatcaatccttgtctgggtcgccttgggtatcggcctgatggctgcgttcaacgctttagacggtaaaaaagaagacaacgggcaaatcgaatattctcagttcatccaacaggtcaacaacggcgaagtatccggcgtcaacatcgaaggatccgtcgtcagcggctacctgattaagggcgagcgcaccgacaaaagcaccttcttcaccaacgcgcctttggacgacaacctgattaaaacactgctcgacaaaaacgtccgtgtaaaagtaacgccggaagaaaaaccgagcgcgctggctgccctgttttacagcctgctgcccgtcctgctgctgattggcgcgtggttctactttatgcgtatgcagacgggcggcggcggaaaaggcggcgcattctcattcggcaaaagccgcgcccgcctactggacaaagatgccaacaaagtgacctttgccgatgtcgccggctgcgacgaagccaaagaagaagtgcaggaaatcgtcgattacctcaaagcgccgaaccgctatcaaagcctgggcgggcgcgtgccgcgcggcatcctgctggcgggcagcccgggtacgggtaagacgcttttggcgaaagcgattgcaggcgaagccggcgtgccgttcttcagcatttcaggttccgactttgtcgaaatgttcgtcggtgtcggtgcaagccgcgtccgcgatatgttcgagcaggcgaagaaaaacgccccctgcatcatctttatcgacgagattgacgcagtcggccgccaacgcggcgcaggtttgggcggcggcaatgatgagcgcgagcaaacattaaaccaattgttggttgaaatggacggttttgagagcaatcagactgtaattgtgattgcggcaaccaaccgccccgacgtactcgatcctgcgctgcaacgccccggccgtttcgaccgccaagtcgtcgtccccctgccggacatccgggggcgcgaacagattttgaacgtccattctaaaaaagtgcctttggacgaatctgtggatttattgtccctcgcgcgcggcacgccgggtttttccggtgcggatttggcaaacctggttaacgaagccgccctgtttgccggccgccgcaacaaagtcaaagtcgatcaaagcgattttgaagacgcaaaagacaaaatctatatgggtccggaacgccgcagtatggtgatgcacgaagacgaaaaacgtgcgacggcgtatcatgagtccggacacgcgattgttgccgaaagcctgccctttaccgaccccgtccacaaagtaaccattatgccgcgcggacgtgcgctgggtctgacttggcagcttccggagcgcgaccgcatcagtatgtataaagatcagatgttgagccagctctccatcctgttcggcggacggattgccgaagacatcttcgtcggacgcatctccaccggcgcatcaaacgactttgaacgcgcaacccaaatggcgcgcgaaatggtaacgcgctacggcatgagcgacaaaatgggcgtgatggtttatgcggaaaacgaaggcgaagtcttcttaggacgcagcgtaacccgttcgcaaaacatttccgagaaaacccagcaggacatcgatgcggaaatccgccggattttggacgagcagtatcaggttgcctacaaaatcctcgatgaaaaccgcgacaagatggaaaccatgtgcaaagccctgatggaatgggaaaccatcgaccgcgatcaggtactggaaatcatggcgggcaaacaacccagtccgcccaaggattacagccacaacctgcgcgagaatgcggacgcggcggaagataacgcgccgcacgctccgactcgggaagaaaccgaagcacctgccccggcagacaccgcttcgacagagtccgagcagcagcctgaaaacaaggcttaa

SEQ ID NO: 40187 - DNA, 957 bp, Neisseria meningitidis
atgattttaacaccgccggacacgccctttttcctccgcaacggcaatgccgacacgattgccgccaaattcctgcaacgccccgcacccacataccgccgcgagctgcttcccgacagcacgggtaaaaccaaagtcgcctacgatttttcagacggcatttcgcccgatgcgccgctggtcgtgctgtttcacggtttggaaggaagcagccgcagccattacgcggtcgaactgatgctcgcggtacgcagccgcggttggcacggcgcagtcgtccatttccgcagctgcggcggcattgccaacaccgctccggtgttctaccacttgggcgataccgccgaaatcgcctttactttggacacgcttgccgcgcgttaccgtgaaatatacgccgtcggcgtatcgctgggcggcaacgcgctggcaaaatatttgggcgaacggggcgaaaacgcgctgccgcaagccgctgccgccgtatccgcccccgtcgatgcagaggcggcaggcagacgcttcgacagcggcatcacgcggctgctctacacgcgctacttcctccgcaccctgatacccaaagcacggtcgctccacggttttcagacggcatttgccgcagggtgcaaaacactgggcgagtttgacgaccgcttcaccgcaccgctgcacggctttgccgaccggcacgactactaccgccgaacttcctgcaaaccgctgctcaaacacgttgccaaaccgctgctcctgctcaatgccgccaacgaccccttcctgccgcccgaagcgctgccgacaccggacgaagtgtccgaagccgttaccctgttccagccggcacacggcggacacgccggctttgtcggcagcaccggcggcaggctgcacctgcaatggctgccgcagaccgtcctgtcctatttcgacagcttccgcacaaacaggcgttaa

SEQ ID NO: 40188 - DNA, 537 bp, Neisseria meningitidis; identical to SEQ ID NO: 37832

SEQ ID NO: 40189 - DNA, 1527 bp, Neisseria meningitidis
atggattatccaccgcttaagggtgcggcattggcatggattacgctgtctttggggcttgccgtatttatggaagttttagatacgactatcgccaatgtcgccgttcccgttatcgccggcaacctcggtgcggcaaccactcaggggacgtgggtcattacttcttttgctgtggcaaacgccgtttccgtgccgttaacgggatttttggcaaaacgcatcggcgaggtcaaactgtttaccgccgccgccgtcggtttcgtcatcacatcgtggctgtgcggcatcgcgcccaaccttcagtcgctggttattttccgcatcttgcagggctttatcgccgggccgctgattcccttgtcgcaaagcctgttaatggcatcctatccgcccgcaaaacggacgctggcactggcgttgtgggcaatgaccgtcgttgtcgcccctgttctcgggccgatactcggcggttggatttccggaaactggcattggggttggattttcttcattaatatccctatcggtatcatatcggcatggataacatggaaacatttgaaacatcgggaaacggaaaccgtgaaaatgccgaccgactatgtcgggcttacattgatggtagtcggtatcggcgcgttacagatgatgctggacagggggaaggaacttgactggttcgcctctggagaaatcattaccttgggcgtagtcgcactggtgtgcttgtcgtattttattgtttgggaattgggagaaaaatatccgattgtcgatttatcgctgtttaaagatcggaattttaccgtcggcgtcattgccacgtcattgggttttatggtgtatatggggacgctgaccctgctgccgttagtgttgcagaccaacctgggctatacctccacgtgggcggggcttgccgccgcacccgtcggcatcctgcccgtcttcctgtctccgttaatcggcaggttcggcaataaaatcgatatgcgcctgctcgtaaccgccagcttcctgacttttgccttcactttctattggcgcaccgatttttatgccgacatggatatcggcaacgtcatctggccgcagttttggcagggggcaggcgttgccatgttcttcctgccgctgaccaccatcacactgtcgcatatgaagggcggacagattgccgccgccggcagcctgtcgaatttcttgcgcgtgctgatgggcggtgtcggcgtatcattcgtcagtaccctgtgggaacggcgcgaagcgttgcaccacacacgctttgccgaacacatcacgccctattccgcaacattgcacgaaacggcggcgcatttgtcccaacaaggcgtttccgacattcaaaccctaggcatcatcaacaataccattacccagcagggttttattatcggctcgaacgaaatctttatggcgggcagcttgttattcattatcatgatacccgtcatatggctggcaaaaccgccgttccacaacggcggcggcggtggacattga

SEQ ID NO: 40190 - DNA, 642 bp, Neisseria meningitidis
atgcaaaaacccgaaaccatacacatatccggtcctgccggcattttagaaaccatccatatcccgtccgaacaagtaccggcacgcggtgttgccgtcatcaatcatcccaaccccctccagggcggaacaaacaccaacaaagttatccaaactgccgccaaagccttaagcaaactcggcttccactgctacctgcccaaccttcgcggcgtaggcggcagcggaggcacacatgattacggacgcggcgaaacgcaagactgcctcgccgtcatcgattatgcccgcgcccaacaccccgaagcccccgaatttgccttatccggcttctccttcggcggttatgtcgccacatttgccgcacaagcgcgcacacccgatttattgctgctcatcggcgcggcagtctgccactataccggccgccccgagccgtccgccgttcccaatgttgccaaaacgctgatgatacacggcgcggaagacgaagtcgtcgaaatcgaaaaagccctgaaatgggcggaaccgcaagatttgcccgtcattaccatcgccggttccacgcatttctttcacggcaaactcatcgtcttgcgcgacaccatcctccgcttcgcgcccgtatgcctgaacggataa

SEQ ID NO: 40191 - DNA, 843 bp, Neisseria meningitidis
atggataaagaacgaattttaacccccgcagtcgtgttttccgtcgcactgctgcatttggcaatggtggcattgctctggcaggcgcacaagctgcccgtgatagagtcaggaaatgttatcgaatttgtcgatttgggtgattttggcggaggggacggtgcacccgaaggcgcaggtgcgcctgctgcgcctgagccgcaacctgagcctgagccgcccaaacctgtcgagccgcccaagccggttttgaagccggtggttacgaaaaaggcggatgcggatattcagcagcctaaggaagagccgaaacctgaagaaaagccgaaacccgaagaaaaaccgaaaccagagcctaagccggaagcgaagcctgtcccgaaaccggcggaaaaaccggtcgagaagccgtctgaaaaacctgccgaacatcccagcaatgcttctgccaaagcagacagcgagcagggtaatggggaagataagggaaccggtaccaaaggagacggaacggggcgcggagaaggcagcggtaaaggtagcggcggtgtcaaaggcgaacacggggaaggagccggcagcagcaaaggcaatcctttacgcgccaacggcagcattccgcgcccggcttatcccacgctttctatggagaatgacgagcagggtacggttgttttgagcgttttggtttctccgggcggtcatgtcgagtccgttaaaatcgtgaaaagcagtggtttttctcggttggacaatgcggcacgcaaggcggcgcaaaacgggcattttcaagccaatgcctggacggagtttaaagtccccgtcaagtttgaattgaattag

SEQ ID NO: 40192 - DNA, 429 bp, Neisseria meningitidis
atggggttcgaaaaagttgaacatttattgccggataccgtgttggacattgtggatgtcatcggactggcagcgacggaacagctggtcaaggcgattggcggggcgcggtttaaatttggtaagggcaaggtggacaccgagcgtttggcaattttggtcgaagccatcggcgaagtgaaaacacatgagctgttgcaggtatatggtggcgaggaattgtatgtcccacggtgcggcaaggcgttaatacagttgagaaaccataggttttatcaggagtttgtcaaattgcgcgatattgataaggagagcgggcttatggcgatgacgaagctatgccctaaatacggcatctcttcacgaacgggatatacgattatcaatgaaatgagccgacctgcggcacagcaggcagctttattttag

SEQ ID NO: 40193 - DNA, 1377 bp, Neisseria meningitidis
atgcacgacaaaacctggtccggacgtttcaacgaacccgtttccgaactcgtcaaacaatacaccgcctccatcggtttcgaccgacgccttgccgaatgggacatccaaggctcgcttgcccacgcgcaaatgctgaaagaaaccggcgtgttggacgaaggcgatttggcggacatccgtcggggcatggcggaaatcctcgaagaaatccgcagcggcaaaatcgaatggtcgtccgatttggaagatgtccacatgaacatcgaacgccgcctgaccgacaaaatcggcgacgcgggcaaacgcctgcacaccggccgcagccgcaacgaccaagtcgccaccgacatccgcctgtggctgcgtgaccagattaccgttatccaaagcctgattcaaaaccttcagacggcattgctggatttggcggaacaaaacgccgaaaccgttatgcccggctttacccacctgcaagtcgcccagcccgtcagcttcggacaccatatgctcgcctacgtcgaaatgctcggccgcgataacgaacggatggcggactgccgccgccgcgtcaaccgtatgccgctcggcgcagccgcccttgccgggacgacctacccgattcagcgcgaaattaccgccgagctattgggctttgaacaaatctgccaaaactcgctcgatgccgtatccgaccgcgattttgccgtcgagttcaccgccgccgcctcgctggttatggttcacctgagccgcctgtctgaagaattgattttgtggatgagtccgcgtttcggctttatcgacatcgccgaccgtttctgcacaggttcgtccatcatgccgcagaagaaaaaccccgacgtgcccgaactcgtgcgcggcaaatccggccgagtcatcggacaccttatcggcttgattaccctgatgaaatcgcagcccttggcgtacaacaaagacaatcaggaagacaaagaacctttgtttgacaccgccgacacgcttatcgacacgctgcggatttacgccgatatgatgcgcggcgtaaccgtcaaacccgacaatatgcgcgccgccgtaatgcagggttttgcaacggctaccgatttggcagattacttggtgaaaaaaggcatgcccttccgtgacagtcatgaagtcgttgcccaagccgtgcgccatgccgatgaagctggcgttgatttgagcgaactgccgcttgaagtcttacaaggcttcagcaagctgatttcagacgacgtgtacggcgtactgacacccgaaggcagcttaaacgcccgcaaccacttgggcggcaccgcgcccgaacaggtacgcctccaagtcaaacgctggcgtgaagtgttggcttaa

SEQ ID NO: 40194 - DNA, 1008 bp, Neisseria meningitidis
atgagcaccttctttcaacaaaccgcgcaagccatgattgctaaacacatcgaccgtttccctctattgaagttggatcaagtgattgattggcagccgatcgaacaatacctgaatcgtcaaaaaacccgttaccttcgagaccaccgcggccgtcctgcctatcccctgttgtccatgttcaaagccgtcctgctcggacaatggcacagcctctccgatcccgaactcgaacacagcctcatcacccgcatcgatttcaacctgttttgccgttttgacgaactgagcatccccgattacagcaccttatgccgctaccgcaactggctggcgcaagacgacaccctgtccgaactgttggaactgattaactgccaactgaccgaaaaaggcttaaaagtagagaaagcatccgccgccgtcgttgacgccaccattattcagaccgccggcagcaaacagcgtcaggccatagaagtcgatgaagaaggacaagtcagcggccaaaccacaccgagtaaggacagcgatgcccgttggatcaagaaaaacggcctctacaaactcggttacaaacaacatacccgtaccgatggggaaggctatatcgagaaactgcacatcactcccaccaatgcccatgagtgcacacacctgtcgccgttgttggaaggactgcccaaaggtacgaccgtctatgccgacaaaggctacgacagcaaggaaaaccggcaacatctgaaagaacatcggttgcagaacggcattatgcgcaaagcctgccgcaaccgtccgctgacggaaacgcaaaccaaacataaccgatatttgtcgaagacccgttatgtggtcgaacaaagcttcggtacgctgcaccgtaaattccgctatgcgcgggcagcctatttcgggcttctcaaagtgagtgcgcaaagccacctgaaagcgatgtgtttgaacctgttgaaagcggccaacaggctaagtgcgcccgctgccgcctaa

SEQ ID NO: 40195 - DNA, 753 bp, Neisseria meningitidis
atggacaaagatttgtatgccgtattgggcgtgtcgccgcaggcgggggcggacgaaatcaaacgcgcctaccgcaagctggcgatgaaataccatcccgaccgcaatccgggcaatccgcaggcggaagaaaagttcaaagaaatccaacaggcttacgatacgctttccgacctgtcgaaacggacgcaatacgacgcgtccttcagacggcatgaggaacgcgggcggcaggaagaggcattccgccgcgaacaggcgcgcagggagcagttttaccgcgaacaggcgcgcagggagcagttttaccgcgaacagatgcgccgcgaacaggcgttcagacaggcgtttgaacggcaggcatcacgttcgtgccatacttacgaaccgtccagcggcggaagcgggcgcaactatgtcctcgccgcctacatcctgttcggtttgggtgcaatcatgctgttcatgcccatagtcggcgtgattttcgcctatatgcccatagtcggcgtgattctcgcctatatgaaacggaacagtttggacagcattgtctatgccgcacataccgaatacctgattaaaaccttttggcgcacattttggctttatattttgggtgcgctgactgcccttttgggtatcggcgtgctgattattattgcaacgaacgtctggtatttctaccgcatcatcgccggctttatccgcttcaacggcggcagggcggttgcacccgagaaatggatatag

SEQ ID NO: 40196 - DNA, 669 bp, Neisseria meningitidis
atgaagacttttaaaaatatattttccgccgccattttgtccgccgccctgccgtgcgcgtatgcggcagggctgccccaatccgccgtgctgcactattccggcagctacggcattcccgccacgatgacatttgaacgcagcggcaatgcttacaaaatcgtttcgacgattaaagtgccgctatacaatatccgtttcgagtccggcggtacggttgtcggcaataccctgcaccctacctactatagagacatacgcaggggcaaactgtatgcggaagccaaattcgccgacggcagcgtaacctacggcaaagcgggcgagagcaaaaccgagcaaagccccaaggctatggatttgttcacgcttgcctggcagttggcggcaaatgacgcgaaactccccccagggctgaaaatcaccaacggcaaaaaactttattccgtcggcggtttgaataaggcgggtacaggaaaatacagcataggcggcgtggaaaccgaagtcgtcaaatatcgggtgcggcgcggcgacgatgcggtaatgtatttcttcgcaccgtccctgaacaatattccggcacaaatcggctataccgacgacggcaaaacctatacgctgaaactcaaatcggtgcagatcaacggccaggcagccaaaccgtaa

SEQ ID NO: 40197 - DNA, 447 bp, Neisseria meningitidis
atgagactgaccaccaaagggcgtttcgccgttaccgctatgctggatttggcgatgaacgcgcaaaccggcgccgtcaaactcagtgccatcagcgaacgccaaaacatatccctctcctatctcgagcaattgttcggcaaactccgccgcgccggactggttgaaagcctgcgcgggcccggcggcggctacatcctcgccgcaccggcggcacgcatcaacatcgcccaaatcatcgccgccgccgaagaccggctggacgcgacccaatgcggcagcaaagccaactgccaccacggcgcgccctgcctgacgcacgacctttgggagaatttaaacaaaaccatcaacgactacctcggcagcgttaccctgcaaagcatcatcgaacagaaaaacaacggcgacggcagccgcgtcgtccaatttacacacatccattaa

SEQ ID NO: 40198 - DNA, 372 bp, Neisseria meningitidis
atgaataaaaccttgtctattttgccggtggcaatcttactcggcggctgcgccgccggaggcggtaacacattcggcagcttagacggtggcacaggcatgggcggcagcatcgtcaaaatggcggttgggagccaatgccgtgcggaattggacaaacgcagcgaatggcgtttgaccgcgctggcgatgagtgccgaaaaacaggcggagtgggaaaacaagatttgcgcttgcgtcgcccaagaagcacccgaacggatgaccggcaacgatgtgatgcagatgctggctccgtccacgcgcaatcaggcacttgccgccctgaccgccaaaacggtttccgcctgcttcaaacacctgtaccgctaa

SEQ ID NO: 40199 - DNA, 1194 bp, Neisseria meningitidis
atgcaaaactatctgacccccaatttcgcctttgccccgatgattcccgaacgcgcttcaggcagccgcgtttgggatacggaagggcgtgaatatattgatttttcaggcggtatcgccgtcaatgcgctgggacactgccaccctgcccttgccgatgctttaaacgcgcagatgcacaagctgtggcacatttccaatatctatacgacgcgtccggcgcaggaattggcgcaaaaattggttgcaaacagttttgccgacaaggtttttttctgcaactcgggcgcggaagcgaatgaggcggcgttgaagctggcaaggaaatatgcgcgcgaccgtttcggcggaggaaaaagcgaaatcgtcgcctgtatcaacagtttccacggacgcacgctgtttaccgtgtccgtcggcggccagccgaaatacagcaaggattatgcacccctgccgcaaggcattacgcacgttccgttcaacgatattgccgcgctggaagctgccgtcggcgaacagacctgcgcggtcatcatcgagccgatacagggcgaaagcggcatcctgcccgccactgcggaatatttgcaaaccgcgcgccgtctgtgcgaccggcacaatgcgttgttgattttggacgaagttcaaaccgggatggggcatacgggcaggctgtttgcctatgaacattacggcgttgttcccgatattttgagttcggcaaaagccttgggctgcggctttccgatcggcgcgatgctggcgacagaaacgattgccgccgccttccaaccgggcacgcatggctcgactttcggcggcaacccgatggcgtgcgcggtcggcagccgcgccttcgacatcatcaacgcgccggaaaccttgcacaacgtccgcagccaggggcagaaacttcagacggcattgctggatttgggcaggaaaacaggcttgttctcacaggttcgcgggatgggactgctgctcggctgcgtgttggacgcgccttatcgcggacgcgcatccgaaataaccgccgccgccttgaaacacggcgtgatgattttggttgcgggtgcggacgtattgcgtttcgcgccttcgctgctgttgaacgatgaggatacggcggaaggtttgcggcgtttggaacacgtgctgacggaatttgccgccgcaaaccgcccctag

SEQ ID NO: 40200 - DNA, 684 bp, Neisseria meningitidis
atggaactggtatttatccgccacggacaaagcgaatggaacgcgaaaaacctgtttacaggctggcgcgacgtgaagctgagcgggcaggggcttgccgaggccgccgccgccggcaagaaactgaaagaaaacggctatgagttcgacatcgccttcacatccgtcctgacccgcgcgattaagacctgcaacatcgttttggaagaatccgaccaactgttcgtaccgcaaatcaaaacgtggcggctgaacgaacgccactacggccaactgcaaggcctggacaaaaaacaaaccgccgaaaaatacggcgacgagcaagtccgcatctggcggcgcagctacgacaccctgccgccgcttttggacaaagacgatgagttttccgcacacaaagaccgccgctatgcccatctgcctgccgatgtcgtacccgacggcgaaaacctgaaagtaacgctggagcgcgtattaccgttttgggaagaccaaatcgcccccgcgattttgagcggcaaacgcgtcttggtagcggcgcacggcaactccctgcgcgcgctggcaaaacacatcgagggcatttccgacgaagacattatgggcttggaaatcccgactggtcagccgctggtgtacaaattggatgacaacctgaaagtcatcgaaaaattctacctgtaa

SEQ ID NO: 40201 - DNA, 1410 bp, Neisseria meningitidis
atgacctccacattcccccgccgcctcgcccgcaaaatccgccaaacccgccgcctgtcgcgcaaaagcatcgcctttctgttccttttggcaggttcggcactcgtcgccctgaccgcgctgttttttgcccatcttgccgattttgcgctggaactgaacgccaaactggttcaacaatacccgtggttcgcgtgggtcgcgcttcctttgggtttgccgcttattgcgtggctcacacgcaaattcgcccccttcaccgccggcagcggcatcccgcaggtcatcgcctcactgtcgctgccctacggcgcacagaaaacgcggctgatccgcctcgggcagacgctgctgaagattccgctaacctttttgggtatgctgttcggcgcgtccatcggacgcgaaggtccgtccgtgcaggtcggcgcggcagtgatgggcgcgtggggcgcgtggtgcaagaaacacggcttggcattcaaagggatgcaggaaaacgatttgatggcggcgggcgcggcgggcggtttggcagccgcgttcaacgcgccgctggcgggcgtgattttcgccattgaggaactcgggcgcggcatcatgttgcgctgggagaggcaaattcttttgggcgtgctcgcctccggtttcatacaggtcgccattcagggcaacaacccgtatttttccggcttcaacggcggcgtattggaacatatctttctgtgggtcgcactgtccggcctggtttgcggcgcggcgggcgggctgttcggacgtttgctctatcgcggtgcggcggcgtttgcaccgcgcaagatacgcggcttcatccgcaaccgtccgctgctgctggcggcactgatggggctgctgctcgccctgctcggcacgttctaccaaggcaaaacctacggcaccggctaccacgaagccgcccaagccctgcacggcatctacgaagcccccttcggactcgccgccgccaaatggctcgccaccgtattcagctattgggcaggcgttccgggcggcattttcactccctcgctgaccataggcgcggttttgggcgagcatatcgccgccatcgccgacatatcgcagggtgcaaacatcatcgtcctcatctgcatggcggcatttctggcgggcgcgacacaatccccgattacttccgccgtcgtcgtcatggaaatgacgggcggacaaagcctgctgttttggatgctaattgcctgcattttcgcctcgcaggtttcgcgccagttttcgccgcgtccgttctaccacgcatcgggaatgcgcttccgccagcgcgtgcttcaagaaaccgccgcccaaaccggcaatgcgcccgcaagaccgcaaacagcaaacagcaaaacgggaatgccgtctgaaaattaa

SEQ ID NO: 40202 - DNA, 1254 bp, Neisseria meningitidis
atgtccgaacaacatatttcgacttggaaaagtaaaatcaacgcattggggccggggatcatgatggcttcggcggcggtcggcggttcgcacctgattgcctcgacgcaggcgggcgcgctttacggctggcagatcgcgctcatcatcatcctgaccaacctcttcaaatacccgtttttccgcttcagcgcgcattacacgctggacacgggcaagagcctgattgaaggttatgccgagaaaagccgtgtttatttgtgggttttcctgattttgtgcatcatttccgccacgattaacgctggcgcggtcgccatcgtaaccgccgccatcgtcaaaatggcgattccctcgctgatgtttgatgccggcacggttgccgccttgattatggcatcctgcctgattattttggtgagcggacgttaccgcgctttggatcgcgtttccaaaatcatcatcgttactttgagtatcgccacgcttgccgccgccggcatcgctatgtcgcgcggtatgcagatgcagcccgattttatcgagccgacaccgtggacgcttgccggtttgggcttcctgatcgcgctgatgggctggatgcccgcgccgattgaaatttccgccatcaattctttgtgggtaaccgaaaaacaacgcatcaatccttccgaataccgcgacgggatttttgatttcaacgtcggttatatcgccagtgcggttttggctttggttttccttgcactgggtgcgtttgtgcaatacggcaacggcgaagcagtgcagatggcgggcggcaaatatatcgggcaattgatcaatatgtacgccgttaccatcggcggctggtcgcgcccgctggtggcgtttatcgcgtttgcctgtatgtacggcacgacgattaccgttgtggacggctatgcccgtgccattgccgaacccgtgcgcctgctgcgcggaaaagacaaaacgggcaacgccgaattctttgcctggaatatttgggtggcgggcagcggtttggcggtgattttttggtttgacggcgtaatggcgaatctgctcaaatttgcgatgattgccgcttttgtgtccgcccccgtgttcgcttggctgaattaccgtttggtcaaaggtgatgaaaaacacaaactcacatcaggtatgaatgcccttgcattggcaggcttgatttatctgaccggttttaccgttttgttcttattgaatttggcgggaatgttcaaatga

SEQ ID NO: 40203 - DNA, 1449 bp, Neisseria meningitidis
atgaaaggcgatattggcgtaatcggtttggcggttatggggcaaaacctgattttgaatatgaacgattgcggatttaaggttgtcgcctacaaccgaacaatcggtaaggtggacgaatttttaaacggcgcggctaagggaacggatattgtcggcgcgtattccctgcaagacttggtcgataagctggcaaaaccgagaaaaatcatgatgatggttcgcgcaggttcggtggttgacgactttatcgaacaactgcttccgttgttggaagaaggcgacattgttatcgacggcggtaatgccaattaccccgacacgacacggcggacacattaccttgccgaaaaagggattttgtttgtcggcgcgggcgtatccggcggcgaagaaggcgcgcggcacggcccgtccattatgccgggcggggataagcgcgcttgggaagccgtcaaaccgatttttcaggcgattgccgccaaaacgccgcagggcgaaccgtgttgcgactgggtcggcaaagacggtgcggggcattttgtcaaaatggtgcataacggcatcgaatatggcgatatgcagttgatttgcgaagcgtaccagttcatgaaagacggcttggggctgtcttacgacgaaatgcaccgcgtgtttgccgagtggaacaaaaccgagctggattcttatctgattgaaatcacagcggcaattttgggctataaggacgaaggcggcgaaccgctggtcgagaaaatcctcgatacggcagggcaaaaaggtacaggcaaatggacgggcatcaatgctttggatttgggtattccgctgacgctgatttccgaagccgtattcgcccgctgcgtttcgtcgttcaaagaacagcgcgtgcagaccggcaagctgttcgcccgaaccgttacgcccgtcgaaggcggcaaacaagaatgggtcgaggcgttgagacaggccctgcttgcatctaaaatcatttcctacgcacaaggctttatgctgatccgcgaagcgggcgaaagctacggctgggatttggactacggcaacactgcgctgctgtggcgcgaggggtgcatcattcgcagcgcgtttttgggcaatatccgcgacgcgtatgaaaacaatccggatttggtgtttttgggcgaggacggatattttaaaaatattttggaaaactgccttccggcgtggcgcagggtggtcgccaaggcggtcgaatgcggcatccctatgccctgcatggcttcggcgattacgttcttggacggctacacgaccgaacgtctgcctgccaacctcttgcaggcacagcgcgactacttcggcgcgcacacttacgaacgcaccgacaaaccgcgcggcgagtttttccataccaactggacgggcaagggcggagataccgcttcgacaacctacgatatttga

SEQ ID NO: 40204 - DNA, 1527 bp, Neisseria meningitidis
atgaacacgccccttccttattccgattacctcatccgcatcctgacggcatctgtctatgatgtggcggttgaaacgcctttggaaccggcacgcagcctttctgtacgtttgaaaaacaacatccttttgaaacgcgaagatttgcagccggttttttcgttcaaaatacgcggcgcgtacaacaaaatgtccaagttgccgaaagatgcgctcgcttgcggcgtgattgcggcaagcgcgggcaatcatgctcaaggcgtggcattgtccgcacagcgtttgggttgccgtgccgttatcgttatgccggaaactacgccgaaaatcaaagtggatgcggttaaaagccatggcggcgaggtggttttgcgcggtgtttcatacaacgatgcctacgattatgcgatggagttggcggaaaaagaagggttaacctatatcgcgccgtttgatgatcctgatgtgattgcgggacaggggacggtggggatggaaattgtcagccagcatcccgatccaatccgcgccgtattcgtaccgataggcggtggcggtttggcggcgggcgtggcggcatttatcaagcaggtccgtcccgaaatcaaagttatcggcgttcagaccaacgattcctgctgtatgaagcagtcggtcgaagcgggtgaaatcgtccatttgaaagatgtcgggctgttttcagacggcactgcggtcaaagtcgtcggaaacgaaaccttccgcctctgcaaagaacttttggatgaaatcattacagtcgataccgatgcggtttgcggcgcggtcaaggatattttcgatgacacgcgcagcattaccgagccggcgggcgcgttggcgttggcgggtctgaaagcctatatcgcccgagaaggcgcggaaaaccaaaccctgattgccgttaccagcggtgcgaatatgaattttcaccgtttgcgccacgtttcggaacggagcgaattgggcgagggcaacgaaggtatttttgccgttaccatccctgaagaacgcggcagcttccttaagtttgtcaatatattgggaaataggaatattaccgagttcaactaccgctacggagacgatgaaaaagcgcatatctttgtcggacttcaagcggcaggcccgcaggatttggcggttatcggcagccggttggatgaggcgggattgctcaatgtcgatttgaccaacaatgagattgccaaaatccatatccgttatatggttggagggcggacggacaaagtagaaaacgagcgtctggtcagttttgagtttccggagcgtccgggggcgttggcgcgttttttgaaccatatgcagggagggtggaacattacgctcttccattaccgcaaccacggtgcggattacgggcggattttggtcggtatcgatgtgccgccgcacgatgccgccgcatttgacggtttcttggaaagtctgggatacagctatcacgaggaaacgcaaaatgccgcgtacaagctgtttcttgcctga

SEQ ID NO: 40205 - DNA, 792 bp, Neisseria meningitidis
atggatacgcaggcagttatcacacatatcgcccgatggttggacgaatacgccgctcaggcaaatgcaaaagggtttgtcgtgggcgtttccggcggcatcgattccgccgtcgtctccacactcgccgcccgcaccggccgccccacgctgcttctggatatgccgatacgccaacaccccggccagcttgagcgggcaaggctgcacatccgcaatctgcaacggcaatatgccaatgtaagcgcgcaaacggtcgacctgaccgacaccttccagacctttgaacaaaccgtcggcattcatcagacggcatttgacaatcagccgctttccctcgccaacgccagaagccgcctgcgtatgctgaccctgtactactacgggcagatacacggactgctggttacggggacaggtaataagattgaagatttcggcgtgggattttttaccaaatacggcgacggcggcgtagacatcagcccgattgccgacctgaccaaaacgcaggtttaccggcttgccgaagcattgggcgtggacgaggcgattcaaaaagccccgccgaccgacggcctgtgggatacggaacgcaccgacgaagaacagatgggcgcaagctatcccgaactggagtgggcaatgggcgtgtacggtacgcgcaaacccgaagattttgaagggcggcggcgcgaagttttggaaatctatacgcggcttcaccgcgcgatgcagcacaaaatcaacccgattcccgtgtgccgcattccgcccgaattgttgggctga

SEQ ID NO: 40206 - DNA, 1485 bp, Neisseria meningitidis
atgccgtataatcaagcccctgattttttatgcgccgacactatgcatccgacctattccgccgtacaggcgcggctgctcgaagccaaccgcctttcccccgaactgctcgccaaaagcctgtgcatcatcggcgcgcaccacgtcgattacgccgacatctactgccagcgcaccgcttatgaaagctggcatttggaagagggcatcgtcaaatcgggcagcttccaaatcaatcagggcgtgggcgtgcgcgccgtttcgggcgataaaaccgcctttgcctacgccgacagcctgtgcatcgattcgataaaccgttccgcccgcgccgtccgcgcgattggggcggcaggcggcaaggtgtccgccaaaatgccgtctgaaacgcgcggcaagccggtttgttccgcgtccgaccccattgccggcctcgattccgccgccaaagtcgcgctgttgaacaaagtggaagcaatcgccaaagccgccgatccgcgcatcgtgcaagtgatggccggtttgacctgcgaatacgatatggtttacctcgcccgtctggacggcaaacacgccgccgacatccgcccgatggtgcgcctgaacgttaccgttatcgccaaacagggcgaacgccgcgaacagggcagcgcgggcggcggcggacgctacgacttggcttatttcgatgaaaacttggtgcggcagtttgtcgatgccgccgtcaaacaggcactcaccaacctcgaatcccgccccgcgcccgctggcgaaatgaccgtcgttttgggcaacggctggccgggcgtgttgctgcacgaagcggtcggacacggtttggaaggcgatttcaaccgcaagggaaccagcgtcttttccggcagaataggcgagcgcgtcgccgccaaaggcgttaccgttgtggatcagggtgatattgccggccggcgcggttcgctcaacatcgacgacgaaggcaacgaaacccgccgcaccgtattgattgaagacggcattttagtcggctatatgcaggacgaaaccaatgcccgcctgacgggtacgcaatccaccggcaacggccgccgcgaaagttacgcttccgcccctatgccgcgcatgaccaatacctttatggaaaacggcagctatgagccggaagaaatcatcgcgtccatcgacaaaggcatttacgccgtcaacttcggcggcggacaggtggacattaccagcggcaaattcgtgttcagcgcgtccgaagcgtggtgggtggaaggcggcaggctgcaatatcccgtcaaaggcgcgaccatcatcggcaacggccccgaagtgctgaaacacgtttccatgataggcaacgatactgcgctcgacagcggtgtcggcgtgtgcggcaaagaagggcagagcgtccccgtcggcgtggggcaaccgactttgcggattgatgccggactgaccgtcggcggcagcgcaatctga

SEQ ID NO: 40207 - DNA, 747 bp, Neisseria meningitidis
atgaaaagcagcacgcaggccgttttggaacacaccgccattcccaagcatatcgccgtgattatggacggcaacggccgttgggcgaaaaaacgtttcctcccgcgcataatgggacacaaacgcggtttggacgcgttggaaaatatggtgaagcattgcgccaaactgggtgtgcaatatctgaccgtgtttgccttttcaaccgaaaactggcgccgccccgaagacgaagtttcgttcctgatggggctgtttttacaggctttgcaaaaacaggtacgccgcctgcacgaaaacaatatgcgcctgaaaatactgggcagccgcgaacgctttaatcggcagattctgcaaggcatcgaagaggcggaagccttgacggcaaacaataccggcctgaccctgagcattgccgccgattacggcggccgctgggatattttgcaggcggcaaacaaactgattgccgaaggcgtatccgagattacggaagacacgctggcgaaacacttgatgctgggcgatgcaccggaaccggatttgttcatccgcaccggcggcgaaacgcgcatcagcaatttcctgctctggcagatggcatatgcagaactgtatttcaccgatattttgtggcccgattttgacggcaaggctttggacgatgccgtcgcttcgttccaaaaacgcgaacggcggttcggacgcacctccgagcaactgcctatcgaacagcaaaggaactga

SEQ ID NO: 40208 - DNA, 1524 bp, Neisseria meningitidis
atgaatttgcctattcaaaaattcatgatgctgtttgcagcagcaatatcgttgctgcaaatccccattagtcatgcgaacggtttggatgcccgtttacgcgatgatatgcaggcaaaacactacgaaccgggtggcaaataccatctgttcggtgatggtcgcggcagtgttaaaaatcgggtttacgccgtccagacatttgatgcaactgcggtcggtcccatactgcctattacacacgaacggacaggatttgaaggtgtcatcggttatgaaacccatttttcaggacatggacatgaagtacacagtccgttcgatcatcatgattcaaaaagcacttctgatttcagcggcggtgtagacggcggttttaccgtttaccaacttcatcggacagggtcggaaatccatccggaggatggatatgacggaccgcaaggcagcgattatccgccccccggaggagcaagggatatatacagctattatgtcaaaggaacttcaacaaaaacaaagactaatattgtccctcaagccccattttcagaccgttggctaaaagaaaatgccggtgccgcctctggttttttcagccgtgcggatgaagcaggaaaactgatatgggaaaacgaccccaataaaaattggtgggctaaccgtatggatgatattcgcggcatcgtccaaggtgcggttaatccttttttaacgggttttcaaggagtagggattggggcaattacagacagtgcggtaagcccggtcacagatacagccgctcagcagactctacaaggtattaatcatttaggaaatttaagtcccgaagcacaacttgcggctgcaaccgcattacaagacagtgcttttgcggtaaaagacggcatcaattccgccagacaatgggctgatacccatccgaatataactgcaacagcccaaactgcccttgccgtagcagaggccgcaggtacggtttggggcggtaaaaaagtagaacttaacccgaccaaatgggattgggttaaaaataccggctataaaaaacctgctgcccgccctatgcagactttagatggggagatggcaggtgggaataagccaccaaaaccaagtacgcagcaacaccctacacactctgataacaatatcggcttacctgcctcatatgttaaacctgatacatctatttctccgacaggaacaattcaagaccgcatcagatggacaaagtccaagtttcctactgagaaatctttaaatggacatttcaaagctcatggaaaagaatttggcgatataaccattgaagactaccaaaaaatggcgtctgatttgttatcaaaacagacatcggacaagatattaggttatcagacggaacatagacgagtgcgctatgatatcaatatctatgttttggccaatccaaaaacattcaaaatcaaaacaatgtttaaaccaaacttaggaaagaagtattatgatggagaattcaaaaaagacatgggaaattga

SEQ ID NO: 40209 - DNA, 696 bp, Neisseria meningitidis; identical to SEQ ID NO: 37277

SEQ ID NO: 40210 - DNA, 1335 bp, Neisseria meningitidis; identical to SEQ ID NO: 38700

SEQ ID NO: 40211 - DNA, 1587 bp, Neisseria meningitidis
atggcacttttcctcagcatattccccatcgtcctgctgatttggctgatggtgaaaaaaaacagtatgccctcctacgtcgcgctgccgattaccgcagtgctgatttacgccatcaaacttttctacttcggcgatgcgggcatgctgctcaacgccaccgccgcttccggcctcgtcaaaacgctcacgccgattaccgtgattttcggcgcgattatgttcaaccgtatgatggaaaccacgggctgcattgatgtcatccgcaaatggctggcgaccatcagccccaaccccgtagcgcaactgatgattatcggctgggcttttgcctttatgattgaaggcgcatccggcttcggcacgcctgccgcgattgccgcgccgattctgatgagcttgggcttcaacccgttgaaagtggcgattttcactttggtgatgaactccgtccccgtctctttcggcgcggtcggtacgccgacctggttcggtttcgcaccgctgaacctgagtgccgaagacatcctcgccatcggcaggcagaccggcgtaatgcacttcttcgcaggtttcgtcatccccgtcatcggcttgggcttcatcgtaccttggtctgaaatccgcaaaaacttgggcttcgtcgccattgccgtcttctcctgcaccattccttatgtcgcattggcgatggtcaacgaagaattcccgtcgctcgtcgccggcgcaatcggcctgatggtgtccgtattcgccgccaaccaaggctggggcttgagcaaagaccacgccaaagacccgaatgccgaaaaagtgccgttcgcccaagtcgccaaagcactcgcccctttgggtatgctgatcggcatgctggtggttacgcgcatcaaacagctcggcatcaaaggcattttgaccagcaaagaagaatggttcagcttccaactgccgtttgatttgtccaaaatcaccgtcagcgactccctgacgattaccttcggcaatattttcggacaagatgtcagcgcgtcttaccaaacgctgtacgtcccggcttggattccgtttgtgctgaccgtttggatttgcatcctgctgtataaaaccaaattcaaagatgcctggacgatttattccgtaactttcaatcaaaccaaaaaaccgctgcttgccctgatgggcgcgctgattatggttcagctgatgctggtcggcggcgacaattcgatggtgaaaatcatcggtaaggaatttgccgcaatggcgggcgaacactgggtttatttctcgccgtatctgggcgcgatcggtgcgttcttctccggctccaacaccgtgtccaacctgactttcggcccgattcagcagcaaatcgccttggataccggcctgtccgttaccctgattctggcgttgcagtccgtcggcggcgcgatgggcaatatggtgtgcctcaacaacatcatcgccgtatgtaccgtattggatgtgaaaaattccgaaggtgcgattatcaagaaaaccgttatcccgatggcgatttacggcgtgattgccgtcgtcgcggcaatgattttcttcctctag

SEQ ID NO: 40212 - DNA, 432 bp, Neisseria meningitidis; identical to SEQ ID NO: 36206

SEQ ID NO: 40213 - DNA, 1128 bp, Neisseria meningitidis
atgaaaatcgtttttatcacaacagtcgcatccagcatttacggtttccgcgcccccatcattaaaaaattaatcggcaaaaaccatcaggtgtatgcctttgtatcggagttttccgacaatgaattggatactatcagggaaatgggggtaacacccgttacctaccgttcaaaccgcagcgggctgaacccgttttccgatataaaatccaccttcctcatctttaaagaactcaaaaaaatatcgccggatttggttttcccttatttcgcaaaacccgtgattttcggcacttttgccgcaaaactggcaggcgtgcccagaatcgtcgggatgctggaaggtttgggattcgcatttaccccgcagccggaaggcataccgttaaaaacaaaaatcataaaggggattttgattgccttgtaccacattgccctgccgatgttggaaagcctgattgtattaaaccccgacgacaaagacgaactgacggacaaatacggcatcaaaataaaaaacatccatattttgggcggaatcggtctggatttgcggcaatatccttattccgaggcggatattcccgatgaaaaagaacccgtaaaatttctctttatcggcagatttctgaaagaaaaggggattgatgattttattcgggcggcggaacaggttaaggacaaataccccgatacggtttttaccgctttgggcgcaatcgacaaatcacgcgcgggggggggcgatttggaacgccttgccgcccgcgatattatccgtttccccggttttgtgaacaatgtttccgaagtgataaaagaacatcatatattcgtattgccgtcttatagggaaggcgttccccgaagcactcaggaggcaatggccgtcggcagggcagtgattacgacggatgtccccggatgcagggaaacggtcgccgacaaggtcaacggcttcctgatcgaaccttggaatccccgcatcttggccgaaaaaatgatttattttatcgaaaacagggaagccatccgcctgatggggaatgcaagttatgcgattgccaaagataaattcgatgccgaaaaagtcgatttgaaattactcgatattttgaaggcgtaa

SEQ ID NO: 40214 - DNA, 726 bp, Neisseria meningitidis
atggaaacacaaaacaaacctaccgttaccgacattgaccgccccatactcgtcccgcccggcggacataaaaaagtcttgctgcattcctgctgcgccccgtgcagcggcgaagtgatggaggcgatgcttgcctccggcatcgactacaccatttatttttacaatcccaatatccatccgcacaaagaatatatgctcagaaaagaggaaaacgtacgctttgcggaaaagttcggcatccccttcatcgacaaagacgacgattacgaaaacgaccgcaaagaatggtttgccaaagccaaaggcatggagtttgagccggaacgcggcatccgctgcaccatgtgtttcgatatgcgttttgaaaaggcggcgcaatacgcgcatgaacacgggttccccgtctttaccagttcgctgggcatttcacgctggaaaaatatggcgcaaatcaacgactgcggacaccgcgccgccgcgccttacgatgatgtggtgtattgggatttcaactggcgcaaaggcggcggcagcgcgcgcatgattgaaatcagcaaacgtgaaaacttctaccagcaggaatattgcggttgtgcctattccctgagggattccaacgcccaccgcaaatcacagggcagaatccccatcaaactcggagtgttgtattacggcgacgaatcgacacaatacgaacctgcacccatccgggtggacaaataa

SEQ ID NO: 40215 - DNA, 1071 bp, Neisseria meningitidis
atgaacctgatttcacgttacatcatccgtcaaatggcggttatggcggtttacgcgctccttgccttcctcgctttgtacagcttttttgaaatcctgtacgaaaccggcaacctcggcaaaggcagttacggcatatgggaaatgctgggctacaccgccctcaaaatgcccgcccgcgcctacgaactgatgcccctcgccgtccttatcggcggactggtctctctcagccagcttgccgccggcagcgaactgaccgtcatcaaagccagcggcatgagcaccaaaaagctgctgttgattctgtcgcagttcggttttatttttgctattgccaccgtcgcgctcggcgaatgggttgcgcccacactgagccaaaaagccgaaaacatcaaagccgccgccattaacggcaaaatcagcaccggcaataccggcatttggctcaaagaaaaaaacagcattatcaatgtgcgcgaaatgttgcccgaccataccctgctgggcattaaaatctgggcccgcaacgataaaaacgaactggcagaggcagtggaagccgattccgccgttttgaacagcgacggcagttggcagttgaaaaacatccgccgcagcacgcttggcgaagacaaagtcgaggtctctattgcggctgaagaaaactggccgatttccgtcaaacgcaacctgatggacgtattgctcgtcaaacccgaccaaatgtccgtcggcgaactgaccacctacatccgccacctccaaaacaacagccaaaacacccgaatctacgccatcgcatggtggcgcaaattggtttaccccgccgcagcctgggtgatggcgctcgtcgcctttgcctttaccccgcaaaccacccgccacggcaatatgggcttaaaactcttcggcggcatctgtctcggattgctgttccaccttgccggacggctcttcgggtttaccagccaactctacggcatcccgcccttcctcgccggcgcactacctaccatagccttcgccttgctcgccgtttggctgatacgcaaacaggaaaaacgttga

SEQ ID NO: 40216 - DNA, 1467 bp, Neisseria meningitidis
atgatgaaattgggtttcaaaccgatacccctcgccattgccgcagtattgtgcgccctggttttggcactgcccgtacccgacggggtcaagcctcaggcttggacgctgctggccatgtttgtcggtgtgattgccgccattatcggcaaggccatgccgttgggcgcgctgtcgattattgccgtcgggttggtcgcagtaaccggcgtaaccgccgacaaaccgggcgcggcgatgagcgatgcgttgagtgcgttcgccaatccgttgatttggctgattgccatcgcagttatgatttcgcgcggtttgctcaaaacagggctggggatgcgtatcggatatttgtttatcgccgtttttggaagaaaaacgctgggcatcggttacagtctcgctctttccgaactgctgctggctcccgttaccccttccaataccgcgcgcggcggcggcattatacatccgattatgcagtcgattgccggcagttacggctccaatcccgcaaaaggcacagaaggcaagatgggtaaatatttggctttggtcaactatcattccaatcccatttcgtcggctatgtttattactgcaactgcccccaaccctttaatcgtcaacttgattgccgaaaatttaggcagtagtttccgtctttcttggggggcgtgggcgtgggcaatggctgttcccggcgttatcgcctttttcgttatgcctttgattttatattttttgtatccgcctgaaattaaagaaacgcccaatgccgttcaatttgccaaagaccgtctgagggagatgggtaaaatgtcggcagacgaaatcattatggcggtcattttcggtatcttgttgctgttgtgggcagatgttcccgcccttattaccggcaatcacgcttttagtatcaacgccaccgccaccgcatttatcggattaagcctgcttttgctttccggtgtattgacttgggacgatgttttgaaagaaaaaagcgcgtgggatacgattatttggtttggcgcattgattatgatggccgcatttttaaataaactcggactgattaaatggttctccggagtgttggcggaaagtgtcggcggtttgggcgttagcggcacggctgcgggcgtaatcctcgtgcttgcttatatgtatgcgcattatatgtttgccagtactactgcacatattaccgctatgttcggcgcatttttcgctgctgccgtttcactgaatgccccggcgatgccgaccgcgctgatgatggcggccgcatccaacattatgatgaccctcactcattatgcgaccggtacttcgcctgtgattttcggttcgggctacaccacaatgggagaatggtggaaggcgggttttatcatgagcgtggtcaattttctgatttttttcgttatcggcagcatttggtggaaagttctggggtattggtaa

SEQ ID NO: 40217 - DNA, 1878 bp, Neisseria meningitidis
ttgcaaaggtctctgtttggattgaattatttagccatattaaatacaataatcagcattccttgtatgaatcatcaatcaaactcaggcgaaggagtgcttgtggctaaaacatatttattgactacattgataatgtctatgacaatctctggatgtcaagtcatccatgccaatcaaggtaaggttaatactcattctgctgtcatcacaggtgcagacgctcacacgcctgaacatgcaacgggactgaccgaacaaaagcaggtgattgcaagtgattttatggtagcgtcagccaatccattagcaacacaagctggctatgatatcttaaagcaaggcggtagcgctgcagatgcgatggtggcggtgcagacgacactaagcttggtagagccacagtcgtcaggcttgggcggtggtgcatttgtgttgtattgggataataccgccaaaacattgaccacatttgatgggcgtgagacggcaccgatgcgtgcgacgccggaattatttttggataaagatggtcaaccattgaaatttatggaagcggtggtcggtggtcgctcggtgggtacgcctgctatccctaaactgatggagacgatacatcagcgatacggtgtattgccttggggaaaattatttgatacgccgatccgcttggcaaaacaaggctttgaggtgtcgccaaggcttgccatctcggttgagcaaaatcagcagcatttggcacgctatccaaaaacagccgcttattttttgccgaatggtgtgccgctacaagcaggcagcttgctgaaaaatttagaatttgctgacagtgttcaggcgttagcagctcaaggtgcaaaagctctgcatactggtaaatatgcccaaaatatcgtttcagttgtccaaaatgctaaggataaccccggtcaattatccttacaagatttatctgattatcaagtggttgaacgcccgcctgtttgtgtgacttatcgtatttatgaagtatgcggtatgggtgcaccaagctcaggtgggattgctgtgggtcagattttggggattttaaatgaattttcacccaatcaggtggggtatgatgctgaaggtttacgtctcttgggcgacgcttctaggcttgcgtttgcggatcgtgatgtatatttgggcgaccctgattttgtaccagtacccattcgccagttgatttctaaagactacctaaaacatcgcagccagctgcttgagcagtcggataaggcattgcctagcgtatctgcaggcgattttattcatgagtgggtgtcctcacaagcgattgagttaccttctaccagtcatatatcaattgtggataaggcgggcaatgtgctatcaatgacgacttccattgaaaatgcgtttggctcaactttgatggcaaatggctacctgctgaataatgagctgacagactttagttttgagccaataaagcagggcaaacaggtcgccaatcgtgtcgagcccggcaagagaccacgctcctcaatggcaccaaccatcgtatttaaagcaggcaagccttatatggcaatcggctccccaggtggtagccgtatcattggctatgtcgctaagacgattgtggcacatagtgactggaatatggatatccaagatgccatcagtgcacccaatttattaaatcgctttggtagctatgaactagaaacgggtacaaccgccctccagtggcaacaagcattaaatgatttgggctataagactgacgtgcgtgagctaaattcaggtgttcaagccattattatcgagccaagcaggctggttggtggtgccgatccacgccgagaaggtcgagtgatgggtgattag

SEQ ID NO: 40218 - DNA, 687 bp, Neisseria meningitidis
atggaaacctttaaagacagactggtttttttatggaaaagcgaagcgaagcaggcaaaaatcgcatccgatattgaaatgacgattgcgggcttcagcaggatatggaatgaaggcggtctgccgaagtctgaaacattaaaaaaaatcaagcagttgaaggggtgtagtatcgattggctgctgaccggggagggtaatccgtttccggatgaagccccaaaaaaatcccttgcttacgatactttgggcaatgaagtcgatacggacgagtttgtcttcgtgccgagatatgatattcgggcggctgcgggatacgggcagtttgtcgatcatgaggaaccggtatttacaatggcgttcagacggcattggattgagaattatgttacccgcgatacgaaaaacctgtctgtaatttccgtcaagggggattcgatggagggggttttgaatgacggcgattcgattttggtcaatcatggtgaaaatacgccgagggacggtctgtatgtgttgcggattaatgaaaatctgctggttaaacgtttacagattgtaccgggcgggattatcaatgtgatttctgcaaacgaggcttatcctgcttttgaaatcaatttgaacgatttgaccgatgatgtggagattatcgggcgtgtcgagtggttcggcaggacgatttga

SEQ ID NO: 40219 - DNA, 693 bp, Neisseria meningitidis
atgggacaaaagattaaccctacaggctttcgcctggcggtaactaaagactgggcttcaaaatggtttgctaaaagcaccgacttttctactgttttgaagcaggatatcgatgttcgcaattatttgcgtcaaaaattggccaatgcttcggttggtcgagtggttattgaacgccctgcaaaatctgcacgcattaccattcactccgctcgtccgggtgtggttatcggtaaaaaaggtgaggatatcgaggttttgaaacgtgacttgcaagtcttgatgggtgtacctgttcatgtaaatattgaagagattcgccgtcctgagttggatgctcaaattattgctgacggtattgcccagcagttggaaaagcgcgttcaattccgtcgtgctatgaaacgagcaatgcaaaatgcaatgcgttctggtgctaaaggcattaagattatgacttcaggccgtctgaatggtgcggatattgcccgtagcgaatggtatcgtgaaggtcgcgtgccactgcatactttacgtgcaaatgtagattatgcaaccagcgaagcgcacaccacatatggtgtattgggtctgaaagtttgggtttatacggaaggcaatattaaatcttccaaacctgaacatgagagtaaacaaagaaaggcaggtagacgtaatgctgcagccaactag

SEQ ID NO: 40220 - DNA, 1218 bp, Neisseria meningitidis
atgacgcacaccgcatcgaaaacacccaaattttggctgaccatcaccgccgccgcattcatcctgctgattaccatcggcatgaggatgacgctcggactgttcgtccaacccgtcgtcaacaccaccgaattgagcattgcccaattcagcctcatcatcgccgttttccaactgatgtggggcatatcgcaaccattgtccggcgcgcttgccgaccgtttcggcgcgttcagggtattaagcggcggcgccgtcctgctcgtctgcgcctgcctgattgcccccaacatcccgacttattgggggctgatggttgccgtcgggctgctgctcgcattcggcaccggctccggcgggttttccatcattatggggcaggttgccgcccaaatccccgcacacaaacgcggtttggcatccggactggtcaacgccggcggttcggcaggacaattcctgttcgcaccgctggttcaagggcttaccgcattgccccaagccggctggacgggcacattttacgtttgggcgggcatcgccctgctgattctgcccgtctcatggtggcttgccggcggcaacaacgccgcccacacccaacacgcccaagccacacacggacaaagcctcggagaagcagtcaaaaccgccttcaaaaccccaagctacatcctgctgcacctaagcttttttgcctgcggcttccacatcgcctttctcgtaacccacctacccacggaagtcgccctgtgcggactgcccgccaccgtcgcctcgacatccatcgccatcatcggactggcaaacatcgccggctgcattttttccggctggtgcacaagccgcgttcggggcaaatacgtcctgttcggactgtacgcctcgcgcgccgcgatgatactcatctacattttttcgcccaagaccgacctcaacttctacattttcgccgccgcactcggatttacctggctcgccaccgtcacgccgaccgcctccattaccggcaaactcttcggcacacgctacctcgccaccctgttcggactgacgatgctcagccaccaaatcggcggattcctcggctcgtacatcggcggcatcgtgattacacaattcggcgactacggctggatgtggtacgccgacgcactgctggcgggaaccgccgccctcctcaacctccccatccgcgaaccccgaaccgccgcatga

SEQ ID NO: 40221 - DNA, 657 bp, Neisseria meningitidis
atggaacaaaaaaggcggtttgccgcctccctgctcctcgccgccgtcctgccgctttgtgcgcattcttttccctttgcggaagaaaaccccatagcctacggcaaagtcaaaatacagagttggaaagagaggcgcgatttcaatattgtaaagcaggatttggatttttcctgcggggcggcttcggtggcgacgcttttgaacaatttttacgggcaaacgctgacggaagaagaagtgttggaaaagctggataaggagcagatgcgcgcgtcgtttgaggatatgcggcacattatgccagatttgggttttgaagcgaaaggctatgccctgtctttcgagcagctcgcgcagttgaaaatccccgtcatcgtgtatctgaaataccgtaaggatgatcatttctcagtattgcgcggtatagacggcaatacggttttgcttgccgacccgtcgctgggtcatgtttcgatgagcagggcgcagtttttggatgcttggcaaacccgtgagggaaatttggcaggtaagattttggctgtcgtatcgaaaaaagccgagacaatttcaaataaattgtttttcacacaacacccaaaacggcagacagagtttgcagtcgaacaaatcaggcaagcacgtgcagagtaa

SEQ ID NO: 40222 - DNA, 207 bp, Neisseria meningitidis
atggcacgtattaccaccgaagactgtaccggaaaaatttccaaccattttgacctgacattggtagcggctcgccgcgcccgccagcttgagaacggcaacacgccgcttgtggacgatgtccgcaataacaaaccgaccgttaccgccttaagggaaatcgccgccggacatatcggtacagaactgttgacgcgcaataaataa

SEQ ID NO: 40223 - DNA, 738 bp, Neisseria meningitidis
atgaagcaggttgatttaaacgccgatctcgccgaaggctgcggcagcgacgaagccttgttgcagctgattacttcggccaacatcgcctgcgcccaacacgccggcagcattgccgatattcgggcggcattggcgtatgcccaacaaaacggcgtgcgcatcggagcacaccccggctatcccgatcgggaaaacttcggccgtaccgaaatgaatctgtccgaagccgatttgcgggcgtgtctgaattaccagttgggcgcattgcaggccttgtgccgtgatcagggtttggaaatggcttatgtcaaaccgcacggcgcaatgtacaaccaagcggcgaaaaaccgtgcgctggcggataccgttgcccgaattgtggcggatttcgacccgaaattgaaattgatggcactttccggcagcctgctcttggaagccggaaaagccgcaggcttgggtgtgatttccgaagtattcgccgaccgccgctatatgcccgacggtacgctggttccccgcagccgccccgatgcgcaggtggacagcgacgaagaagccatcgcccaagtattgcagatggtgcgggacgggcaggtcaaagcagtggacggcagcctggttgccgtgcaagccgacagcatctgtctgcacggagacgggccgcacgccgtggtgtttgccgaaaaaatccggcaggaactactggcggcaggcatcaaagtttctgcttga

SEQ ID NO: 40224 - DNA, 936 bp, Neisseria meningitidis
atggggcacaatatgatgaccacccaaaaatggtatgagcatattactaatgtaatcataggcaatactgctaatttcaatagcggttgccctgaagctatagattatgtagatgaaagaaaaggcgttccgcttgcagcgatgagacatattttaatgtatactgaagctgcggcttcccatgcctatctatttgaacatgatcttaataaattcaagcaatatgcttatgttgcaggaaagctgggtattttgcggagtgtaaattctacagaccctgaacccttcttctttccctgtgatatgctcaacattcaagatccgatgtttctgatgctgatgagcgacagcccgcagctgcgtgagtttctggtgcgcaatatcgacaacatcgccaacgatacagaagccttcgtaaaccgctacgacctcaaccggcatatgatttacaatactctgctgatggtggaaggtaagcagcttgatcggttgaaacaacgtagcgagaaagtcttggtgcaccccacccctagcaaatggctgcaaaagcggttgtacgattaccgcttcttcctcgctttcgccgaacaggatgccgaggcgatgaaggccgccttagagccgcttttcgataaaaaaaccgcgcgtatggctgccaaagaaacattgtcctatttcgatttctacctgcagccgcaaatcgttacctacgccaaaatcgcatccatgcacggtttcgatttgggcatagaccacgaaatcgcaccgagggatttgattgtttacgatccgctgccggcagacgaatatcaagacatcttcgattttatgaaacagtatgacttgtcttatccgtatgaatatctgcaggattggatagattactatacgttcaaaaccgataagctggtatttggtaacgcgaagcgagagtga

SEQ ID NO: 40225 - DNA, 903 bp, Neisseria meningitidis
atggacagcctgatgacattgctttcggtattggtaccgatgttcgccggattttttatccgtgtgcccaagccttacctgcccgctttggataaggtgctatcggtcttggtgtatgctgtgctgctgctgatcggcgtctcgttgtcgcgcgtggaggatttgggttcgcggttggacgatatggcgttgacggttctgtggctgtttgtttgtacggtcggggcgaacctgcttgctttggcagtgttgggaaagttattcccgtggcggataaaggggaaagggaagggcgtttcggtcggtgtgtcgggcagtgtggggcagctcggatgcgtgctgctcggatttgcatccggcaaactgatgcgcgatatttggatgccgtctgaaagcgcgggcatgtattgtctgatgctgctggtgttcctcatcggcgtacagctcaaaagcagcggcgtatcgttgcggcaggttttggtcaaccgcaggggtattcggttgtcggtctggtttatgctttcatctctttcgggcgggctgctgtttgccgcatcggcagacggcgtgtcgtggacgaaaggtttggcgatggcttccggcttcggttggtattccctctcgggtttggtcatgaccgaggcttacggcgcggtatggggcagcatcatgctgctgaacgatttggcacgagagctgtttgcactggcatttatcccgctgctgatgaagcgttttccggatgcggcggtgggggttggtggtgcgaccagtatggattttacattgcccgtgattcagggtgcgggcggtttggaagtcgtgccggtagcggtcagcttcggcgtggtggtcaatattgccgccccgtttctgatggtggtgttttccacgctgggctga

SEQ ID NO: 40226 - DNA, 1578 bp, Neisseria meningitidis
atgcgcgccaaccccaaaacacaggcaatgccgtctgaaaccatatccctgatgaaaacacgcagcctaatttcccttttatgcctccttctctgttcatgttcttcatggttgcccccactggaagaacggacggaaagccgtcatttcaatacttccaaacccgtccgcctggacaacatcctgcaaatccggcacacccctcataccaacgggctatccgatatctatctgctgaacgacccccacgaagcctttgccgcccgcgccgcccttatcgaatctgccgaacacagcctcgatttgcaatactacatctggcgcaacgacatttccggccgactgctgttcaacctcgtgtaccttgccgcagaacgcggtgtgcgcgtacgcctgctgttggacgacaacaacacgcgcggattggacgacctcctgctcgccctcgacagccatcccaatatcgaagtgcgcctgttcaaccccttcgtcttccgcaaatggcgcgcactcggctacctgactgacttcccccgcctcaaccgccgcatgcacaacaaatcctttaccgccgacaaccgcgccaccatactcggcggacgcaatatcggcgacgaatacttcaaagtcggtgaggacaccgttttcgccgacctggatatcctcgctaccggcagcgtcgtcggcgaagtatcgcacgacttcgaccgctactgggcaagccattccgcccacaacgccacgcgcatcatccgcagcggcaacatcggcaagggtcttcaagcactcggatacaacgacgaaacgtccagacacgcgctcctgcgctaccgcgaaaccgtcgaacagtcgcccctctaccaaaaaatacagacaggacgcatcgactggcagagcgtccaaacccgcctgatcagcgacgaccctgcaaaaggactcgaccgcgaccgccgcaaaccgccgattgccgggcggctgcaagacgcgctcaaacagcccgaaaaaagcgtctatctggtttcaccctatttcgtccccacaaaatccggcacagacgcactggcaaaactggtgcaggacggcatagacgttaccgttctgaccaactcgctacaggcgaccgacgttgccgccgtccattccggctatgtcaaataccgaaaaccgctgctcaaagccggcatcaaactctacgagctgcaacccaaccatgccgtccctgccacaaaagacaaaggcctgaccggcagctccgtaaccagcctgcacgccaaaaccttcattgtggacggcaaacgcatcttcatcggttcgttcaacctcgacccccgttccgcacggctcaacaccgaaatgggcgttgttatcgaaagccccaaaatcgcagaacagatggagcgcacccttgccgatactacccccgaatacgcctaccgcgttaccctcgacaggcacaaccgcctgcaatggcatgatcccgccacccgaaaaacctacccgaacgaacccgaagccaaactttggaaacgcatcgccgcaaaaatcctatccctgctgcccatagaaggtttattatag

SEQ ID NO: 40227 - DNA, 687 bp, Neisseria meningitidis
atgtacgcatttaccgacgcacagcaacagaaggcactcttccggctggtgctttttcatatccttatcatcgccgccagcaactatctggtgcagttccccttccaaattttcggcatccacaccacttggggcgcattttcctttcccttcatcttccttgccaccgacctgaccgtccgcattttcggttcgcacttggcacggcggattatcttttgggtgatgttccccgcccttttgctttcctatatcttttccgttttgttccacgacggcggttggacgggcttgggcgcgctgtcccaattcaacacctttgtcggacgcatcgcgctggcaagttttgccgcctacgcgctcggacaaatcctcgatattttcgtattcgacaaattacgccgtctgaaagcgtggtgggttgccccgactgcatcaaccgtcatcggcaacgccttagatacgttggtatttttcgccgttgccttctacgcaagcagcgatggatttatggcggcaaactggcagggcatcgcttttgtcgattacctgttcaaacttaccgtctgcggtctgtttttcctgcccgcctacggcgtgattctgaatctgctgacgaaaaaactgacaaccctgcaaaccaaacaggcgcaagaccgccccgcgccctcgctgcaaaatccgtaa

SEQ ID NO: 40228 - DNA, 537 bp, Neisseria meningitidis
gtggatttgagggaagtaaaattaggcggcgaaaccatttacgagggcggtttcgtcagtatcagcagggataaggtcaggttgcccaacggcaatgaagggcagcgtatcgtcatccgtcatccgggtgcggcgtgcgtgttggcggtaacggatgatgaaaaggtcgttttggtgcggcagtggcgttatgcggcaaatcaggcgacattggaacttcctgcgggcaagctggatgtggcgggcgaggatatggcagcgtgtgcgctgcgagaattggcggaggaaacaccttatgttgccgacagcgtgcgcttgttgtacagcttttatacggcggtcggtttttgcaatgaaaaaatgtatctgttcgaggcggaaggcgtgcgtttgggcagtacgcttgccaatgacgaagacgagattacggaaaccgtattgatgtcaaaagaagaagtccgtcaggcattggcaaacgatgaaattaaagacggcaagacattaatcggtttgcaatactggctgatgagggattga

SEQ ID NO: 40229 - DNA, 777 bp, Neisseria meningitidis
atgtccgacaacgctttgacctcttcgcgacgcttcggcggcatcgccagactctacggagactctgccttggcgcacttttcacaggcacacgtctgcgtagtcggcgtgggcggtgtcggctcgtgggcggtcgaggctttggcgcggacgggcatcggacgtttgactttgattgatttggacaacgttgccgaatcgaatgtcaaccgccagctgcacgccctgaccggcgacttcggcaaagcaaaagttaccgccttgcgcgaacgcattacacaaatcaatccgcaatgcgaagtgtttgaaattgaagatttcgttaccgaagacaatttgccggaatacttcggaaaaggttttgatttcgtcatcgacgcgatcgaccaagtgcgcgtcaaagcagcaatggcggcttattttgtggaacgcaaacaaccgtttgtcctcagcggcggcgcgggcggacaaaaaaatccggcgttaatccaaaccgccgatttgagccgcgtaacccacgacccgctgcttgccaacctgcgctacaccttgcggaaacgctacggcttcagccgcgatacgaaagccaaaatgcgcgtgccgtgcgtgttctcaaccgaaaacatcacgccgccgcaatcgggcgtggcgtgttctgccgatgccgcgccgcagggcttgtcgtgcgccggctacggcgcaagtatgctcgttaccgcttcgttcgggctatattgcgcacaggcggcggtggaacatatcgcgggcaaaaaataa

SEQ ID NO: 40230 - DNA, 621 bp, Neisseria meningitidis; identical to SEQ ID NO: 39249

SEQ ID NO: 40231 - DNA, 447 bp, Neisseria meningitidis
atgaatttcagttttgttcccctgtttctggttacgctgattctgttgggggtggtcagcaacaacaattcgattaccatctcggcaaccatattgctgctgatgcagcagacggcattggtacagtttgtcccgttggtcgagaagcacgggttgaatctcggtatcattcttttgaccataggggttttgagtccgttggtttcaggaaaggcgcaggttcctcccgttgccgaatttttgaattttaaaatgatatccgccgtttttatcggtattttcgtggcttggctggcgggacgcggcgtgcctttgatgggacagcagcctgttttaattacagggctgttaatcgggacggttatcggggtggcatttatgggcggtatccctgtcgggccgctgattgcggccggcatcttgtcttttgtcgtcggaaagggttaa

SEQ ID NO: 40232 - DNA, 276 bp, Neisseria meningitidis
atgaaaccgaatattcatcctgacaattatcgaaccgtcctttttttcgacagcagcgccaatgaaggctggctgattcgttcttgcgccgaaacacacggaaaaacgatggtttggacagacggcaaagaatatccactgttttcgctggatacttcttccgcatcccatcccgtctataccggcaagcaacgcaacgtcaacaccgaaggccgtgccagcaaattcaaccaacgtttccaatccgtcatgtcatcgtttagaaaggacaaataa

SEQ ID NO: 40233 - DNA, 921 bp, Neisseria meningitidis
atgaccaataaacccgccaaacgcccggtcaacggcgttcttcttctcgacaaacccgaaggcctttccagcaacaccgcgctgcaaaaagcgcggcgtttgtttcatgccgaaaaagccggacataccggcgtgctcgaccctttggcaaccggacttttgcccgtctgcttcggtgaagcgaccaagttcgcccaatacctgctggatgccgacaaagcctacaccgccacgctgaaactcggcgaagccagcagcacgggtgatgccgaaggcgaaatcattgccaccgcccgcgccgatatttccttagccgaatttcagacggcctgccaagcactgacaggcaacatccgccaagtgccgccaatgttttccgcgctcaagcacgaaggcaaaccactgtacgaatacgcccgtaaaggcattgttatcgaacgcaaagcacgcgacattaccgtttacgccatcgatattgccgagtttgactcacccaaagccgtcatcgacgtgcgttgcagcaaaggcacctatatccgcaccctcagcgaagacatcgccaaacacatcggcacgttcgcccacctgaccgccctgcgccgcaccgaaaccgccggctttaccatcgcccaaagccacacgctcgaagccttggcaaacttggacgaaaccagacgcgacagcctgctgctgccctgcgacgtattggtttcacacttcccccaaaccgttttaaacgattatgccgtccatatgctccgctgcgggcaacgaccgcgtttcgatgaagacctgccttccgatacgccggtatgcgtttacacggaaaacggccactttgtcggcctggcggaatatcaaaaaaaaatatgccgtctgaaagccttgcgcctgatgaacacggcggcatccgtcgcctga

SEQ ID NO: 40234 - DNA, 966 bp, Neisseria meningitidis
gtgaaaccgcgtttttattgggcagcctgcgccgtcctgctgaccgcctgttcgcccgaacctgccgccgaaaaaactgtatccgccgcatccgcatctgccgccacactgaccgtgccgaccgcgcggggcgatgccgttgtgccgaagaatcccgaacgcgtcgccgtgtacgactgggcggcgttggatacgctgaccgaattgggcgtgaatgtgggcgcaaccaccgcgccggtgcgcgtggattatttgcagcctgcatttgacaaggcggcaacggtggggacgctgttcgagcccgattacgaagccctgcaccgctacaatcctcagcttgtcattaccggcgggccgggcgcggaagcgtatgaacagttggcgaaaaacgcgaccaccatagatctgacggtggacaacggcaatatccgcaccagcggcgaaaagcagatggagaccttggcgcggattttcggcaaggaagcgcgcgcggcggaattgaaggcgcagattgacgcactgttcgcccaaacgcgcgaagccgccaaaggcaaaggacgcgggctggtgctgtcggttacgggcaacaaggtgtccgccttcggcacgcagtcgcggttggcaagttggatacacggcgacatcggcctaccgcctgtagacgaatctttacgcaacgaggggcacgggcagcctgtttccttcgaatacatcaaagagaaaaaccccgattggattttcatcatcgaccgtaccgccgccatcgggcaggaagggccggcggctgtcgaagtattggataacgcgctggtacgcggcacgaacgcttggaagcgcaagcaaatcatcgtcatgcctgccgcgaactacattgtcgcgggcggctcgcggcagttgattcaggcggcggagcagttgaaggcggcgtttgaaaaggcagaacccgttgcggcggggaaagagtag

SEQ ID NO: 40235 - DNA, 330 bp, Neisseria meningitidis; identical to SEQ ID NO: 37077

SEQ ID NO: 40236 - DNA, 342 bp, Neisseria meningitidis
atggcggacgaaagagtgcctgaactggtggcggacttggaagaccaagcggtcgcctgcctgatgtcggtattgccgatggagcggcagcaggcggtcgaagtatctaaaaagctgtcccgtcatctgaccggcaactggggcgggcagctgatttatttcccgaaaaaccttttgggcagggtatcggagcgagatatgcggatttataaggagtttgacggcaaaaaccatgcggaacttgcccgcagatacgacctgaccgtgcagcacgtttaccgcatcgtcaaggaggtcggaatggcggagcgggcgaaaaaacaggcagatttgttttcgtaa

SEQ ID NO: 40237 - DNA, 1437 bp, Neisseria meningitidis
ttggaaaactcattaattatcggtttggcactggcggtattgctgatgcttttggttatgcgtgcgaagcagggtaagaaaacaccgaagcgcaaatcccaaggtgtcggcaatacgcaggggcagacacccggaagcaatgattcggactgggtcgatcagattggacaatcggtttcagacggcacgcaacccgactggtcttggaacgaaagtgccgagaccgcatccgccgccgtatccgcgcaagaagtcgatccgcttacggagtatcaggtttataagcaattcggttatcagggcaaggctgccgaatctttggctgcctatctggacggcattccggatggtgaagcgaaacctgaaaaccttatccgcgagctgctcgatatcaatctcgaagtgggggatgtcgatgttttggcagacaatctgcaaaaatacggcaaactgattccttccgaacttttggcaaaatatatcgaacaggcattacagcgcgattcaaaccatttgcgtatccgcgtcttggcagaagagggtttgggatggggtactcaggagattgaaaaacgtgcggaaggcggttctgcgacggcagcttccgcatcgcctccgacggatgccggcggtaaggcttatggattcgaagaaatcaagcgcatcccgattgtgcggggcaaaaaagacgtgtccagaatcagtcaagaggaaatcggtgcgattgccggtttggttcgcgccgatcaaggtgcgaaaatccttaaagacaaagtcagctatgaaacggcatcgaaacaatacgaccgtgccatccaaacttccgaaaaacctgcaaacctgattatcgatgcgttgaaactcgattaccaacacgcggacatagaccgttttgccggacatttgtggaaactttaccaaacgttgggcaactacggcaggcaggttaaagagcggatgctggggtgggggtacagcctgggttaccatgaagttttcgatgatttggaaaaagggccgaacgaccggcaaatcaaagacatcggtatggggcacgggtatctgccgaaaaatatacagaaattcaaatcgcaacatcgggatttggtgcttcaagattcttcgttgatcaacaccggttcgtctccggcagacgatgcggttaaggaagtagagtcgttgctgatgtatggtcagattgaagcggcaatggatgtgttggagcaggcggtattgaaatatcccgacgagtcccagctttatattacgttgatcgatatttatgaacgtactgaagattgggataggttggggcagtttttaagggtattgagggaacgtgcggacaggcttcctgaagaggtcgttatgctgatgagccggctgctgcagcgtatgaatcaaaatattaaaaaaataaaacggtacggaaaataa

SEQ ID NO: 40238 - DNA, 603 bp, Neisseria meningitidis
atgactaatgtgcttcagacggtattttatattatgttatttccgagaattatcgcagcatcagcgcaacgtaagttaagcgtttatttgaaaaaaggcggtttggtcgcttatccgaccgaatcttgttatggcttggggtgtcttccgacattagccaaagcactcggtaagttggcgcatttgaaaaaaagaccgcaacacaagggtatgattgtcatcgggaatcaatttgagcaattgcagcctttacttcaaatgccgtctgaaaatcttcaggatatgcttagaaaagaatggcccgcccctaaaacgttcctattatccgccaaatcctgtgtcttacctgagttacgcgggaaacagcgcagcaagttggcggtcagggttcccgcccatgtaggtgcgcgccgcttgtgtcaggctttgcaaacgcctttggtctcgacttcgtgcaaccgcgcaggcaaacgcgcgtgtcggacggagagggaagtcagaaggcaattcggacgcgatgtgtggattgttggtgggagaatcggcaggcagaaatcgccgagtcagattattgacggggaaacaggtaaacgtttgcgttag

SEQ ID NO: 40239 - DNA, 1692 bp, Neisseria meningitidis
atgagcgcatcacaattactgtcaagactgacccaaaccgtaggcgaaaaatacatcattaccgaccccgcgaaaaccgaacaataccgccaaggttaccgcttcggcgagggtaaggcgttggcggtggttcgccccggaagcattctggaaatgtggaaaattctgcaggcgtgcgtcgaagcagacgtgattgtgattacgcaggcggcgaataccggactgaccggcggttcgacccccgacggcaacgattacgaccgcgacatcgtgattgtgaacaccatgcggatgaacatcatccaaaccatcaacaacaacgaacaagtcgtctgcctgcccggctcgaccctgaaccagcttgaattgctgctgaaacccttgggacgcgaaccgcattcggttatcggctcttcctgcatcggtgcgtccgtcttgggcggcgtgtgcaacaactccggcggcgcattggtacagcgcggcccggcctacaccgaaatggcactgttcgcccaaatcaacgaagaaggcaggttggaactggtcaaccacttgggcatagacttgggcgacacgcccgaagaaatcctgaccaacctgcaaggtcatcattatcaaaacaaagacatcaaacaagacgcgggcaaaggacacgaccacgcctattgcgaacacgtccgccaagtggacgaaccgaccgccgcgcgtttcaatgccgaccccgcccgccattacgaagcctcgggctgcgcgggcaaactgatggtttttgccgtccgtttggacaccttcccgcaagaaaaacaaaccgccgtgttctacatcggcacgaacgacatcaacgagctgaccgacatccgccgcgccgccttgggcgaatttgaaagcctgcccgtttccggcgaatacatccaccgccacgctttcgatattgccgacgtgtacggcaaagacacgttttacgtcatcaaaaaattcggtacgcaccaactgccgaaattatttgacttgaaggcgcgcgtggacaggttcggcaaaaaagccagcttcctgcccaaacatttttccgacaaggccatgcagttcgtcagcaaatacctgcccgaccacctgcccaaatccatgcgcgattaccgcgacaaatacgaacaccacctgattctgaaaatgggcgggaaaggcgtggatgaggcgcgcgcgttcttaaaagaatattttgcacaccacagcggcgcgtttttcgagtgcaacgccgaagaaacccaagccgcgatgctgcaccgtttcgccgtcgcctccgccgccatccgctaccgcgccgtgcatgatgacgaagtggaagacttggtcgcgcttgacatcgccctgcgccgcgacgaccgcgactggtttgaaaaactgccgcccgaaatcgacaataaaatcatccacaaactctactacggacatttcatgtgccacgttttccatcaggattacatcatcaaaaaaggcaacgactgcatggcgttggaacacgaaatgctgcatcttttagaccaacgcggcgcgcaatatcccgccgaacacaacgtcggtcatttgtatgaagccaaacccgcgctcaaacagttttaccgcaaacttgacccgaccaacagcttcaacccgggcgtaggcaaaaccagcaaaaagaaaaactgggcggaataa

SEQ ID NO: 40240 - DNA, 1092 bp, Neisseria meningitidis
atgaacgcccaaaccctgattgccaacgttgccgaactcgtcaaaaccaagctcaaacccttagtggacgacatcgaccgcaaaggatactaccccgaagcatttatgcgcgaactcggcgcaatcggcggattcggcgcagtcggtacagaagccgaaggcggcaacggcttgggtttggcaacgcaaatcgccgttttgcgcgaaatcggcaaagaatgcggcgcaacctccttcagcgcgtggtgtcaggcggcttgcgcgtggtatctgcaccaaacgcccaaccgggccgtcaaagacaaatacctcgccgacatcctgcaaggcaaagtattggcgggcaccggaatgtccaataccgtcaaacaccttgccggtattgaaaaacacaacctccaagccgaacgcgcggacggcggctacacagtcaacggcgcgctgccgtgggtgtccaacatcggcgaagagcatatttgggcaaataccgcccaaatcggcggcggctacgtcatgtttatcaccggtggacaatgggaaggcgtaagcctgcaaaactgccccgaattttgcgccctcgaaggcacgcgcaccttcagcctgaacttcaaagacgtatttatccccgacgaagacatcatcgccgcgcccgaacagtttgccgactacatccaaagcatcaaagcaggctttatcctcctgcaaatcggcatcggcgcgggcgtgatagacggcagcctcggcatcatccgcctcgccaacatcgtcaacgccgaagtcaacagctatctcgacgacggctacgacagcctcaaaacaaggctggacggcgcgtgggcagaaaccgaacggctcgccggtttggcttggagcggcacgcccgacaaccttgctaccctcaagctgcgcgaagccgccgccgtactggcacttgccgccacccaatccgccgccctgcattccggcgcaaaaggctacctgatgcgcagtcccgcccaaaggcgcgtccgcgaagcaatgtttgtcgccatcgtaacccccgcgatcaaacacctccgaaaagaaatagcggcaatcgaagccgcaaaataa

SEQ ID NO: 40241 - DNA, 876 bp, Neisseria meningitidis
atggcttacctgttaatcagcatcgcgttcagcgtgtcggtttccattttgctgaaaatggcaaggaagaaaaaaatcgacatcgcgcaggcggtcgccgtcaattatgtggtcgcggtcatactgaccctgctggtattgaagccggatgtcggcaatatcggcgcatttttgccgacatggtggctgtttgccgcattgggcgtgctgctgccgtccgtatttgtcattatgggcaaatccgtagaatccgccggtatcgtcaaatccgacgcggcgcagcgtttgtcgctgtttttgccgattgttgccgccttgacgctgtttggcgaaaaactcagcgaaggcagactaatcgggctgtgcctcgcatttgccgcactgttctgcctgctttggaaacacagcggtggcaaaaaatcaggaagcgcgtggcggcaggcggcattgctgctgggcgtgtgggcaggttacggcattatcgatatcctgttcaaacagcttgccaaaagcggaacggcatttgcgggcaacctgctggttgcatttgtgctggcgggtgtgctgatgtttgcctgcctgtttgccaaatcggtcagatggcgtgttgagagtgtggttggcggcatattcttgggcggtttgaactttatgaacatcgtaacctacatcaccgcgcaccaaatgatgaaggataatccgaccttggtttttgccggtatgaatatcggcgtgattgttttgggtacgctttcgggcgcattgttctttaaggaaaaaatcaacacaatcaatacggcgggaatcgtgttggcactgtgttccatcgcctgcctgttttattgggcggaggtcaaggcactgttcggcatataa

SEQ ID NO: 40242 - DNA, 315 bp, Neisseria meningitidis
atgaaacttatctataccgtcatcaaaatcattatcctgctgctcttcctgctgcttgccgtcattaatacggatgccgttaccttttcctatcttccggggcagagtgtcaatctgccgctgattgtcatattgtttggcgcatttgtagtcggtattgtttttggaatgtttgccttgttcggacggttgttgtcgttacgtggcgagaacggcaggttacgtgccgaagtaaagaaaaatgcgcgtttgacggggaaggagctgaccgcaccaccggcgcaaaatgcgcccgaatctgccaaacagccttga

SEQ ID NO: 40243 - DNA, 1296 bp, Neisseria meningitidis
atgttagatatccaattgctccgcagcaacaccgctgccgttgccgaacggcttgcacggcgcggttataactttgataccgcacgttttgacgcactggaagaacgacgcaagtccgttcaggtgaaaaccgaagaactacaagcctcgcgtaacagcatttccaagcaaatcggcgcactgaaaggtcagggcaaacacgaagaggcacaggcggccatggatcaagtcgcccaaatcaaaaccgatttggaacaggcagccgccgatttggaagccgtgcaaaaggaactggacgcatggctgttgagcattccgaacctgccgcatgaggacgtgcctttcggtaaggatgaaaccgaaaacgtcgaagtccgcaaagtcggcaccccgcgcgaatttgactttgaaatcaaagaccatgtcgatttgggcgaacctttgggtttggattttgaaggcggtgcaaaactctccggcgcacgatttaccgtgatgcgcggacaaatcgcccgtctgcaccgcgccttggcacagttcatgctggatacgcacacgctgcaacacggctacaccgagcattacacgccttatatcgttgacgatacgacgctgcaaggtacgggccaactaccaaaatttgcggaagatctgttccacgttacccgtggcggcgacgaaaccaaaaccacccaatacctgattccgacagccgaagttaccctgaccaataccgttgccgacagcattatcccgtccgaacaactgccgctgaagctgaccgcgcattcgccctgtttccgcagcgaggcgggttcgtacggcaaagacacgcgcggtctgattcgccagcaccagttcgacaaagtggaaatggttcaaatcgttcatcccgaaaaatcatacgaaacgctggaagaaatggtcggccatgccgaaaacatcctgaaggctttggaactgccctaccgcgtgattaccctgtgtaccggcgacatgggcttcggcgcaaccaaaacgtatgacttggaagtttgggtaccggcgcaaaacacctaccgcgaaatctcaagctgctccaactgcgaagatttccaagcccgccgcatgaaggcgcgtttcaaagacgaaaacggcaaaaaccgcttggtacatactttgaacggctccggcttggctgtcggcagaacgctggtcgccgtattggaaaaccatcaaaacgccgacggcagcatcaacatccctgccgcactgcaaccgtatatgggcggcgttgccaagttggaagtgaaataa

SEQ ID NO: 40244 - DNA, 1479 bp, Neisseria meningitidis
atgaaatacaaagacctgcgcgacttcatcgccatgctcgagcagcaaggcaaactcaagcgcgtcgcgcaccccgtttccccgcatttggaaatgaccgaaatcgccgaccgcgtgctgcgcgccgaagggtcggcgttgctgtttgaaaacccgattaagcccgacggtacgcgttacgattatcccgtgttggcaaacctgttcggcacgcccgaacgtgtggcgatgggcatgggcgcggacagcgtgtccaagctgcgcgaaatcgggcagacgctggcgtatttgaaagaacccgaaccgcccaaaggcattaaagacgcgttttccaaactgccgctgctgaaagacatttggagcatggcgccgaacgtggtgaaaaatgcgccgtgtcaggaaatcgtatgggaaggcgaagacgttgatttgtatcaacttccgattcagcattgctggccggaagacgttgcgccgctggtaacgtggggcttgaccgtcacgcgcgggccgcacaaaaaacgccaaaatctcggcatttaccgccaacaactcatcggcaaaaacaagctgattatgcgttggctgtcgcatcgcggcggcgcgttggattatcaggagttccgcaaactcaatcccgatacgccgtatcccgtcgccgtcgtactcggctgcgaccccgccaccattttgggcgcggtaacgcctgttcccgataccttgagcgaataccagtttgccgggctgctgcgcggttcgcggacggagctggtgaaatgtatcggcaacgatttgcaagtacccgcccgtgccgaaatcgtgctggaaggtgtcatccatccgaacgaaaccgcgttggaaggtccatacggcgaccacacgggctattacaacgagcaggatcattttcccgtgttcacggtcgaacgcatcactatgcgcgaaaacccgatttaccattccacctacacaggcaaaccgcccgatgaacccgctgttttgggcgtggcgttgaacgaagtgttcgtaccgcttttacaaaagcagttccccgaaatcaccgatttctacctgccgcccgaaggctgctcctaccgcatggcggtggtgagcatgaaaaaacagtacgccggacacgccaagcgcgtgatgatgggctgctggtcgttcctgcgccagtttatgtataccaaattcatcatcgtggtggatgacgatgtgaacgtgcgcgactggaaagaagtcatctgggcggtcaccacgcgcatggaccccgtgcgcgacactgttttggtagaaaacacgcccatcgattatctcgacttcgccagccccgtcagcggactcggcggcaaaatgggtttggatgcgaccaacaaatggccgggagaaaccgaccgcgaatggggacgcgtcatcaaaaaagaccctgcggttacggctaagattgatgggatttgggaggaattggggttgtag

SEQ ID NO: 40245 - DNA, 1005 bp, Neisseria meningitidis
atgagcattaaagtagcgattaacggtttcggccgcatcggccgcctcgcattgcgtcaaattgaaaaagcccacggcatcgaagtcgtcgctgtcaacgacctgacccctgccgaaatgctgctgcaccttttcaaatacgacagcacgcaaggccgtttccaaggtactgctgaattaaaagacgatgccatcgtggtaaacggcaaagaaatcaaagttttcgccaatccgaatcccgaagaattgccttggggcgagttgggtgtggatgtcgtcctcgaatgtaccggcttctttaccaataaaaccaaagccgaagcccacatccgtgccggcgcgcgcaaagtcgtgatttccgcacctggcggcaatgatgtgaaaaccgtcgtatatggtgtaaaccaagacattttggacggcagcgaaaccgtcatctccgccgcttcctgcaccaccaactgccttgccctgatggcggcagtcctgcaaaaagagttcggcgtagtcgaaggtctgatgaccaccatccacgcctacaccggcgaccaaaacacccttgacgcgccgcaccgcaaaggcgatttgcgccgcgcccgagccgccgcgctcaacatcgtgcccaacagcaccggtgccgccaaggccatcggtctggttatccccgaattgaacggcaaactcgacggctccgcccaacgcgtccctgttgccaccggctcgctgaccgaattggtttccgtcctcgaacgccctgtaaccaaagaagaaatcaacgccgcgatgaaagccgccgccagcgaatcttacggctacaacgaagatcaaattgtttcttccgacgttgtcggcatcgaatacggttcgctcttcgatgcgacccaaacccgcgtgatgaccgtgggcggcaaacaattggtgaaaactgttgcctggtacgacaacgaaatgtcctacacctgccaactcgtccgcactttggaatacttcgcaggcaaaatctaa

SEQ ID NO: 40246 - DNA, 474 bp, Neisseria meningitidis
atgactgatttttccgtttgggaaacagccccctttggcgcaaccgtcgattatatcctgcaacgctacaacaatgtccaccgcgcacaatttgaagaattggtgccgctggcgcagaaagtggcccaagtccatgccgatacctttccggcggaaattgccgggctgcttgcctatatgcagaacgaactgctgatgcatatgatgaaagaggaaaggatgctgtttccgatgattaatcagggtgtcggacgcggtgcggcaatgcccatcagcgtgatgatgcacgaacacgaagaacacgaccgcgccatcgcacggctcaaagagctgaccgacaatttccaaccgcccgaaggggcttgcggaagctggacgaggctttacgcgctggcgaaagaaatggcggacgatttgaacgaccacattcatttggaaaacgatattctgtttgcccgcgtacttgcttcttaa

SEQ ID NO: 40247 - DNA, 219 bp, Neisseria meningitidis; identical to SEQ ID NO: 36510

SEQ ID NO: 40248 - DNA, 327 bp, Neisseria meningitidis
gtggcatcttcttcaacaatcaaaggaaaatatgttaaggaagttgaagtcaaaaacggcgtcgttaccgccacaatggcttcaagcaacgtaaacaacgaaatcaaaggcaaaaaactctccctgtgggccaagcgtcaagacggttcggtaaaatggttctgcggacagccggttgagcgcaccgacaacaacgccgccaacgacgccgtcaccgccgccagcgacaagcagatcgacacaaagcacctgccgtcaacctgccgcgacgcagcatctgtcgtttgcatagaaacaccacctacggctttctataaaaatacctaa

SEQ ID NO: 40249 - DNA, 828 bp, Neisseria meningitidis
atgaaaaaaaccgcctatgccttcctcctgctgatcgggttcgcttccgcccctgcatttgcagaaacccgccccgccgacccttatgaaggctacaaccgcgccgttttcaaattcaacgaccaagccgaccgctacattttcgcccctgccgcgcgcggctaccgcaaagttgcgccgaaacccgtccgcgccggcgtgtccaatttttttaataacctgtgcgacgtggtcagcttcggcagcaatatcttgcgcttggacatcaaacgcgcaagcgaagaccttgtccgcgtcggcatcaacaccactttcggtttgggcgggcttatcgacatcgccggcgcgggcggcattcccgacaataaaaacaccttgggcgacacgtttgcttcgtggggatggaaaaacagcaattatttcgtgttgcccgtcttagggccgtccaccgtccgcgacgcgctcggcacgggtattacctccgtttattcgcccaagaatatcgtcttccgcacccctgtcggacgctggggcacgactgccgtatccgccgtcagtacgcgcgaaggcctgctcgatttgaccgacagcctggacgaagccgccatcgacaaatacagctacacgcgcgacctctatatgaaagtccgtgcgcggcagaccggtgcaacacctgccgaaggtacggaagataacatcgacatcgacgaattggtcgaaagtgccgaaaccggcgcggcggaaactgccgttcaagaagattccgtatccgaaacacaggcagaagcagcaggggaagccgaaacgcaacctggaacacaaccttaa

SEQ ID NO: 40250 - DNA, 2439 bp, Neisseria meningitidis
atgacagaaaaatcccataaaaaaacagcaaaaggcagggcgggaagcccgtccccaacgtccgcacgcaacaagaaagccgacaacggcgcacggggcaataaagtttccgagcggctcaaggcggtcaaagagttgcagaaaaccgaaaccaaaaaggagcgtcccgaacatgtcgtcaaccttatcggcgacgcactgtggctgatgggtttggcggcaaccttgtatttggcgatttccctgattagtttcgatatgggcgatccgtcttggtcgcacagttcgccggttgtggaagatgtcgccaattggggcggactgttcggcgcgtatgttgccgatgtcggctattatcttttcggctggtcgttctggtggtggatagcggctgcctgcgtcatgctgtataaaaattttcgtctgcacgcaaaacagacggaaaacgaggcatacaaccacaaaatcgctgccgccgcgctgtttgtcctgacggtcttcagccccgtcttggagtattttgtgctgggcggaaaatatgccgactccctgcctgtcggagcaggcggtatggtcggcatacgcgtcggcgcagtgtttgcgtggctgctggggaaatcgggcagcctgctgattatcttggttgttctgctgttgtcgttgtccctgctggtgcagatttcatggctggaatttttgaacggtgcgggcagggcggttcaaaaccgcctgagtgccttatccggcaaggtcatggctttgggaaaacgccggccgaataccaaaacagacggtgtcgatacccaaaatacacggcgcatggtaaaagaagccaagaatattacggccaaacccgttgccttgcccgaaggcagcagcagcaaccgcaaatccgtcgcggtttccgtcgcgccgccgcccaaaattcaggtttctctgtttgaagatgacgaacctcggcaggcgggcgaataccacaagcctacattgaacctattgcggattcctgacagcgaacccgtcagcatcaatcccgccgaattggagcgcactgccgaactgatcgaatccaagctggcagaattcggcatcggcgtacaagtcgtatccgccacatccggccccgtcatcacgcgctacgaaatcgaacccgcgcaaggtgttaaaggcagccaaattgttgccttgtcgaaagatttggcacgctctatgtcgctgcagtccgtgcgtatcgtcgaaaccatcgcaggtaaaaacacgatgggcatcgagttgcccaacgacaaacgccaagacgtgatgttgagcgaaatcttgtcctcgcccgtgtttgccggagccaaatccaagctgaccgtcgcgctgggcaaagacattgccggtacccccgttgtcggcgacttggcgaaaatgccgcaccttttggtcgccggtatgactggttcgggcaagtccgtcggcgtgaacggcatgattatgtctatgcttttcaaagctacgcccgacgaagtccgcttcattatgatagacccgaaaatgctcgagttgagcatttacgacggcattccgcacctgctctgtcccgtcgtgaccgatatgcgcgaagcagggcaggcgttgaactggtgcgtcgccgaaatggaaaaacgctaccgcctgctttcccacgccggtgtacgcaatttggaaggcttcaaccaaaaagtcgaagccgcaaaagcggcaggcaagccgctgctcaatccgttcagtctgaaccccgacaaccccgagcctttggaaaaactgccgatgattgtggtcgttatcgacgaacttgccgacctgatgatgaccgaacgcaaagccgtcgagcagcaaatcgcccgtctcgcccaaaaagcgcgcgccgccggtatccatatgattgtcgccacccaacgtcccagtgtcgatgtcgttaccggcctgattaaagccaacatcccgacgcgtatggcgtttaccgtgcaaagcaaaatcgacagccgtaccatcctcgaccaaatgggcgcggacgaactgctcaaatatggcgattcgctgttcctccagcccggcagtgccgaaccgactcgcctgcaaggcgcgtttgtttcagacgacgaagtacatcaagtcgtcaactacgtcaaatcgcaagccccagccgactatattgaaggtctgctcagcggcgaggccgcgctggaaactgccaatatcgttaatccgaatgcagacagcgacgaattgttcgatcaggcagtcgcctatgttttggaaagcaaaaaaacctccatttcgtctttgcagcggcagttgcgtatcggctataaccgcgcggcaaacctgatggaggcactggaaaatgcgggtgtcgtttctcccaccgacctcaacggcagccgtaaaattttggcgcacaaggaccatttgtag

SEQ ID NO: 40251 - DNA, 1137 bp, Neisseria meningitidis
atgaacacaccccccatcctccctcccgccatgctcggcatcctcggcggcggacaattaggcagaatgtttaccgttgccgccaaaaccatgggctacaaagtaaccgttctcgaccccgatccggacgcgccggcagcagaatttgccgactgtcatttatgcgcgccgtttaacgaccaagctgctttggacgaattggcaaaatgcgcggcggtgaccactgaatttgaaaacgtcaatgccgatgcgatgcgttttctcgccaaacataccaatgtttcccccagcggcgactgcgttgccatcgcgcaaaaccgcattcaggaaaagtcatggatacgcaaagcaggcctgcaaaccgcgccgtatcaagcaatttgcaaagccgaagacatcactgaagaaagcatacaatttctgcccggcatcctgaaaaccgctacattgggctatgacggcaaaggccaaatccgcgtaaaaacggtggatgaactcaaagccgcgtttgccgaacaccgcggcgtggattgcgttttggaaaaaatggtggacttgcgcggcgaaatttccgttatcgtatgccgtctgaacaatgacaacgtgcaaactttcgatcctgccgaaaacatccacgaaaacggcatcttggcttattccatcgtccccgcgcgactgagtgccgacgtgcagcaacaggcgcggcagatggcgcaacgcttggcggacgaattggattatgtcggcgtattggcggtagaaatgtttgttgtcggtgacacacatgaattggtcgtcaacgaaatcgcgccgcgtccgcacaactccggccaccataccgtcgatgcctgcgcggcagaccaattccagcaacaggtacgcattatgtgcaacctgccgcctgccgacaccaaattattatcgccttgctgtatggcgaatattttgggcgacgtttggcaggaagacggcggcgaaccggattggtttcccctgcaaagccggccggacgcgcacctgcacctttacggcaaaaaaaccgcgcacaaagggcggaaaatgggacactttaccgttttaaccaccgattcggacaccgcatttcaagaagcaaaaaaactgcatcagtccctataa

SEQ ID NO: 40252 - DNA, 3312 bp, Neisseria meningitidis
atgcaaaatatgaaaaaccaagtacgcggatcaggcatggatgcacgatccaatccggccaatgtttcagacggcctgcaaaacagttcgggtcatatcggtaccaacacgcgttaccgcctgaccaaactcggcgaacaaatggcgcgcctgcccatcgacccgaaaatcgcgcgcattttgctggcggcgaagaaacacgactgcatggcggaaatattggtgattgcgtccgcgctgtcgattcaagacccgcgcgagcggccgttggaagcgcgcgatgccgccgccaaggcacacgagcgttttaccgacaagcaatccgacttccttgcctatctgaacatctgggacagcttccagcgcgagcgcgacaaaggtttgtccaacaagcagttggtgcaatggtgccgtcaatatttcctgtcgcacctgaggatgcgcgagtggcgcgagctgcaccaccagcttgcccaaaccgcgattgaaatgggtttgaccaccaaggaagcggctttcagacgacctccagaagtcaggcagctcacgtcgtctgaaaatgctggcgaccaagacttatccgccaaactcaaacaaaaacaactggataagaagcaacaccgcgctcaaatccgcgctgccaaagaagcgggctacgaacaaattcaccgcgccctgctcaccggcctcatcgccaacgtcggcatgaaatcgcccgacggcaacgactacaccggcgcgcgcggcagccgcttccaccttttccccgcctccgccctgttcaaagccaaacccaaatgggtgatggcggcagaattggttgaaacgacaaaactttacgcccgcgacgtagccgccatccagcccgaatggatcgagcaggaagcgccgcacctcgtccgctaccactatttcgagccgcactgggaacaaaaacgcggcgaagtcgtcgccagcgaacgcgtgacgctttacggcctgaccgtattgccgcgccgccccgtgccttacggcaaagttgcgcccgaagaagcacgtgaaatctttatccgcagcgcgttggtggcgcaggaatgcgatttgaaagcggatttttttgtccacaataaaaagctgattaaagaaattaccgaactcgaacacaaatcgcgcaagcaagacgtattggtcgacgacgaagccctgtttgcgttttataacgaacgcctgcccgaaatggcttggaaagacgcgcaaggcagcgtttggggaagtgaagattccgtacggattattgaatctgacaaagccgagaggtcgtctgaaaatgagcgcaacgagtttcgtaaaaacaagcgtaatgggtctcgccaaaatgaaaatcacggcaacaccgtaggttgggttgaaaacccaacatcagccgcaactgcaaaaactgttgggtttgacaacccaacctacgctactcagcaacccaccccctcccccgcgagggagggtcggggagagggcaaaacagttgccgcacaaaccaacttctccgcaaccgcagcaaaccctctccctaaccctctcccacaggagagggagcagagtgccgcagcttcagcggtttcaaacgacctgcatcctgcaaatccccaacaaaccgccccctcccccgtgggggagggtcggggagagggcaaaacagttgcctctcaaaccaacttctccgcaaccacagcaaaccctctccctaaccctctcccacaggagggggaacagagtgccgcagcttcagcggtttcaaacgaccctcaaccccaaaagcagccagcaccccaaaaagaccgtctgaaacccctccccctcgccgacatccgtaccttccaagcctggctcaaaaccgccgaacgcgagaacccgcgcctgctgttcctcagccgcgacgatttgatgcaacacgccgccgcacacattaccgaagagcaattccccaaattctggcaaaccgcagacggcaagttcaaactttcctaccgcttcgagccgcaccatccgctcgacggcgttaccctcaccctaccgctgaccgtcctcaaccgcctgcacgcgccgtcgctcgaatggctggtgcccggtatgttgcgcgaaaaaatccagctgctgattaaagctctgccgaagcaaatccgccgcatttgcgtgcccgtacccgatttcatcacccaatttttaagccaaaaccctgatcgcaacgcccccatcctgccccaacttgcccaagccatcgccaaaaccgcaggcgacatccgcatactcgagcaaatcaaccaagacgaatgggccgcgttcaggctgcccgaacactgctatttcaacctccgcattatcgacgacggcggacaagagcttgccggcggccgcaaactgcacgaattgcaacaacagctcggccaagccgccgccaccaccttccgcgacaacacccaagaattcgagcgcgacaacgttaccgcatgggacatcggcaccctacccgaatccatcaaattcgcacgcggcaaacaacagctcaccggctatctcggtctgcaaaaagaaaaagacggccgcatcgccctgcgcctgtgtgacaccatcgaagccgcagagcaggcacaccgtcaaggcgtcatcgaattgatgaagctgcaattaaaagagcaggtaaaagacctgaacaaaggcatccaaggcttcacccaagccgccatgctgctcaaacacatcaacgccgacaccctgcgcgacgacctcacccaagccgtctgcgaccgcgcctttatcggcgaagacgagctgccgcgcaacgaaaaagccttcaaagaacaaatcaaacgcgcccgcagccgcctgcccgccgtcaaagaagccctcagccgctacctgcaggaaaccgccgccgcctacgccgaactgaacggcaaactcggcaaacacccattgacccaccttctaagactacgcctgcaaaccctgctcgccgccggcttcgccacccgaaccccgtgggcacaatggccgcgcctccccatctacctcaaaactatgaccctgcgcctcgaaaaatacagcagcaaccccgcccgcgacgcagcccgcgaagccgatacccaagagctggaacaaatgtggcaggaaaaaacagacagcctgattaaacaaggtctccccatttcagacggcctcgccgcgtttaaatggatgattgaagaattgagggtgtcgctgttcgcgcaggaattgaagacaccgtatccggtgtcggtgaagcggctgttgaaagagtgggaggatcttaattaa

SEQ ID NO: 40253 - DNA, 1032 bp, Neisseria meningitidis
atgggcatcaaagtcgccatcaacggctacggacgcatcggccgccaggttttgcgcgccatctacgattatcagattcaagaccaactccaaatcgtcgccgtcaacgccagcggcagccttgaaaccaacgcccacctcaccaaattcgacaccgtgcacggacgctttgaagccgacgtatcccacgacggcggcaacctcatcgtcaacggcgacaaaatccccttcttctcgacccgcaaccctgccgaactgccgtggaaagaactcggtgtcgatttggtcatggaatgcaccggcgcgttcaccagcaaagaaaaagccaaagttcatctggaaagcggcgcgaaaaaagtcctcatttccgcaccgggcggcgacgatgtcgatgcaaccgtcgtgtacggcgtgaacgacagcatcctgaccgccgacatgaccgtcgtttccaacgcttcctgcaccaccaactgcctctcgccggttgccaaagtgttgagcgaaagcgtcggcatcgtcaaaggcgcgatgaccaccatccacgcgctgaccaacgaccaaaccgttaccgacgtgcgccacaaagacctgcgccgcgcccgcagcggcgtggaaaacatgattccgaccaaaaccggcgcggcaaaagccgtcggactggtactgcccgaattgaaaggcaaactcgacggactcgccatccgcgtgccgaccgtcaacgtatcattggtagatttgagcttccaagccgcgcgcgacacgacaatcgaagaaatcaacgcactgatgaaagccgcctcggaagcaggcgcgctcaaaggcgttttaggctacaacaccctgcccttggtttccatggacttcaaccacactaccgaagccagccacttcgacgcaacactgaccaaagtcgttgacggcaacatgattaaagtcttcgcatggtatgacaacgaatggggcttcagctgccaaatgctgaacaccgcacgccgtatgttcggacttgaagtgcgcccactcaaataa

SEQ ID NO: 40254 - DNA, 744 bp, Neisseria meningitidis
atgctcatcatccgcaacctgatttactggctgatactctgttccaccctgattttcctctttccctttatgctgctcgcctcgcctttccgagacggggcgcacaagatggcgcgggtctgggtcaaaatcctcaacctctcgctcaaacacatcgtcgggctcaaataccgcatcatcggcgcggaaaacatccccgaccgccccgccgtcatctgcgccaaacaccaaagcggctgggaaacgctcgcccttcaggacatttttccgccgcaggtttacgttgccaaacgcgagttgttcaaaatcccctttttcggctggggcttgaaactggtcaaaaccataggcatagaccgcaacaaccgccgcgaagccaacgagcagctcataaaacaggggttggcgcgcaaaaacgaaggctattggattaccattttccccgaaggcacgcgccttgcacccggaaagcgcggcaaatacaaactcggcggcgcgcgcatggcgaaaatgtttgagatggacatcgtccccgtcgccctcaacagcggcgaattttggccgaaaaactcctttctgaaatatccgggggaaatcaccgtcgtcatctgtccgaccatcccgcacgcaagcggcagcgaagccgaattgatggaaaaatgcgaacacctcatcgaaacgcagcagccgctcatttccggcgcaggcccgtttgccgccaaaatgccgtctgaaaccgcatga

SEQ ID NO: 40255 - DNA, 303 bp, Neisseria meningitidis; identical to SEQ ID NO: 37137

SEQ ID NO: 40256 - DNA, 192 bp, Neisseria meningitidis
atgattggtagtggtgatactaaacaatgcaaaaaattttctgcgtgtgatggaaaataccacgtctacgatcccctcgccctagacttggacggcgacggcatagaaacagtcaccgccaaaggcttttcaggcagcctgaagactgagagagtgaatacgatgagtatacactctatgccactaaattga

SEQ ID NO: 40257 - DNA, 687 bp, Neisseria meningitidis
gtgcaggcggatttagcctatgccgccgaacgcattacccacgattatccgaaaccaaccggtgcaaacaacacaagcacagtaagcgattatttcagaaacatccgtgcgcattccatccacccccgggtgtcggtcggctacgatttcggcggctggaggatagcggcagattatgccagttacagaaagtggaacaacaataaatattccgtcaacataaaaaaggggagagaaacccaggacaatagggaagaactgaagacggaaaatcaggaaaacggcagcttccacgccgcttcttctctcggcttatccgccatttacgatttcaaactcaacgataaattcgataaattcaaaccctatatcggtgcgcgcgtcgcctacgggcacgttaaacatcaggttcattcggtggaaaccaaaaccacgattgttacctctaaaccaaaaggaaaacatctaaagggaggacctgtctcatcaagagagctcagcaaacctccctatcacgaaagccacagcatcagcagcttgggtcttggcgttatcgccggtgtcggtttcgacatcacgcccaagctgaccttggacaccggataccgttaccacaactggggacgcttggaaaacacccgcttcaaaacccacgaagtctcattgggcgtgcgctaccgcttctga

SEQ ID NO: 40258 - DNA, 525 bp, Neisseria meningitidis
atgaaaaaagcacttgccgcactgattgccctcgctctcccggccgccgcactggcggaaggcgcatccggcttttacgtccaagccgatgccgcacacgcaaaagcctcaagctctttaggttctgccaaaggcttcagcccgcgcatctccgcaggctaccgcatcaacgacctccgcttcgccgtcgattacacgcgctacaaaaactataaagccccatccaccgatttcaaactttacagcatcggcgcgtccgccatttacgacttcgacacccaatcgcccgtcaaaccgtatctcggcgcgcgcttgagcctcaaccgcgcctccgtcgacttgggcggcagcgacagcttcagccaaacctccatcggactcggcgtattgacgggcgtaagctatgccgttaccccgaatgtcgatttggataccggctaccgctacaactacatcggcaaagtcaacactgtcaaaaacgtccgttccggcgaactgtccgccggcgtgcgcgtcaaattctga

SEQ ID NO: 40259 - DNA, 768 bp, Neisseria meningitidis
atgagaccatatgctactaccatttatcaactttttattttgtttattgggagtgtttttactatgacctcatgtgaacctgttaatgaacaaaccagtttcaacaatcccgagccaatgacaggatttgaacatacggttacatttgattttcagggcaccaaaatggttatcccctatggctatcttgcacggtatacgcaagacaatgccacaaaatggctttctgacacgcccgggcaggatgcttactccattaatttgatagagattagcgtctattacaaaaaaaccgaccaaggctgggttcttgagccatacaaccagcaaaacaaagcacactttatccaatttctacgcgacggtttggatagcgtggacgatattgttatccgaaaagatgcgtgtagtttaagtacgactatgggagaaagattgcttacttacggggttaaaaaaatgccatctgcctatcctgaatatgaagcttatgaagataaaagacatattcctgaaaatccatattttcatgaattttactatattaaaaaaggagaaaatccggcgattattactcatcggaactatcataggtatggagagaacgattacagcactagcgtaggttcctgtattaacggtttcacggtacggtattacccgtttattcgggaaaagcagcagctcacacagcaggagttggtaggttatcaccaacaagtagagcaattggtacagagttttgtaaacaatccaagtaaaaaataa

SEQ ID NO: 40260 - DNA, 471 bp, Neisseria meningitidis
atgccaagacgtagagaagtccccaagcgcgacgtactgccagatcctaaattcggcagcgtcgagttgaccaaattcatgaacgtattgatgattgacggtaaaaaatccgttgccgagcgtatcgtttacggtgcgctggagcaaattgagaaaaaaaccggtaaagtagcaatcgaagtatttaacgaagccattgcaaacgccaaacctatcgtggaagtgaaaagccgccgtgtaggtggtgcaaactaccaagttcctgttgaagttcgtccttcacgccgtctggctcttgcaatgcgctgggttcgcgatgcggcccgcaaacgtggtgagaaatccatggatctgcgtttggcaggcgaattgattgatgcggctgaaggtcgtggcggtgcgttgaaaaaacgtgaagaagtacaccgtatggctgaagccaacaaagcattctctcacttccgtttctaa

SEQ ID NO: 40261 - DNA, 618 bp, Neisseria meningitidis
atgtccgcttatcgaaaaggcaacatctttatcatttcggccgcttctggcacgggcaaaaccacgctggtttctcggctgttggcaaaccataacggtttgcgcgtttccgtgtcgcacacgacgcgcccgccgcgtgaaggcgaagcaaacggcgtgcattatcactttgtttccaaagaagagtttgagtcgcttatcgcgcaggaggcttttttggaatacgcagacgtattcggcaactattacggcacaagcgcggagggcgtgaatgcgttggcggcggcaggctatgacgtaattttggaaatcgacgttcagggcgcggcgcaggttcgcaacgcgctgcctgaagccgtcggcatctttatcctgccgccttctttcgacgtgcttgctgcacgtctgaacggacgcgggacggacagtcgggaagttatccaaaggaggctgtcgaaggcaaggcatgaaatcgagcagtccgtattgttcgactttgtcgtggtcaatgacgacttggcgcgagcggaggaggatttgcgccatattgtgaatgcctgccgtctgaaaaggtcgcggcaactggggtttattgcagatttgttggaaaattcctag

SEQ ID NO: 40262 - DNA, 660 bp, Neisseria meningitidis
atgtcaaaccaaaaagccttggtcatcttttcgggcggtcaggattcgaccacctgcctgattcaggcaatccaaatctacgggcgcgaaaacgtccaagccattactttccaatacgggcaacgccatgccgtcgagctggaacgtgccagctggattgcgcaggatttgggcgtcaaacaaaccgtactcgacttgagcctgatgcggcagattacgcacaatgccctgatggacgacaccgccgccatcgaaactgccgaaaacggcgttccgaatacctttgtagacggccgcaacgcgcttttcctgctctatgccgcgatttacgccaaagggcaggggatacggcacatcatcgcgggcgtgtgcgaaaccgacttctccggctatcctgactgccgcgacgtgtttgtcaaatcgatgaacgttacccttaatttggcgatggactatgattttcaaatccacacgccgctgatgtatctgaccaaggcgcaaacttgggcgttggcggacgaaatgggcgtgctggactatatccgcgagcaaacccacacctgctataacggcatcgtcggcggctgccgcgaatgcccgagctgtatcttgcgcgaacgcgggctggcggaatatctggaaagtaaaaaggccgtctga

SEQ ID NO: 40263 - DNA, 1059 bp, Neisseria meningitidis
atgaccgccgccctgcacatcggacacctgtccaaaagttttcaaaacaccccagttttaaacgacatttcgctcagcctcgacccgggcgaaatcctctttatcgtcggcgcgtccggctgcggcaaaaccacccttttacgctgccttgccggttttgaacaacccgattttggcgaaatttcgctttccggcagaaccatcttctcgaaaaataccaacctccccgtccgcgaacgccgtttgggttatgtcgtacaggaaggtgtgctgttcccccacctgaccgtttaccgcaacaccgcctacgggctgggcaacggcaaaggcaagacggcgcaagagcggcagcgcatcgaagctatgttggaattgaccggcatttccgaacttgccggacgctatccgcacgaactttcgggcggacagcaacagcgcgtcgccctcgcccgcgccctcgcacccgatcccgaactgattttgttggacgaacccttcagcgcgctggacgaacagttgcgccgccagattcgcgaagacatgattgccgccctgcgcgccaacggcaaatctgccgttttcgtcagccacgaccgcgaagaagccctgcaatacgccgaccggattgccgtgatgaaacaggggcgcatcctccaaactgcaagccctcacgaattgtaccgacaacctgccgaccttgatgccgccctgtttatcggcgaaggcatcgtgttccccgccgcgctcaacgccgacggcaccgccgattgcggattgggccgcctgcccgttcaaagcggcgcacccgcaggcacacgcggcacactgctcatccgtccggaacagttcagccttcacccccattccgcacccaccgcctccattcacgccgtggttctcaaaaccacgcccaaagcgcggcataccgaaatcagcctccgggtcggacaaaccgtcctcacgctcaacctcccttccgcccccaccctgtcagacggcatttccgccgtcctccatttggacggtcccgccctgttcttccccggaaataccctctga

SEQ ID NO: 40264 - DNA, 537 bp, Neisseria meningitidis
atgcaggcaatttctcccgaattacaggcgcgcgccgccaaaatcaaactgctgatcctggatgtggacggtgttttgaccgacgggcgcatctttatccgcgataacggcgaagaaatcaaatcgtttcacacactggacggacacggtctgaaaatgcttcaggcaagcggcgtgcagactgcgattatcacaggtcgggacgcgccctccgtcggcatccgcgtcaaacagttgggcataaattactacttcaaaggcatttcggacaaacgcgccgcgtatgaagagctgcgcgctcaggtcggcgtggaagaagccgagtgtgcctttgtcggcgacgacgtggtcgatttgccggtgatggtgcgttgcggattgccggttgccgtccccgacgcgcattggtttacgctgcaacacgccgcctatattgccaaacgccccggcggtgcgggcgcggtgcgcgaagtgtgcgacctgattatgcaggcgcaagggactttgggcgcggctttgaacgagtacatcaaatga

SEQ ID NO: 40265 - DNA, 915 bp, Neisseria meningitidis
atgacttggcgcagcctgcttattcaaaacggcggcaaactatccttgcaacgccggcaactgctgattcaacaaagcggcgagtcccacaccgtactattagaggacatcgccgttatcatcatcgaaaatcgcgaaaccctgattaccgccccgctcctatcagccttagccgagcatggtgcaaccctgctgacctgcgacgagcagttcctgccctgcggacaatggctgccttatgcccaatatcaccgccaacttaaaatcctcaaactgcaactgaacataagcgaacccttaaaaaagcaactctggcaacatatcgtccgccaaaaaatcctgaaccaagcatttgtcgcagacgaaacaggcaatgatcttgcagccaaacggctgcgcactttggcatctgaagtccgttcgggcgatacaggaaaccgtgaagcccaagctgccgccctctactttcaagccctctttggcgaaaaatttacccgtaatgacaacaacgccgtcaatgccgcattgaactacacctacgccgtgctacgggccgcagttgcacgcaccctgaccttatacggttggttacctgcattaggcttgtttcatagaagcgaactcaatccattcaatctcgccgatgactttatcgaacccttacgcccattggccgacctgaccgtgatacatttgtacgaacaaggccgtctgaaaactgaactgacgcccggcatcaaacaacacctcatcaaaacccttcactatcaaatcagcatcgaacggcaacatttcagcaccttggctgccatcgacaaaatgatttcgtcatttcaagccggtgtaaccgataaaaacgccaaacaactgaaactgcctgaaatcctaccattgaaagcataccaatatgagtga

SEQ ID NO: 40266 - DNA, 1230 bp, Neisseria meningitidis
atggcgttcggcaaatccttatttcatgcgatcggccgcgtcagcctggtcaggcagattgccgccggtttggcgttgggcatcgtaatcggttcggtttccccgcaactgggcttggcggcaggcttgttcggcagcctgtttgtcggcgcgctcaaagcggtcgcgccggttttggtatttattttggtggcggccacaatcgcgcagcaccaaaaaggcaacaaggcgcatatcaggccgattatcatcctttacctcatcggtacgttttccgcagccctgaccgccgtcatcgccggtatggttttcccgacgcacattgttttggcgggcgcgggcgatgtgtccgccgcgccgccttccggcattgtggaagtattgaaatcgctgctgatgaacctggtcgccaacccgattaacgcgattgccaatgccaactatatcggcattttggcttgggctttggttttgggcgcggcgttgcggaatcacggttcggacgttacgcggcaggtcgttgccgatttggcggaagcggtttccaccgtcgtgaaatggattatccgttttgcccctttgggcattttcgggctggtgtcgtccacaatcgcggagacgggtttcggcgcgctggcggggtacgcgaagctgcttgcagtgctgttgggctgtatggcgtttatcgcgctggcggtcaatcccgccatcgtgtggtggaaaatccgccgcaacccttatccgctggtgttcacctgcctgcgcgaaagcggcgtgtatgccttctttacccgttcttccgccgccaatatccccgtgaatatggctttggcgaaaaaactggggctgcacgaagacacttattcgatttccatcccgttgggggcgaccgtcaatatgggcggcgcggcgattacgattaccgttttggctatggcggcggcgcacacccaaggcatacaggttgattttgccaccgcgctgctgttgagcctggtggcgacggtcagcgcgtgcggcgcgtccggcgtggcgggcggttcgctgctgctgattccgctggcgtgcagcctgttcggcatcagcaacgatgtcgccatgcaggtggttgccgtcggctttatcatcggcgtgattcaggattcggcggaaacggcgttgaattcttcaaccgatgttttgtttaccgctgccgccgatttgggccgacagagaaaccgggcggaataa

SEQ ID NO: 40267 - DNA, 450 bp, Neisseria meningitidis
atgactgataatcgggggtttacgctggttgaattaatatcagtggtcttgatattgtctgtacttgctttaattgtttatccgagctatcgcaattatgttgagaaagcaaagataaatgcagtgcgggcagccttgttagaaaatgcacattttatggaaaagttttatctgcagaatgggagatttaaacaaacatctaccaaatggccaagtttgccgattaaagaggcagaaggcttttgtatccgtttgaatggaatcgcgcgcggggccttagacagtaaattcatgttgaaggcggtagccatagataaagataaaaatccttttattattaagatgaatgaaaatctagtaacctttatttgcaagaagtccgccagttcgtgtagtgacgggctggattattttaaaggaaatgataaggactgcaagttacttaagtag

SEQ ID NO: 40268 - DNA, 681 bp, Neisseria meningitidis
atgacttacaccatcgtccctatcgccaccgcccgatcgccctacaaacagaaattcggcatcgcccgccagcccggtttagtctccgccgcagaagtatgcatcgagctgaatcccgaatttaccgcagacagcgtgcgcgggctggaagatttcgattatgtgtggataagttttatttttcacggcgtattggatgaaggctgggcacaaatggtgcgcccgccacggctcggcggcaaacaaaaaatgggcgtattcgccacgcgcagcccccaccgccccaaccatctcggactatcactcttaaaactcaaccgcatcgaaaccggcaaacccgtccgcctttattgcagcggcgcagacctgttggacggcacaccaattatcgacataaaaccctacatcccctttgtcgaatccaaacccgatgccgcatctggtttcgtcagcggcaaacccgtagagttggaagtcgtttggcaggaaaacatcggcgcggaaaatttatctgcaaacaccaaaaaccttatcagccaaagcattgcccaagatccgcgccccgcctatcagaatattcccgaacggatttatgtgatgaatattgcagattacgaagtcagatttcaaatcgaggaaaaccgcgcaaccgttattgatctttctccaaccccgctttaa

SEQ ID NO: 40269 - DNA, 2751 bp, Neisseria meningitidis
atgaccgacgcaaccatccgccacgaccacaaattcgccctcgaaaccctgccggtaagccttgaagacgaaatgcgcaaaagctatctcgactacgccatgagcgtcattgtcgggcgtgcgctgccggacgttcgcgacggtctcaagccggtacaccgccgcgtactgtacgcgatgcacgaattgaaaaacaactggaatgctgcctacaaaaaatcggcgcgcatcgtcggcgacgtcatcggtaaataccacccccacggcgataccgccgtatacgacaccatcgtccgtatggcgcaaaatttcgctatgcgttatgtgctgatagacggacagggcaacttcggatcggtggacgggcttgccgccgcagccatgcgctacaccgaaatccgcatggcgaaaatttcccacgaaatgctggcagacattgaggaagaaaccgtcaatttcggcccgaactacgacggtagcgaacacgagccgcttgtactgccgacccgtttccccacactgctcgtcaacggctcgtccggcatcgccgtcggcatggcgaccaatatcccgccgcacaacctttccgataccgtcaatgcctgcctgcgcctgctcgatgcacccgacaccgaaatcgacgaactgatcgacattatccaagcccccgacttcccgaccggggcaaccatctacggcttgagcggcgtgcgcgaaggctataaaacaggccgcggccgcgtcgttatgcgcggtaagacccatatcgaacccataggcagaaacggcgaacgcgaagccatcgttatcgacgaaatcccctatcaggtcaacaaagccaagctggtcgagaaaatcggcgatttggttcgggaaaaaacactggaaggcatttccgagctccgcgacgaatccgacaaatccggtatgcgcgtcgttatcgagctgaaacgcaacgaaaatgccgaagtcgtcttaaaccaactctacaaactgactccgctgcaagacagtttcggcatcaatatggtggttttggtcgacggacaaccgcgcctgttgaacctgaaacagattctctccgaattcctgcgccaccgccgcgaagtcgttacccgacgtacgcttttccggctgaagaaggcacgccatgaagggcatatcgccgaaggcaaagccgtcgcactgtccaatatcgatgaaatcatcaagctcatcaaagaatcgcccaacgcagccgaggccaaagacaaactgcttgcgcgtccttggcgcagcagcctcgttgaagaaatgctgacgcgttccggtctggatttggaaatgatgcgtccggaaggattggctgcaaacatcggcttgaaagagcaaggttattacctgagcgagattcaggcagatgctattttacgcatgagcctgcgaaacctgaccggcctcgatcaagaagaaattgtcgaaagctacaaaaacctgatgggtaaaatcatcgactttgtggatatcctctccaaacccgaacgcattacccaaatcatccgcgacgaactggaagaaatcaaaaccaactatggcgacgaacgccgcagcgaaatcaacccgttcggtggcgacattgccgatgaagacctgattccgcaacgcgaaatggtcgttaccctgacacatggcggctatatcaaaacccagccgaccaccgactatcaggctcagcgtcgcggcgggcgcggcaaacaggcggctgccaccaaagacgaagactttatcgaaaccctgtttgttgccaacacgcatgattatttgatgtgctttaccaatttgggcaagtgtcattggattaaggtttacaaactgcccgaaggcggacgcaacagccgcggccgtccgattaacaacgtcatccagttggaagaaggcgaaaaagtcagcgcgattctggcagtacgcgagttccccgaagaccaatacgtcttcttcgccaccgcgcagggaatggtgaaaaaagtccaactttccgcctttaaaaacgtccgcgcccaaggcattaaagccatcgcgctcaaagaaggcgactacctcgtcggcgctgcgcaaacaggcggtgcggacgacatcatgctgttctccaacttaggtaaagccatccgcttcaacgaatactgggaaaaatccggcaacgacgaagcggaagatgccgacatcgaaaccgaaatttcagacggcatcgaagatgaaaccgccgacagcgaaaacgcactgccgagcggcaaacacggtgttcgcccgtccggtcgcggcagcggcggtttgcgcggtatgcgcctgcctgccgacggcaaaatcgtcagcctgattaccttcgcccctgaaaccgaagaaagcggtttgcaagttttaaccgccaccgccaacggatacggaaaacgcaccccgattgccgattacagccgcaaaaacaaaggcgggcaaggcaatattgccattaacaccggcgagcgaaacggcgatttggtcgccgcaaccttggtcggcgaaaccgacgatttgatgctgattaccagcggcggcgtacttatccgcaccaaagtcgaacaaatccgcgaaaccggccgcgcagcagcaggcgtgaaactgattaacttggacgaaggcgaaaccttggtatcgctggaacgtgttgccgaagacgaatccgaactctccgacgcttctgtaatttccaatgtaaccgaaccggaagtcgagaactga

SEQ ID NO: 40270 - DNA, 1008 bp, Neisseria meningitidis
atgagcaccttcttccggcaaaccgcccaagccatgattgccaaacacatcgaccgtttcccgctattgaaattggaccgggtgattgattggcagccgatcgaacaatacctgaaccgtcaaaaaacccgttaccttagagaccaccgcggccgtcccgcctatcccctgttgtccatgttcaaagccgtcctgctcggacaatggcacagcctctccgatcccgaactcgaacacagcctcattacccgcatcgatttcaacctgttttgccgctttgacgaactgagcatccccgattacagtactttatgccgttaccgcaactggctggcgcaagacgacaccctgtccgaattgctcaaactgattaaccgccaactgaccgaaaaaggcctaaaaatagagaaagcatccgccgctgtcgttgacgccaccattattcagaccgccggcagcaaacagcgtcaggctatagaagttgacgaagaaggacaaatcagcggccaaaccacaccgagtaaggacagcgatgcccgttggatcaagaaaaacggcctctacaaactcggttacaaacaacatacccgtaccgatgaggaaggctatatcgagaaactgcacatcacccccgccaatgcccatgagtgcaaacacctgccgcctttgctggaagggatagccgaaggtacgaccgtctatgccgacaaaggctacgacagtgcggaaaaccggcaacatctggaagaacatcagttgctggacggcattatgcgcaaagcctgccgcaaccgtccgctgtcggaaacgcaaaccaaacgtaaccgatatttgtcgaagacccgttatgtggtcgaacaaagcttcggtacgctgcaccgtaaattccgctacgcccgggcagcctatttcggactgattaaagtgagtgcgcaaagccatctgaaggcgatgtgtttgaacctgttgaaagccgccaacaggttaagtgcgcccgctgccgcctaa

SEQ ID NO: 40271 - DNA, 264 bp, Neisseria meningitidis
atgagcgaaactaaaaatgttcgtactttgcaaggcaaagtagtaagcgacaaaatggataaaaccgtaacagtattggttgagcgtaaagtaaaacatccgctgtatggtaagattattcgattatctactaaaatccatgcccatgatgaaaataatcaatatggaattggtgatgtggttgttatatcggaatcccgtccattgtcaaaaactaaatcttgggttgtcagtgagctggttgagaaagcacgttctatttaa

SEQ ID NO: 40272 - DNA, 324 bp, Neisseria meningitidis
atggatattgtgcaacttgggccggcggaattgaaggcgtggatggacgaagggcggatgttttgtttgttggacgtgcgtacggatgaagaaacggcggtttgttcgctgccaaatgcgctgcatatcccgatgaatctgattccgctgcggcagaacgagctgccggatgatgtgccgcttgtggtgtattgccaccacggtatccgcagcctgcatacggcgatgtatttggcggacgcgggttttgaaaacctgtacaaccttcagggcggcatcgatgcatgggcggccgagattgacggcaacatgatgcgttattga

SEQ ID NO: 40273 - DNA, 789 bp, Neisseria meningitidis
atgaatccgcaggacaaatgctggcaggttcaccgccatctcgccgaatatgccgaccaacgcctgacactcgtccgcaacgcgcccaagtatatcctgcttgcaggtgcggatgcggacatcagccgcagcctgctggcgaaacgctatccgcaggcggtatttgaagaatacgattcccgtgcggattttttggcggctgccgctgccgcccgcaaaggcggtttttggcaaaggtttacgggtaagggcgtggtgcaacactgccaatccccgatcgcgccgctgcccgaagcgtgtgccgatatgttgtggtcgaatctcggactgttggcggcggaacaaatccttcctgtgctgcacaactgggcgcgcgccttgaagacggacgggctgctgttttttacctgcttcgggcgcgacacttttaccgaactgaaatgccgtctgaaagaaaacggcattgaaagccgcagcgtgatgtttcccgatatgcacgacttgggcgatatgcttgctgaaaacgagttttacgaccccgttaccgatacggcgaagctggtgttggattacaaaaaggcggaaacgttttgggcggatatggacacgctgggcgtttggcgggcgatgtcgtggaacgatgaaaacgccgcgcgttcgtgtgtcgggacaatatttgagcgggaaggcggtttgggcattacgctggaaacggtgtacggacacgccgtgaaaaaactgatgctgccgcaaggggagaacgtggtgcagttttttccgaagagatga

SEQ ID NO: 40274 - DNA, 777 bp, Neisseria meningitidis
atgaccctcatccacccgaccgccgtcatcgaccccaaagccgaactcgactccggcgtcaaagtcggcgcgtacactgttatcggccccaacgtccaaatcggcgcgaataccgaaatcggtccgcacgccgtcatcaacggccacaccagcatcggcgaaaacaaccgcattttccaatttgccagcctcggcgaaatcccgcaggacaaaaaataccgcgacgagccgaccaagctgattatcggcaacggcaacaccatccgcgaattcaccacctttaatttaggcacggtaaccggcatcggcgaaacccgtatcggcgacgacaactggattatggcgtactgccacctcgcgcacgactgcgtggtcggcaaccacaccatcttcgccaacaacgcctcgcttgccggacacgttaccgtcggcgactacgtcgttttgggcggctacacgctggttttccaattctgccacatcggcgactacgctatgaccgccttcgccgcaggcgtacacaaagacgtaccgccctactttatggcatcgggctaccgcgccgaaccggcggggctcaacagcgaaggcatgcgccgcaacggttttaccgcagaacagatttccgccgtcaaagacgtgtacaaaaccctctaccatcgcggcattccgtttgaagaggccaaggcagacatcctccgccgcgccgaaacccaagccgagcttgccgtattccgagactttttcacacaatcgacacgcggcatcatccgctga

SEQ ID NO: 40275 - DNA, 1005 bp, Neisseria meningitidis
atgaccatcatcgtaacaggcgcggccggctttatcggcagcaacatcgtcaaagcacttaatcaacgcggtattactgacattgttgccgtcgataatttgagcaaaggcgaaaaattcaaaaaccttgccgagtgcgaaatcgcccattatctcgacaaacatgaattcatccgccaagtgagggaacacattttaccttatcaaaacatcgaagccgttttccatcaaggcgcgtgttccgacaccatgaatcacgacggtttgtatatgatggaaaacaactaccagtacacgctggatttgttggactggtgtcaggacgaacgcattcccttcctttatgcctccagtgcggcggtttacggcaaaggcgaaatcttccgcgaagagcgcgaactcgaaaaaccgctcaacgtctacggctactccaaattcctgtttgaccaagtattgcgccgccgcatgaaagaaggtctcaccgcccaagtcgtcggcttccgctacttcaacgtttacggacaacacgaacaacacaaaggccgcatggcatccgtcaccttccaccatttccaccaataccgcgaacacggttacgtcaacctgttcggcagcaatgacggttacggcaacggcgaacaaacccgcgactttgtcagcgtcgaagacgttgccaaagtcaacctctacttcttcgaccatcccgaactttccggcatctacaacctcggtaccggccgcagccaacagttcaacgaactcgccgccgccaccgtcaacgcctgccgcgccgccgaaggcaaacctgaaatgagcttgaaagagctggtaaaagaagaacttatccgctacatcccatttcccaatgcgctcaaaggcaaataccaaagcttcacccaagccgacattaccaaattgcgcgaagccggatataaggaagaatttttcgatgtcaaatcaggcgtcgaccgctacgtcaaatggatgctggaaaatttggcttaa

SEQ ID NO: 40276 - DNA, 636 bp, Neisseria meningitidis
atgtttctgaagaggagcaaggcagtgcaaacccatgattttacggcaacgatgcaatttggtacggtatcggcagtcgatgaggcatcccacagtttgcgggtaaaaatccccgtactcgacgacatggaaaccgattggctgccgatggcaacaccggcggcgggcggcaaccgtttttacagcctgcccgatgtgggcgaactggtggtctgcctgctggacgcgcgcggcgaaaacggctgcgtcatcggcgcgatttacaatgccgccgacaagccgccggtatccgaccaaaacaaatgggtcaaacggtttaccaacggcacggtcatctcgcacgaccggggcagcggcgaagtcgttgtggaaacgccgggcaaggtcaaaatcaaagcggcacagaaagtggacatccaatcgccggaaacagaaattacgggcaatgcgacggtaaacgggctgttgacctataccgcaggtttggtggccggcaatgccggcggcggcgaggcggcgaagattacgggtaacgtcatcattgacggcgaacttatcgtcaacggcatcaatatcggcaagcacatccatgacggcgattccggagggcaaaccggcgaaccgaaaaatcattaa

SEQ ID NO: 40277 - DNA, 843 bp, Neisseria meningitidis
atgttagtctgcaacccctacgaagtcgtcatccacggcacaacgagttccggcaagattttccgtcccagcgactgggcggaacgcctgtgcggcatcctgtcctcgttcaccaaagacaaccgcctctcctattcgaaatgggtgcgccccatgctggtggacaacatccgctgcgtcgccgtcgataaaaaactggaaaccgacaacccccaaatgttccgcttcctgatggactttgccgccgacaacgacctgcgcgtcatcgactgcaaagccctgctcgaagaacgcgaacagggcggacaaaacaaccctgccgacgaacacgtcatgctggcacaggcaatcgaagaaaaacacgccgccgagaaagcacaggaacagaccgcctcgggcgcatcctacgttttgcgcgaaatcggcgcggacgacaccgccaccgcctttgcagccttgagcgttttgcgttccgccctgaccgacatcaaccgctttaccgaacagatcaacaaagtccaacgcccccaaggctaccgcctgctgggtatttttgaagaaggcaaacacaatgccgtcgccgtctgcggcttccgcgaagcctgcaccctcgccagcggccgccacatccacatcgatgacatcgttaccctgccgcaaagccgccgcaaaggctacgcctcgcgccttttggaagaagtccgcaaaatcggcgcggaaacaggggtaaccaaaatccacctcaacgtccacgtcaaccacgaccgtgccgacgcgcaccgcctgtatttcaaaaacggttttgaaatctgcgcataccacttccgttgcgaccccaaatga

SEQ ID NO: 40278 - DNA, 342 bp, Neisseria meningitidis; identical to SEQ ID NO: 39758

SEQ ID NO: 40279 - DNA, 2790 bp, Neisseria meningitidis
atgaccgattacagcaaaaccgtaaacctgctcgaaagcccgtttccgatgcgcggcaatcttgccaagcgcgagcctgcatggctgaaaagctggtacgagcaaaaacgctaccaaaaactgcgcgaaatcgccaaaggtcgtccgaagttcatcctgcacgacggcccgccgtatgccaacggcgacatccacatcggtcacgccgtcaacaaaattctcaaagacatcattatccgcagcaaaacccaagccggttttgacgcgccttatgtgccgggttgggactgtcacggtttgcctatcgaagtgatggtagaaaagctgcacggcaaagacatgcccaaagcgcgtttccgcgaattgtgccgcgaatatgccgccgaacaagttgcccgccagaaaaaagactttatccgtctgggcgtgttgggcgactgggacaagccctacctgaccatggattttaaaaccgaagccgataccgtgcgtatgctcggcgaaatctacaaatccggctatctctaccggggtgcgaaaccggttcaattctgcttggactgcggttcttcgctggccgaagcggaagtggaatataaagacaaaatctcgcccgcgattgacgttgcctatctgtttaaagacactgccgcgcttgccgccgcattcggtttggcaagtatcgaaggcaaagcgtttgccgtcatctggacgactacgccttggacgctgcctgcgagccaagccgtatctgccggcgcggacgtggtgtatcaactgattgatacgcccaaaggcaaattggtattggcgaaagatttggcggaagacgcgctcaaacgttacggcttttcagacggcatcgccatccttgccgaaaccaccggcgacaagctggaaaacctgcacatgaaccatccgttcctcgaacgcgatattcccatgcttaacggcgaacacgttaccaccgatgccggtaccggcttggtgcatactgcgcccgcgcacggtttggaagactacgccgtctgcaacaaatacggcatcgagctttacaatcctgtcaacgccgaaggcaaatacatcggcgaaacgccgcgcgttgccggtatgcgcgtttgggaggcgaaccccgtcatcctgcaatggttggaagaaaccggcaaccttttggcaagcagtaaaatcgaacacagctacgcccactgctggcggcacaaaacgccgctgatttaccgcgcgacaggtcaatggtttgtcggtatggacaaagccggtgccgacggcaaaaccctgcgcgacaaagccatcaaggccgtggacgacaccgaattcttcccgtcttggggtcgcgcgcgtttggaagccatgattgaaggtcgtcctgactgggtggtttcacgccaacgctattggggcacgccgatgactttctttgttcacaaagaaacgggcgagctgcatccgaactctgccgaacttttggaaaaagttgccctgaaaatcgaagaaaaaggcatcgaagcgtggttctccctcgataagagcgaactcttgagcgcggaagattgcgaaaattacgataaactttctgacacaatggacgtatggttcgactccggctcgacccattattccgttgtgaaacaacgcgaagaattggaatggccggcggatttgtatctcgaaggcagcgaccagcaccggggctggtttcaatcgtccatgctgaccggctgcgcctcatcaatgggacgcgcaccgtataaacagctgctgacccacggttttgttgtagacggcgaaggcaaaaaaatgtcgaaatccatcggcaacgtcgtcgcgccgcaagaagtctataacgaattcggcgcggacatcctgcgtctgtgggcggcatctaccgattacagcggcgaattggcgatttctaaagaaatcctcaaacgcgtaaccgaaagctaccgccgtatccgcaataccttgagctttttgtttgccaacttgagcgactttaatccgattgaagatgccgtgcaacaggcagacatggtggaaatcgaccgttatgccctggtgttggcgcgtcggctgcaagagcgtctggcaggcgattactatccgcgttatgccttccattttgccgtgaaagacattgtttctttctgctcggaagacttgggcgcgttctacctcgatatcctgaaagaccgcctctacaccaccaaagccgacagccatgcacgccgcagtgcgcaaaccgccctgtatcacatcacacgcagtttggttctcttgattgcaccgattttgtgcttcaccggcgaagaggcgtgggacatcatcggcggcggcgaagaagacagcgtgcttttccacacttggcacgagttcccgaccatcaacgaaaaaaccgaagccgaactggtgaaaaaatggacggcaatccgcgaagcccgcgaagccgttaccgccgccatcgagcctttacgcgccgacaaaaccgtcggttcgtccttgcaagccgaagccgaaatcaccgcgccggaagaaatggccggctatctgaacgccctgggcgaagaattgcgctttgccctgctggtgtctaaagccgaagtgaaagtaggtgatgaacttgccgttgccgccaaagccagcgacggcgaaaaatgcgaacgctgctggcactacacccgcgatgtgggcgcggttgcaggccatgaaaccgtctgcaaacgctgtgcagagaatgtcagcggagaaggcgaaacgcgccattacgcctga

SEQ ID NO: 40280 - DNA, 678 bp, Neisseria meningitidis
atgagcatcaagcaatggccggaaggcgaaagacccagggaaaagctgttggaacgcggggcggcggcgttgagtgatgccgaacttttggcaatcctgctgcgcgtcggcacgcgcggaatgagtgcggtcgatttggcgcgttatttgctgcaggagttcggcagtttggggaggctgatgagcgcggaggtcggcaaactgtcggcatacaaagggatggggacggcaagtttcacacagtttgccgtggtcagggaaatcgggcggcggatattggcggaagaattgcaggaagaaatcaccttatccgatcccgataccgttgccgattatttacgctttcatttggggcaggaaaaagtcgaagtcagcgtcgcgctgctgttgaaccgccaaaaccaactgattgcggtcagggagctgtcgcgcggtacggttgcggaaaacacgatttacatccgcgaaatcgtcaaactggctttggacgagtatgcggacagcctgattatcgcgcacaaccatccgggcggctcgcccgaaccttcgcaggaagacatcatgttcacaaggcggctggcacaggccatgtcgctggttgatgtgtcgctgctcgaccattttatcgttacctcgcaaagcgtctgttcgttcaggcagctcgggctgatgccctga

SEQ ID NO: 40281 - DNA, 759 bp, Neisseria meningitidis
atgattaccatccgcaacgtcagctaccgcatcggcacacgccccatcctcgacaacgtcagcctcgacatccccgaaggcggcattaccgccctcgtcggccccaacggtgcgggcaaatccaccctgttttcctttatggcgcggctgcgcccgcttgaaagcggcagcatcgcctaccgaggcaaaaaccttgccggcactcccaccgccgaactcgcccgcacgctctccatcctcacccaagaaaacagcatcatgagccgcattaccgtgcgcgacctgctgatgttcggacgttacccctaccatcaaggcagaccgactgccgaatgccgccgtatcgttaacggtgcaatcgaagaattccacctgcaagacctctccgaccgctacctgaccgagctctccggcggacaacgccaacgcgccatgattgcgatggtgttctgccaaagcaccgactacgtccttttggacgaaccgctgaacaacctcgatatgtatcacgcccgctcgctcatgcagattctgcaaaagctcacgcgcgaacacaaacgcaccaccgtcgccgtattgcacgacatcaaccaggccgccgcctacgccgaccacgtcgtcgccatgaaaaacggcaaagccgtcctgaccggcacgcccgaagaagtgttcaccgtacacaacatcaaagaactgttcgacatggacgtggacgtactcgactacgaaggcaaaaaactcatcgtccaccacatctga

SEQ ID NO: 40282 - DNA, 1386 bp, Neisseria meningitidis
atgtcttcaggactcgtaacagcggcgtatatcgttgccgcaattttattcatcttctcactggcggggctgtccaaacaggaaaccgccaaacagggctgctattccggtatcgccggtatggcggtcgccctttttgtaactgttttttccgacaatacccacggactgggctggatcatcatcgccatgctcatcggcgcggcaatcggcatctacaaagccaaaaaggtggaaatgaccgaaatgcccgaactgattgccctgctgcacagcttcgtcggcctagcggcggttttggtcggcttcaacagctatatcgagccgggcaacgtttcgcacgatatgcacaccatccatctggtcgaagtgtatttaggcatcttcatcggcgcggtaacctttaccggctcgctggtcgcattcggcaagctcaacggcaaaatcagcagcagcccgctgcaactgcccgccaaacacaagctcaacgcactggcacttgccgtatcgtttgtgttgctgctcgtattcgtcggcattgacggcagcggcttcatcctgctgattatgaccctgattgccctcgcattcggctggcacttggttgcctccatcggcggcgcagatatgcccgtggtcgtgtccatgctcaactcctactccggctgggcggccgcagcggcaggcttcatgctctccaacgacctgctcatcgttaccggcgcactggtcggctcaagcggcgcaattctatcctacattatgtgcaaagccatgaatcggtcgtttgtttccgtgattgccggcggtttcggcagcgacagcggcacatcatcttccggcagccaagagataggggaataccgagaagtcaaagctgccgatgttgccgaaatgctgaaaggcgcaaacagtgtcattatcaccccgggctacggcatggcagtcgcacaagcgcaataccccgttgccgaaatcaccgagcttttgcgtaaaaacggcaccgaagtacgcttcggcatccaccccgtcgccggccgcctgcccggtcatatgaacgtactgctcgccgaagccaaagtcccctacgacatcgtgttggaaatggacgaaatcaacgacgacttccccgaaaccgatgtggtcttggtgattggtgcgaacgataccgtcaatcctgccgcccaaaccgacccgaacagcccgattgcgggtatgcccgtgttggaagtgtggaaggcaaaagaagtcgtcgtcttcaaacgctcgatgaacaccggctacgcaggtgtacagaatccactgtttttcaatgaaaacagcgtaatgtgtttcggagatgcgaagaaaaccgtggatgacattctgtccgaactgaaaaaataa

SEQ ID NO: 40283 - DNA, 366 bp, Neisseria meningitidis
atgaagcggcaggctttcttcaaactgatggcgtgtgcggcatttctgtctgccgtttcgctgcgcctccccgtattgggcgcgtgttacgcaatattgtccctctatgcgtttgcactttacggcatcgacaaacggcgtgccgtgcggggaaaacgccgcattcccgaacaccgcctgctgctgcctgccttgttcggcggttgggcgggcgcatacttgggcagcaggatattcaggcataaaacggcgaaaaagcgttttgttgtgctgttccgtctgactgtttcaggtaatgtcctggcgaccctcatcctgatttatagtggattaaatttaaaccagtacggcgttgcctcgccttag

SEQ ID NO: 40284 - DNA, 1017 bp, Neisseria meningitidis
atgtatcggaaactcattgcgctgccgtttgccctgctgcttgccgcttgcggcagggaagaaccgcccaaggcattggaatgcgccaaccccgccgtgttgcaaggcatacgcggcaatattcaggaaacgctcacgcaggaagcgcgttctttcgcgcgcgaagacggcaggcagtttgtcgatgccgacaaaattatcgccgccgcttacggtttggcgttttctttggaacacgcttcggaaacgcaggaaggcgggcgcacgttctgtatcgccgatttgaacattaccgtgccgtctgaaacgcttgccgatgccaaggcaaacagccccctgctgtacggggaaaccgctttgtcggatattgtgcggcagaagacgggcggcaatgtcgcgtttaaagacggcgtattgacggcagccgtccgcttcctgcccgtcaaagacggtcagacggcatttgtcgacaacacggtcggtatggcggcgcaaacgctgtctgccgcgttgctgccttacggcgtgaagagcatcgtgatgatagacggcaaggcggtgaaaaaagaagacgcggtcaggattttgagcggaaaagcccgtgaagaagaaccgtccaaacccacgcccgaagacattttggaacacaatgccgccggcggcgatgcgggcgtaccccaagccgcagaaggcgcgcccgaaccggaaatcctgcatcccgacgacggcgagcgtgccgataccgttaccgtatcacggggcgaagtggaagaggcgcgcgtacaaaaccagcgtgcggaatccgaaattaccaaactttggggaggactcgataccgacgtgcaaaaagagttggtcggcgaacaacgcaagtgggcgcaggaaaaaatcagcaactgccgacaagccgccgcgcaggcagaccggcaggaatacgccgaatacctcaagctgcaatgcgacacgcggatgacgcgcgaacggatacagtatcttcgcggctattccatcgattag

SEQ ID NO: 40285 - DNA, 1116 bp, Neisseria meningitidis
atgcttaaatttaccttacacaaaaaagacggatacgcccgacgcggcacgctggagttgaaccacggcaaaattgaaacgccggtatttatgcctgtcggtacttacggctcggttaaggcgatgaacccgcaaaacctgcacgacatcaaggcgcaaattattttgggcaacacttatcatttgtggctgcgtccgggcttggaggtcgtcgaacagtttggagggcttcacggctttatcggctgggacaaaccgattctgaccgactcgggcggttttcaggttttttctttgtcggatatgcgcaagctgacggaagaaggctgtacgttcaaaagcccgatcaacggcgacaagctgtttttatcgcctgaaatttccatgaaaatccaaacggttttgaactcggacatcgcgatgcagctggacgaatgcacgccgggcgaagcaacgcgcgaacaggcgaaaaaatcgctgcaaatgagcctgcgctgggcggaacggagcaaaaaagcctttgaagatttgaaaaacccgaacgcgctgttcggcatcgtgcaaggcgcgatgtatgaggatttgcgcgaagaatcgctgcgcggtttggaacagtttgattttcccggccttgccgtcggcggcttgtccgtcggcgaacccaagcccgaaatgtaccgtatgctgcgcgccgtcggtccgatactgcctgaacacaaaccgcattacctgatgggcgtaggcacgccggaagacctcgtgtacggcgtggcgcacggcatcgatatgttcgactgcgtgatgcccacccgcaatgcacgcaacggctggctgtttacccgtttcggcgatttgaaaatcaaaaacgccaaacacaagctcgacaagcgtccgatagacgaaagctgcacctgctacgcctgccaaaacttcagccgcgcctacctgcaccatctgcaccgcaccggcgaaatcttgggcgcacagttgaacaccatccacaatctgcatttctaccaagtcattatggcggaaatgcgcgaagccgtcgaacaaggcaaatttgccgactggcaagcacaattccacgaaaaccgcgcacgcggcacagactga

SEQ ID NO: 40286 - DNA, 360 bp, Neisseria meningitidis; identical to SEQ ID NO: 39367

SEQ ID NO: 40287 - DNA, 657 bp, Neisseria meningitidis
atgaaaaacaaaaccaaagtctgggacttccccacccgccttttccactggctgcttgccgcatccctaccctttatgtggtatagcgcgaaaaccggcggcgatatgctgcaatggcacacgcgcgtcgggctgtttatccttttcctgctcatattccgcctctgctggggcatttggggcagtgataccgcccgtttctcccgtttcgtccacggatggtcgggtatcagggattatctgaaaaacggtattcccgaacatatccagcccggacacaaccccttgggcgcactgatggtcgtcgcgcttttggccgccgtctcatttcaagtcggcacggggctttttgccgccgatgaaaacaccttcagcaccaacggctacctcaaccatttggtttccgagcatacgggcagccttatgcggaaaatccacctcaactttttcaacctgctcgccgttttttccgcagtccacatcgccgccgtcgccgcataccgcgtgttcaaaaagaaaaatctcgtcctcccgatgataaccggcttcaaatacatcgaaggcaaaacctcaatccgctttgccggcaaaaccgcgcttgccgccgcattatcggttgccgcgcttgtcgcagccgccatcctgctcctgtcctga

SEQ ID NO: 40288 - DNA, 780 bp, Neisseria meningitidis
atgaaaaccatcacagaaaccctaaatctcgccccgaaaggcaaaaacttcctgaccgccgattggcccgcgcccgccaatgtgaaaaccctgattaccacgcgcaacggcggcgtgagccaaggtgcgtatcagagtttgaacctcggtacgcacgtcggcgacaatcccgaagccgtgcgccgcaaccgcgaaatcgtgcaacagcaggtcggattgcccgttgcctacctcaatcaaatccacagtaccgtcgtcgtcaatgctgccgaagctttgggaggcacacccgatgcggacgcttccgtagacgacacgggcaaagttgcctgtgctgtcatgactgccgactgtctgcccgttctattttgcgacagggcgggtacggcggttgccgccgcacacgcgggctggcgcggtttggcgggcggcgtattgcaaaacaccattgccgcgatgaaggttccacccgtcgaaatgatggcgtatctcggtcccgccatcagtgcggatgcgtttgaagtcggacaggatgtgtttgatgcgttctgcacgcccatgcccgaagccgccgccgcatttgaaggcataggcggcggcaaattccttgccgacctttacgcgctcgcccgcctgattctgaagcgcgaaggcgtgggcggcgtatatggcggcacgcattgtacggttttggaacgggatactttcttttcctaccgccgcgacggagcgacagggcgtatggcgagcctgatttggctggacggcaatgccgtctga

SEQ ID NO: 40289 - DNA, 717 bp, Neisseria meningitidis
atgacaatgcacgagacaactgacagactttttgagatagccaaagagcagggagttttaaagccggctgacatagcagagcgtctgaatatcagccaacaggctttgaaaaactgggaaagtcgtggcatagcggcaaaggcgctgcctgaagtagcaaaagcattcggtgtatctgaaacatggctgagaacaggtgaaggcagccgaaccgcgcccgtccttattgaccccgacctaccccacgaagtcaaagacatccaccgcccgatgacgtggagcagcaacgacccgctgcccgacgatgattatgttttcgtcccctacctcaaagagagctgcttcaaaggcggagtaggcacgtatgaaatccccgattacaacggctaccgcctgccgttcggcaaatccacgcttaaacgcaaaggcatcaatcccgacaacgtgttttgctgcaccctgaccggcgacagtatggaggaaaaaatcgcagaagacgcggcaattgccgtagatacgggcgaaaccgccatacgcgacggcaaaatctacgccttcgcccaggacggtatgttccgcgtgaagtacctgatacggcagcccggcaacagcgttctgatacgcagccacaacagcggtttctatggcgacgaaaacgcccccttggacagcctgaccgttatcggcagggtattttggtggagcgtgctggattga

SEQ ID NO: 40290 - DNA, 153 bp, Neisseria meningitidis
atgccgtctgaaacaatgatttcagacggcattctcacatcaaaacgcactagcttgataaaacccgccttccccgcatccctgacccgaacaggattaaacgaagtaacggctttaaccattatggcaagttcccattctcaaaaattatag

SEQ ID NO: 40291 - DNA, 4269 bp, Neisseria meningitidis
atgagttggaatagttttggtaattttatgagcgcacgctcatccgcgttagcagaatttggaaatatggttgctaatttagtttctgcaaaaaatgagaaagatatctcgaaacgtaatgaatattacaaacaagctggttatagtgcattattagcatttggtaatttggctagtaatattgcaccaggtagtacgtcatcgcatattgtaaacggaacaaatgcctctgtgattgcaagccgtctctctggaaatatatcttcagctattcaggagcataaagatggtaaagttaatatcaaccgttttcaaaatattttagcggatttatattcattgggagggttaggaagtacattaatagagaagaatggaaatatgcagagttgggggattccattagcaattgctggagatataattgcagcaacggctattgccacaggagatactggtacgatatctacagaggaattttataattttgacaactggaaaggttttgggtatgagctatttgaagactggtctcgttgggtatacgactggctgcccgacggctggaatctgtggaaagaattggacagaaaccgttcaggccaataccacatctacgaccccctcgccctagacctagacggcgacggcatagaaacagtcgccgccaaaggcttttcaggcagcctcttcgaccataacggcaacggcatccgcaccgccactggctgggtttctgccgatgacggtttactcgtccgcgatttgaacggcaacggcatcatcgacaacggtgcggaactcttcggcgacaacaccaaactggcagacggttcttttgccaaacacggctacgcggctttggccgaattggattcaaacggcgacaacatcatcaacgcggcagacgccgcattccaatccctgcgtgtatggcaggatctcaaccaggacggcatttcccaagctaatgaattgcgtacccttgaagaattgggtatccaatctttggatctcgcctataaagatgtaaataaaaatctcggtaacggtaacactttggctcagcaaggcagctataccaaaacagacggtacaaccgcaaaaatgggggatttacttttagcagccgacaatctgcacagccgcttcaaagacaaagtggaactcactgccgaacaggcaaaagccgccaatcttgcgggcattggtcgtctgcgcgatttgcgcgaagctgccgcattgtccggcgatttggccaatatgctgaaagcttattctgccgccgaaactaaagaagcacagttggcattgttagataatttgattcacaaatgggcggaaaccgattcgaactggggcaaaaaatcgccaatgcgactttcaaccgattggacgcaaacggctaatgaaggtattgcactgacaccatcccaagtagcacaactaaaaaagaacgctttagtttccctttctgataaagctaaagcagctattgacgccgcccgcgaccgcattgccgtgcttgatgcctacacggggcaggattccagcacactctattacatgagcgaagaagacgcgcttaatatcgtcaaagtaaccaacgatacatacgaccatctcgccaaaaacatctaccaaaacctgttattccaaacccgtttgcagccatatttgaatcaaatcagtttcaaaatggaaaatgatacgttcactttggattttagtggtcttgttcaagcatttaaccatgtcaaagaaactaatccgcaaaaagcttttgtggatttggccgagatgcttgcatatggcgaacttcgttcttggtatgaaggccgaagactaatggccgattatgtggaggaggcaaaaaaagcaggtaaatttgaagattaccagaaagtgttgggtcaggagaccgttgcattattagctaaaacatcgggtacgcaagcagatgatatcctgcaaaatgtaggctttggtcataataaaaatgtttctttatatggtaatgacggcaacgacactctaatcggcggtgcaggcaatgattacttggagggcggcagcggttcggatacttatgtcttcggcaaaggcttcggtcaggatacggtctataattacgactacgctaccggacgcaaagacatcatccgctttaccgacggtattacagccgatatgctgacttttacccgagagggcaaccatcttcttatcaaggcaaaagacggcagtggacaagtgactgttcagtcctatttccagaacgatggctcaggtgcttaccgtatcgatgagattcatttcgataacggcaaagtactggatgttgccactgtcaaaaaactggtacagcaatccaccgacggttcggacagattgtatgcctaccaatccggaaataccttaaatggcggattgggcgatgactatctgtacggtgccgacggggatgacctgctgaatggtgatgcaggcaacgacagtatctacagtggcaatggcaatgatacgctcgatggaggagaaggcaacgacgccctgtacggctataatggtaacgatgtactgaatggtggcgaaggcaatgatcatttgaacggcgaagacggcaacgacactctaatcggcggtgcaggcaatgattacttggagggcggcagcggttcggatacttatgtcttcggcaaaggcttcggtcaggatacggtctataattacgactacgctaccggacgcaaagacatcatccgctttaccgacggtattacagccgatatgctgacttttacccgagagggcaaccatcttcttatcaaggcaaaagacggcagtggacaagtgactgttcagtcctatttccagaacgatggctcaggtgcttaccgtatcgatgagattcatttcgataacggcaaagtactggatgttgccactgtcaaagaactggtacagcaatccaccgacggttcggacagattgtatgcctaccaatccggaaataccttaaatggcggattgggcgatgactatctgtacggtgccgacggggatgacctgctgaatggtgatgcaggcaacgacagtatctacagtggcaatggcaatgatacgctcgatggaggagaaggcaacgacgccctgtacggctataatggtaacgatgtactgaatggtggcgaaggcaatgatcatttgaacggcgaagacggtaacgacactctgatcggcggtgccggtaatgattacttggagggcggcagcggttcggatacttatgtcttcggcaaaggcttcggtcaggatacggtctataattacgactacgctaccggacgcaaagacatcatccgctttaccgacggtattacagccgatatgctgacttttacccgagagggcaaccatcttcttatcaaggcaaaagacggcagtggacaagtgactgttcagtcctatttccagaacgatggctcaggtgcttaccgtatcgatgagattcatttcgataacggcaaagtactggatgttgccactgtcaaagaactggtacagcaatccaccgacggttcggacagattgtatgcctaccaatccggaagtaccttaaatggcggattgggcgatgactatctgtacggtgccgacggggatgacctgctgaatggtgatgcaggcaacgacagtatctacagtggcaatggcaatgatacgctcgatggaggagaaggcaacgacgccctgtacggctataatggtaacgatgtactgaatggtggcgaaggcaatgatcatttgaacggcgaagacggtaacgacactctgatcggcggtgccggtaatgattacttggagggcggcagcggttcggatacttatgtcttcggcgaaggcttcggtcaggatacggtctataactaccatgtggataaaaactctgacactatgcactttaaaggatttaaagcagcagatgttcattttatccgttccggaagtgatttggtgcttagcgcttctgaacaagacaacgtacgtatttccggattcttctatggtgaaaaccatcgtgtagatacatttgtctttgatgatgcagctatcagtaatccagattttgccaagtatattaatgctggcaataatttggtacagtctatgtctgtgttcggttctaatactgctgcgacaggaggaaatgtggatgccaatacacaatccgtacagcagccgttattggtaacgccatctgcataa

SEQ ID NO: 40292 - DNA, 1575 bp, Neisseria meningitidis
atggctcaaatccaaatgagcgcaaatgttaaaaccatcaacgccgtctttgccgccatgctggtaggtacagtcggctattttatttattggggcttgggttatacccattacaattacgccgccttattcattattgccacgatgttcggcgtgtttatggcgttcaacatcggcggcaacgatgttgccaattctttcggcaccagcgtcggtgcgggtacgctgaccatcccgcaggctttgctgattgcggcggtatttgaggtcagcggcgcggtcatcgcgggcggcgaggtaaccaataccatacgcaaaggcatcgtcgatttgaagggtgttgatttcgaacccatacagtttgtgtttattatgatgtccgcgcttttggcggcggcgttgtggctgttgtttgcctcgaaaaaagggcttccggtatctaccacccattccattatcggcggcattgtcggcagcgcggtatgtatggcggtaatgaacgatgccgcatcgggcgatttgatacgttggggcaagctgggcggtattggtgtttcttgggtattgtcgcccgtgttgggcggcgcggtgtcctatttcctgttttcgcgcgtcaagaaaaacgtcttagattacaacgcttgggcggaaggcacgctcaagggcatcaagcaggaaaaaaaggcctataaagaacggcaccgcctgtttttcgagggtttgtccgaagccgaaaaagtcgagtacgccaccaaaatggcgcacgacgcgcaaatttacgacgaacccgaattcgatccgcaagagctgcaatcggagtattaccgcggtctttatgcgttcgacaaccgtaaaaacaatgtcgattcctacaaagcgctgcattcttggattccctttatcgcttcgttcggcgcgatgatgatttccgctatgctgattttcaagggcttgaaaaacctgcatttggggatgagcaacgtcaacagcttcctgaccatctttatgataggcgcggcggtgtggatggggacgtttgtgtttgccaaaagcctcaagcgtaaagacttgggcaaatcgacctttcagatgttttcatggatgcaggtctttaccgcctgcggcttcgcattcagccacggtgcgaacgatatcgccaacgccatcggtccgtttgccgcgattatggatgttttgcgtaccaacagcgttgccgcgcaaaatgtcgtccccccgattgcgatgctgactttcggcatcgcgctgattgtcggtttgtggtttgtcggtaaagaggtgattaaaaccgtcggtacgagtttggcggaaatgcaccccgcctcgggttttaccgccgaactgtccgccgcctccgtcgtgatgggcgcgtcgctgatggggctgcctgtttccagtacgcatatcttggtcggcgcggtactcggcatcggtctggtcaaccgcaatgccaactggaaactgatgaagcccatcggtttggcgtgggtcattaccctgcctgccgccgccgtattgtcggttgtctgctacttggttttacaggcagtattctga

SEQ ID NO: 40293 - DNA, 1128 bp, Neisseria meningitidis
atgtacactttccgcccgtttcccaaactgcacacagaaacacacattatgaacatacaaaacatccgcaccctcctcgacaccgtcgccgttccgaatacggcacgcacgctcggcggcgaaaaggccgtccgttcggtcgaacagcattcagacggcatccatatcgccctgcatttcggcttccctgtcgcgcacatcgccgccgccatcgccgattccgtacaagaaaccctgatgcccgaaacaggcgacacacacatccatctgtccatggacactgaaatcggcacacacaaagtccagcccggcgttaccaccatcaaaggcgtgaaaaacatcattgccgtcgcatcgggaaaaggcggcgtgggcaaatcaaccaccactgccaaccttgccgccgcaatggcgcgcatgggcgcacgcgtcggcgtgctcgatgccgacctttacggtccgagccagcccacgatgctgggcgtacacgaccgcaaacccgatcagaaaaaccaaaaactcattcccgtcgaatcttcagacggcatacaggttatgtccatcggctttctcgtcgataccggccaagccgtcgtctggcgcggcccgatggtcagccaagccttgcagcagctgatgttccaaagcgagtgggacgaagtggactatcttttcatcgacctgccccccggtaccggcgacatccagctcacgctgtcccagcgcatccccgtaaccggttccgtcatcgtaaccacgccgcaggacatcgccctgatagacgcgcgcaaggctgtggatatgttccgcaaggtcaacattcccattttaggcgtattggaaaacatgtccgtccacatctgctccaactgcggacacagcgaagccctgttcggcacggacggcggcaaagatttagccgcacgcctcaacgtccccctgctcggacagcttcccctaagcctgcccgtgcgcgaagccatggacggcggcacaccggcgcaactgttcgacgaacaccccgccatcgccaaaatctacaccgatgccgcattccaaatcgccctgagcattgccgacaaaggcaaagacttcagcagccgcttccccaaaatcgtcgtcgaataa

SEQ ID NO: 40294 - DNA, 792 bp, Neisseria meningitidis
atgattactgtgaacacactgcaaaaaatgaaggcggcaggtgagaaaatcgccatgctgaccgcttacgaatccagttttgccgcgctgatggacgatgccggtgtggaaatgctgttggttggcgattctttgggtatggcggttcaggggcggaaatcgacgctgcccgtcagcctgcgcgatatgtgttatcacaccgaatgtgtagcacgcggtgcaaaaaatgcgatgattgtcagcgatttgccgtttggtgcatatcagcagagtaaggagcaggcgtttgccgccgctgccgaactgatggcggcaggagcgcatatggtcaaactcgaaggcggcgtgtggatggcggaaacgactgaatttctgcaaatgcgcggtattccggtctgtgcccacatcggtctgaccccgcaatccgtgtttgccttcggcggatacaaggttcaggggcgcggcggcaaggcgcaggcgttgcttaacgatgccaaggcgcatgatgatgcgggggcggcggtcgtgctgatggagtgtgttcctgcggaactggcaaaaaaggtaactgaatccgtttcctgtccgaccatcggcatcggcgcgggtgtcgattgcgacgggcaggttttggtgatgcacgatatgctcggcattttcccgggtaagacggcgaaattcgtcaaaaactttatgcacgggcaaagcagcattcaggcggcggttcgcgcgtatgttgccgaagttaaagccaaaaccttccctgctgcggaacatatttttgcagattga

SEQ ID NO: 40295 - DNA, 366 bp, Neisseria meningitidis
atgaacctgattcaacagctcgagcaagaagaaattgcccgcctgaataaagaaatccccgaattcgcaccgggcgacaccgtagtcgtatccgtacgcgtcgtggaaggtacccgcagccgtctgcaagcctacgaaggcgtggttattgcccgtcgcaaccgtggtctgaacagcaacttcatcgtccgtaaaatttccagcggcgaaggtgtggaacgtactttccaactgtactcccctaccgttgagaaaatcgaagtcaaacgccgtggcgatgtccgccgtgccaaactttactatctgcgcggcctgaccggcaaagctgcacgcatcaaagaaaaactgcctgcacgcaaaggttga

SEQ ID NO: 40296 - DNA, 828 bp, Neisseria meningitidis
atgcctgaattgccggaagtggaaacgacgttgcgcggcatcgcgccgcatattgaagggaaaacggtggaagccgtggtattgcgccaattgaagctgcgctggcagatcaatcccgatttgggggagattttgtccggtcggcaggttttgtcctgcggcaggcgtgccaaatatctgattgtccgtttccaaacggggattttgctgattcacttggggatgtcgggcagcttgcggatttttacgccgtcggacggacgtatcggcaggccggacagacacgatcacgtcgatattgtgttttcagacggcacggtcatgcgttaccgcgatccgagaaagttcggcgcgatactttggtatgagggaatcgaagaacatcatccgctgttggaaaaactggggccggagcctttgtcggaggcattttgtgcggattatctgtatgcaaggctgaaggcgcagaagcgcgcggtcaaacttgccctgatggacaatgcggtcgtggtcggtgtgggcaacatttatgccaacgagagcctgttcagagcgggcatttcgccccaccgtcctgccaaccgcctgaaaaagaaagagtgcgcgcttttggttgaaaccgtcaaagcggtgttgcagcgcgccattgaaacgggcggcagtaccttgagggattttgtggacagcgacggcaaaagcggctacttccaacaggaatatacagtgtacgggcggcacaatcagccgtgcccccagtgcggcggtttggttgtgaaagaaactttggggcagcgcggcacgttttactgctcgaattgtcagaaatag

SEQ ID NO: 40297 - DNA, 792 bp, Neisseria meningitidis
atgaatgtttattttctcggcggcggaaatatggcggctgccgttgcgggcggattggtcaaacaaggggaataccgcatccatatagtcaaccggggtgcggaaaagcgtgaacgtttggaaaaagagttgggtgtcgaaacttcggcaaccctgccggagcttcattccgacgatgttttaatccttgctgtcaaaccgcaggatatggaagccgcgtgcaaaaatatccgcaccaacggcgcattggtgctttctgtcgcagccggattgtcagtcggtacgctcagccgttacctcgggggaacacgccgcattgtccgggttatgccgaatacacccggaaaaatcgggctgggcgtatccggtatgtttgccgaagcggaagtatcggaaacagaccgcaggattgccgatcgaatcatgaaatcagtcggtttgaccgtttggttggaagatgaagcgcaaatgcacagcattaccggtatcagcggcagcggaccggcttatgtgttttatctgctggacgcattgcaaaatgccgccatccgacaagggtttgatatggcagaagcacgcgcgctcagtctggcaacgtttaaaggagcggttgcccttgccgagcagacgggtgaagatttcgagaagcttcaaaaaaatgtaacgtcaaaaggcgggacaacccacgaagccgtggaagctttcaggcggcatcgtgtcgccgaagccataagcgagggcgtttgtgcctgtgtgcgccgttcgcaggaaatggaacggcaatatcaataa

SEQ ID NO: 40298 - DNA, 1302 bp, Neisseria meningitidis
atggctatttaccaatcaggcgtgatttttgaccaagtggataccgccaatcccgactgctggacattggacgaatacgtcaaacgcggcggctataccgccctgcgtaaaatcctgtccggaaacatctctcaaaccgatgtgattgacgaagtcaaaacctccggcttgcgcggtcgtggcggtgcgggcttcccgaccggtttgaaatggagctttatgccccgttcctttccgggcgaaaaatacgtcgtttgcaataccgacgaaggcgagccgggtacatttaaagaccgcgacatcatcatgttcaatccccatgccctgatcgaaggcatgattatcgccggttacgcgatgggcgcgaaagccggttacaactatatccacggcgaaatttttgaaggctaccaacgctttgaggccgctttggagcaggcgcgtgccgcaggctttttgggtaaaaatattttgggttcggattttgaatttgaactcttcgcccaccacggctacggcgcatatatttgcggcgaggaaaccgcattgctcgaatcgctggaaggcaaaaaaggccagccgcgctttaagccgccattccctgcttcgttcggcctgtacggcaaaccgactaccatcaacaatactgaaacgttctcctccgttccattcattatccgtgacggtggacaggcatttgccgataaaggtattccgaatgcaggcggtaccaaattattctgtatttccggccatgtcgagcgtccgggcaactatgaagtgccgttgggcacgccgtttgccgaagtcttgaaaatggtgggcggtatgcgcggcggcaaaaaacttaaagccgttattcccggcggttcgtccgcgcctgtattgcctgccgatatcatgatgcagaccaatatggactatgactcgatttctaaagcaggctcgatgttgggttccggcgcgattatcgtcatggacgaagacgtgtgcatggtgaaagcccttgaacgcctgagctacttctactatgacgagtcttgcggccaatgtacgccttgccgagaaggtacgggttggctctaccgtatcgtccaccgcatcgtagaaggcaaaggccgcatggaagacttggatttgctggattctgtcggcaaccaaatggcaggccgcaccatctgcgccctcgccgatgccgccgtcttccctgtccgcagctttaccaagcatttccgtgatgagtttgtgcattacatcgaacacggcggaccgatgaaagagcataagtggggagggtggtaa

SEQ ID NO: 40299 - DNA, 1014 bp, Neisseria meningitidis
atgcaagtctattacgataaagatgccgatctgtccctaatcaaaggcaaaaccgttgccatcatcggttacggttcgcaaggtcatgcccatgccgccaacctgaaagattcgggtgtaaacgtggtgattggtctgcgccaaggttcttcttggaaaaaagccgaagcagccggtcatgtcgtcaaaaccgttgctgaagcgaccaaagaagccgatgtcgttatgctgctgctgcctgacgaaaccatgcctgccgtctatcacgccgaagttacagccaatttgaaagaaggcgcaacgctggcatttgcacacggcttcaacgtgcactacaaccaaatcgttccgcgtgccgacttggacgtgattatggttgcccccaaaggtccgggccataccgtacgcagtgaatacaaacgcggcggcggcgtgccttctctgattgccgtttaccaagacaattccggcaaagccaaagacatcgccctgtcttatgcggctgccaacggcggcaccaaaggcggtgtgattgaaaccactttccgcgaagaaaccgaaaccgatctgttcggcgaacaagccgtattgtgcggcggcgtggtcgagttgatcaaggcgggttttgaaaccctgaccgaagccggttacgcgcctgaaatggcttacttcgaatgtctgcacgaaatgaaactgatcgttgacctgattttcgaaggcggtattgccaatatgaactactccatttccaacaatgcggagtacggcgaatacgttaccggccctgaagtggtcaatgcttccagcaaagaagccatgcgcaatgccctgaaacgcattcaaaccggcgaatacgcaaaaatgtttatccaagagggtaatgtcaactacgcgtctatgactgcccgccgccgtctgaatgccgaccaccaagttgaaaaagtcggcgcacaactgcgtgccatgatgccttggattactgccaacaaattggttgaccaagataaaaactga

SEQ ID NO: 40300 - DNA, 1125 bp, Neisseria meningitidis
gtgtgcggattatgccataaaacggtgcctgccccaatcgcgggcgcgtccggagattggaaatcctgcttaaaaaatgtacaatggcgtacttttttgaaacgcgggcccattatgcacatcggcggctattttatcgacaaccccatcgcacttgcgccgatggcgggcattaccgacaaaccgttccgccgactttgccgagattttggcgcaggttgggcggtgtgcgaaatgctgaccagcgacccgacgcttagaaataccaaaaagaccctgcaccgcagtgattttaccgatgaaggcggcatcgttgccgtgcagattgccggcagtgatccgcagcagatggcggatgccgcgcgttacaacgtcagccttggggcgcaggttatcgacatcaacatgggctgtcccgctaaaaaagtctgcaatgtccaagccggtagcgcgctgatgcagaacgagccgctggttgccgccattttggaagcggtagtcaaggcggcgggcgtacccgttaccctcaaaacccgtttgggctggcacgacgaccacaaaaacctgcctgccgtcgcccgcatcgccgaagattgcggcattgccgcccttgccgtccacggacgcactcgcacgcaaatgtacaaaggcgaagcggcttacgacctgattgccgaaaccaaatgccgtctgaacatcccagtttgggtcaacggcgacattacttcgccgcaaaaagcccaagctgtcctcaaacaaaccgccgcagacggcatcatgatagggcgaggcgcgcaagggagaccgtggttcttccgcgatttgaaacattatgccgaacacggtgttttaccgcctgctttgagtttggcagaatgcaccgctactattttgaaccacatccgcgccatgcacgcgttttacggcgacaccgccggtgtgcgcatcgcacgcaaacacataggctggtacatcgacgaaatgcctgacggtgaacaggcgcgccgcgacatcaactgcttggacagtgcggcggcgcaatacgacatgcttgcaggttatcttgaaagacttgctgaaaaaaccgacagttgggcgtgcgcctaccgcccgaataccttctga

SEQ ID NO: 40301 - DNA, 2628 bp, Neisseria meningitidis
atgcccgccggccgactgccccgccgatgcccgatgatgacgaaatttacagactgtacgcggtcaaaccgtattcagccgccaacccacaggggatacatcttgaaaaacaacagacaaatcaaactgattgccgcctccgtcgcagttgccgcatcctttcaggcacatgctggactgggcggactgaatatccagtccaaccttgacgaacccttttccggcagcattaccgtaaccggcgaagaagccaaagccctgctaggcggcggcagcgttaccgtttccgaaaaaggcctgaccgccaaagtccacaagttgggcgacaaagccgtcattgccgtttcttccgaacaggcagtccgcgatcccgtcctggtgttccgcatcggcgcaggcgcacaggtacgcgaatacaccgccatcctcgatcctgtcggctactcgcccaaaaccaaatctgcactttcagacggcaagacacaccgcaaaaccgctccgacagcagagtcccaagaaaatcaaaacgccaaagccctccgcaaaaccgataaaaaagacagcgcgaacgcagccgtcaaaccggcatacaacggcaaaacccataccgtccgcaaaggcgaaacggtcaaacagattgccgccgccatccgcccgaaacacctgacgctcgaacaggttgccgatgcgctgctgaaggcaaacccaaatgtttccgcacacggcagactgcgtgcgggcagcgtgcttcacattccgaatctgaacaggatcaaagcggaacaacccaaaccgcaaacggcgaaacccaaagccgaaaccgcatccatgccgtccgaaccgtccaaacaggcaacggtagagaaaccggttgaaaaacctgaagcaaaagttgccgcgcccgaagcaaaagcggaaaaaccggccgttcgacccgaacctgtacccgctgcaaatactgccgcatcggaaaccgctgccgaatccgccccccaagaagccgccgcttctgccatcgacacgccgaccgacgaaaccggtaacgccgtttccgaacctgtcgaacaggtttctgccgaagaagaaaccgaaagcggactgtttgacggtctgttcggcggttcgtacaccttgctgcttgccggcggaggcgcggcattgatcgccctgctgctgcttttgcgccttgcccaatccaaacgcgcgcgccgtaccgaagaatccgtccctgaggaagagcctgaccttgacgacgcggcagacgacggcatagaaatcacctttgccgaagtcgaaactccggcaacgcccgaacccgctccgaaaaacgatgtaaacgacacacttgccttagatggggaatctgaagaagagttatcggcaaaacaaacgttcgatgtcgaaaccgatacgccttccaaccgcatcgacttggatttcgacagcctggcagccgcgcaaaacggcattttatccggcgcacttacgcaggatgaagaaacccaaaaacgcgcggatgccgattggaacgccatcgaatccacagacagcgtgtacgagcccgagaccttcaacccgtacaaccctgtcgaaatcgtcatcgacacgcccgaaccggaatctgtcgcccaaactgccgaaaacaaaccggaaaccgtcgataccgatttctccgacaacctgccctcaaacaaccatatcggcacagaagaaacagcttccgcaaaacctgcctcaccctccggactggcaggcttcctgaaggcttcctcgcccgaaaccatcttggaaaaaacagttgccgaagtccaaacaccggaagagttgcacgatttcctgaaagtgtacgaaaccgatgccgtcgcggaaactgcgcctgaaacgcccgatttcaacgccgccgcagacgatttgtccgcattgcttcaacctgccgaagcaccgtccgttgaggaaaatataacggaaaccgttgccgaaacacccgacttcaacgccaccgcagacgatttgtccgcattacttcaaccttctgaagtacctgccgttgaggaaaatgcagcggaaaccgttgccgatgatttgtccgcactgttgcaacctgctgaagcaccggccgttgaggaaaatgtaacggaaaccgttgccgaaacacccgatttcaacgccaccgcagacgatttgtccgcattacttcaaccttctgaagtacctgccgttgaggaaaatgcagcggaaaccgttgccgatgatttgtccgcactgttgcaacctgctgaagcaccggccgttgaggaaaatgcaacggaaatcactttggaaacgcctgattccaacacctctgaggcagacactttgcccgacttcctgaaagacggcgaggaggaaacggtagattggagcatctacctctcggaagaaaatatcccaaataatgcagataccggtttcccttcggaatctgtaggttctgacgcgccttccgaagcgaaatacgaccttgccgaaatgtatctcgaaatcggcgaccgcgatgccgctgccgagacagtgcagaaattgctggaagaagcggaaggcgacgtactcaaacgtgcccaagcattggcgcaggaattgggtatttga

SEQ ID NO: 40302 - DNA, 486 bp, Neisseria meningitidis
atggacgcgctgcacaccatcgcccgaaacctgacgaaaaaacgtcaaaccgtaagctgtgccgaatcctgcacgggtgggctgcttgccgccgtattcacaagcgttgcaggcagttcgcaatggttcgatcaaagttttgtaacatacagcaacaaagccaaagaagaccgcttgggcgtgttgcccgaaaccctgctcgaacacggcgcggtcagccgccaaaccgtctatgagatggcgcgcggcgcgaaagccgtggcgcaggcggattacgccgtcggtatttccggcatcgccggtccgggcggcggcagcgaaagcaaacccgtcggcacggtttggttcgggtttgcctttccgggcggaagttgcgaagcaatgcgccgttttgacggcaaccgcgaatccgtccgcgcgcaggcggtcgccttcgcgttggaacggttggcggggctgattgaaaacggcggcgatgctgtctaa

SEQ ID NO: 40303 - DNA, 606 bp, Neisseria meningitidis
atgccaacatatctctctcgcctatcattcagtttctcgcgccgtttgcccgttattttgcaaacggaagcagccgaatgtggattagcgtgtttggtatcggtgttggggtttcatggtttttatacggatttgcgccatttaagggcgcgtttttctttgtcgcttaaaggcgcaacattggcggatttggtacggtttgctaatagcatgaatttaaccgctcgggctgttcggttggatttagatgagttagcaaatttgcgcgtaccctgtattttgcattgggatttaaatcattttgtggtgttgcatgaagttcatcgcaatcacattatgattatgaaccctgcttcgggttggcaaaaagtgcgtatggaagaagtctcgcgctgttttacaggtgtagcattggaactatttcctaacacgcaatttgaagagaaacacgaaacgcgtaaaattcgcgtactaccgatgttgcgcggagtggtgggattaaaaaggtccgagacctttgcaaaattcctttccctcccgacagccgaaacccaaacacaggttttcggctgttttcagctgttttcgccccaaatacccccttaa

SEQ ID NO: 40304 - DNA, 1218 bp, Neisseria meningitidis
atgaaaacggtagtctggatcgtcgtcctgtttgccgccgccgtcggactggcactggcttcgggcatttacaccggcgacgtgtatatcgtactcggacagaccatgctcagaatcaacctgcacgcctttgtgttaggttcgctgattgccgtcgtggtgtggtatttcctgttcaaattcattatcggcgtattcaatatccccgaaaagatgcagcgtttcggttcggcgcgtaaaggccgcaaggccgcgcttgctttgaacaaggcgggtttggcgtattttgaagggcgttttgaaaaggcggaacttgaagcctcgcgcgtgttgggcaacaaagaggcgggcgacaaccggactttggcattgatgctgggtgcgcacgccgccggacagatggaaaacatcgagctgcgcgaccgttatcttgcggaaatcgccaaactgccggaaaaacagcagctttcccgttatcttttgttggcggaatcggcgttgaaccggcgcgattacgaagcggcggaagccaatcttcatgcggcggcgaagatgaatgccaaccttacgcgcctcgtgcgtctgcaacttcgttacgctttcgacaggggcgacgcgttgcaggttctggcaaaaaccgaaaaactttccaaggcgggcgcgttgggcaaatcggaaatggaacggtatcaaaattgggcataccgccgccagctggcggatgctgccgatgccgccgctttgaaaacctgcctgaagcggattcccgacagcctcaaaaacggggaattgagcgtatcggttgcggaaaagtacgaacgtttggggctgtatgccgatgcggtcaaatgggtcaaacagcattatccgcaaagccgccgacccgaacttttggaagcctttgtcgaaagcgtgcgctttttgggcgaacgcgatcagcagaaagccatcgattttgccgatgcttggctgaaagaacagcccgataacgcgcttctgctgatgtatctcggtcggctcgcctacggccgcaaactttggggcaaggcaaaaggctaccttgaagcgagcattgcattaaagccgagtatttccgcgcgtttggttctggcaaaggtttttgacgaaaccggagaaccgcagaaggcggaggcgcagcgcaacttggttttggcaagcgttgccgaggaaaaccgcccttcctccgaaacctgttga

SEQ ID NO: 40305 - DNA, 1110 bp, Neisseria meningitidis
atgtccttgacccgcctaatcttgaaattctatgcactgttgcgcctttttttgggcaaaaacgcccgcaccgcatggatttcgcatcccgcctgtgccgggcacgaacccggcgcaaaccatcccgattcgcccgaccgcatcctctgcatcgagcaggcattgcgccgcgccggtatttggcagcacctccaaaccatagaggcggaagaaatcagcgatacgcgcctcgcacttgtccactcgagcaaatatctgaaccgtttggaatcttgccagccccaaaaaggcaagattttccgcctggatgacgacactgcaatcagcacaggctcgctgtctgccgcacgctttgccgccggttcggcagttcaggcagtcgacatggtcatgaaccgcaaagcatggcatgccttttgcgccgcccgcccgcccggacaccatgcgggcagcggcaaagccggcggattctgcctgctgaacaacgttgccgccggcgtcatgcatgccattgccgaataccgcctgaaacgcattgccgtcatcgatttcgatgtccactacggcgacggtacggcagaaatattcaaagacgatccgcgcatcctgtttttcaacctgtttgaaaccgaccttttccccttccccgaaaacaacgatatgcccgacggcggcaatatggtgcacctgcccttgccgccgggaacgggcagccgcacattccgcgaagccgtccgcaggcagtggctgccccgacttgccacattcaaacccgaactggtgctgctgtcggcaggattcgacgcacaccgtctagacgaatcgggcaggctcaacctgcacgaggcggattttgcctggctgacacacaaaatcattcagacggcatcgggctgccccggcaaaatcgtatccgtactcgaaggcggctacacccttgaacctctggcacaatctgctgccgagcatatccgcgtgctggcagggctgggcaaatccgatgccgcaaccgcctatcagaaaacactggacccaacaaaaaaacggtttgccaaaccgaaaaccggacaggtgcgccaacctacccaatccgaccgttacgacatatag

SEQ ID NO: 40306 - DNA, 2157 bp, Neisseria meningitidis
atgcccgccccccaaccttccgccccttacgaccccctgaccgccgaagcgcgtgccctgcttttccataccgcctcctacctcaagcccgaggaacaggcggagcttgaaaaagctgtcgcctatgcgtttcgcgcccacgacgggcaaacccgcaaaagcggggagccctacatcacgcatccgattgccgttgcgacgcagctcgccctttggcatatggacatacagggtctttgtgcaggcgtgatgcacgacgtattggaagatacgggcgtgacaaaaggggaaatggcggcggtgttcggcaatacggttgccgagatggtggacgggctgtccaaactcgaaaaactcaaatttgaagatcatgcagagcatcaggcggagagtttccgcaaactgattttggcaatgaccaaagatgtacgcgtcatcgtcgtcaaacttgccgaccgtctgcataatatgcggacactcggttcgatgcgcccggacaaacgccgccggattgcaagggaaacccttgaaatctatgcacagattgccaaccgcataggtttgaataacgcatatcaagagcttcaggatttatcgttccaaaacctgcatcccaaccgctacgagactttaaaaaaagcgatggacaagagccggaagaaccggcaggacgttgtcggcaaagtcttgcgcgcattcggccagcggctggtaggcgcgaatatagaggccaaaatcaaaggcagggaaaaaaacctgtacggcatccatcagaaaatgatggcgaaaaagctgcgctttgccgaggttatggatatttacggtttccgcgtcattgtcaacagcattccagcctgttatgccgcactcggcgcattgcacaccctctatcagcccaagcccgggcggttcaaagactatatcgccattccgaaaagcaacgggtatcaaagtctgcatacgactttggtcggtccttacggcttgccgattgaagttcagatacgtaccaaggaaatggatgctgttgccgaaggtggaatcgccggacattggagctataaatcatattctaagacggtcgatcaggcggtgcttcacacaaaccggtggctgaaaaatatcttagatttgcaggcaagcagtgccaatgccattgagtttctcgaacacgtcaaagtcgatttgtttccgaacgaaatctacatccttacgccaaaaggaaaaatcctaactttgcccaaaggggcaacgcctgtcgattttgcttatgcggtgcataccgatatcgggcacaaaaccgttgccgcacgtatcaacaatatcatgatgccgttgcgtacgaagctcaaaaccggtgattctgttgaaattatcacatccgaatacgccaaacccaatcccgcgtggttgaatttcgccgtgtccggcagggcgcgcagtgccatacgccaatatattaaaaaccttaaccggcacgatgcggtcgttttgggagagagcctcttacaaaaagccctgtccagtttgctgcccaaagatgtcctgctttcagacggcatcaaagaaaaataccttgccgatctcaacgacaaacagacttcatttgaggaagtgctgtacaacgtcggtatggggcataccctgcctgtttatgtcgccatgcacattgccgagttggcaggggagcatttcggtagcgaggtcaggctcagttccattaaagtcgatggtcaggaaagcgggcatattcattttgcagagtgctgccaccctgttcccggtgattccatccgtttgctgttggttaagggaaaaggcatgattatccatagggatacctgcccgacgttgttgaagtccgatcccgaacagcagctggatgcagactgggaaaatatgaacgggcagaactaccgtgtcgggcttcaagtccaatcggaagacagccacggcttgctggcattaatggcgcaagcgatttccgattccggtgcggacattgagtcggtcgaaacaccgtctaaatcccagtcgggaacggaaggttttgtcgaattcaaattcttattgaaagtcaagaatctgaatcaattgaatcagattattcaaaatctgcatagtattccatatatccgcaaagtcatcagaagttga

SEQ ID NO: 40307 - DNA, 927 bp, Neisseria meningitidis
atgtcagaaatgaaaaaaaccaaagtccacctgatttcaggttttctgggaacaggcaaaaccaccgcgctcaaaagcctgatggcgcagaaagacccgaacgaaaaatgggtcatcatcgtcaacgagttcggcgaaatcggcattgacggcgcggtattgagcgacaacggcatccctgtggcagaaatcgccggcggctgtttgtgttgcaccgccggcccgcaaatgggcgtaaccgtgcagaaaatgctgcgcgatgccaagcccgaccgcctgatgattgaggcaagcggactggcgcacgcagccagcgtcatcgacgaattgaaagccaaaccgctggacagccttttggaaatcggcgccgtctttaccgtcgtctatccgcgccagttcatcaaccccgattacgcgcaacaggcgttgtataaagaccaaatcggcatctgcgacatattggtcgccagcaaaaccgatttatgcacccccgaacagcttgccgaatttcacgacaaagcggcaaaactgttcccgcccaaggctaaagtggtcgaagttcaaaacgcacaactcgatatccaatggctcgatattcccgtcatcgaaaaatcacgctaccgcctcaaagccctgccggacaacacgatgggcttccagtcgcaaggtttcacattccccgccggacgcgatttcgacggcgaaaaattgaccaacttcttcaatgatttgcccaagatgaccgaaggactcgtccgcgccaaaggcgtgttccaagtattgggaacgtgggtgtggctcaactgggtagacgggcaatggggcgccaaccaagtgtcttggcggcgtgattcgcgttttgaattgattgccaaatcgtttgacgcggatttaatcgaacaaaaacttaaagatgcattggaatag

SEQ ID NO: 40308 - DNA, 483 bp, Neisseria meningitidis
atgggaatagaaggcgttttgaaaaaaggtttcatcaccaccagcgcggatacggtgttgaactatatgcgtaccggttcattgtggccggttactttcggcttggcctgctgcgccgtggaaatgatgcacgcgggtatggcgcgttatgaccttgaccgtttcggcatcattttccgtccgtccccacgtcaggccgacctgatgattgtggcgggtacgctgaccaacaaaatggcacccgccctgcgccgcgtgtacgaccaacttgccgagccgcgttgggtattgtctatgggttcgtgtgcaaacggcggcggctattatcactattcttattccgttgtgcgcggtgccgaccgcgtcgtgccggtagatgtttatgtgccgggttgcccgccgactgcggaagccctgatttacggcctgattcagctccaacaaaaaatcaagcgcacttccaccatcgcgcgtgacgagtaa

SEQ ID NO: 40309 - DNA, 960 bp, Neisseria meningitidis
atgtctcaccatcacgaacaccatcatcacgcacacgcccacacgcataccgccaacaaaaaagtattgcgcgtgtcgttcatcatcatcgccgcctttatgctgttggaggcgttcggcggctggctgacccactcgctcgcgctgctttccgacgcagggcatatgttcagcgacgcattttccttgggtgtggcgttgtgggcgttcaaactcggcgaaaaagaaaccacgctgcaaaagaccttcggctataaacgttttgaaatcctcaccgccatgttcaacggcttgtcgttggtggttatcgccgtgctgattttctacgaagccgtcaaacgcctgctttatccgcccgaaatcgccacgctgggaatgctcgtcatcagtgtcgtcggactgctggtcaacatcggcgtggcggtttacatgctgaaaaacagcgacaccgaagccaacgtcaacatgcgcggcgcgtatctgcacgttttaagcgaccttctcggctcaatcggcgcgattgccgccgccgtactcatgatggcgttcggctggaaatgggcggatccgctcgccagcgtgttcgtagccgcactggtcggacgcagcggctggagcctgctcaaacagacgctgcacatcctgatggaaggcgcgcccgaaaacatccacaccgacgacctgctcgccgttatccgcaacaccgaaggcgtcaaatccgtccacgacttacacgtctggacgattaccagcaatatcaacgtcctatcctgccacatcgtcgtggacggcagcatgaccgttgccgaatccgaacaaatcgcctaccgcatcgaacacgagttgtcccacaaaaacatcggacactgcaccatccaaatcgaaagcgaacgccacccgcacaaaaacgagattttgtgttcgccctacgcagaagcacatcacagccacagccattaa

SEQ ID NO: 40310 - DNA, 1542 bp, Neisseria meningitidis
atgaaaatcggtatcccacgcgagtcattatccggcgaaacccgcgtcgcctgtacgcccgccaccgtcgccctgctgggcaaactgggctttgaaaccgttgtcgaaagcggtgcaggttgggcggcaagtttggatgatgccgcttaccaaacagcaggcgcgaccgttgccgacaaagcggcggtttgggcctgccctttgatttataaggtcaacgcgccgtccgaacaggaactgccgcttttgaacgaaggtcaaaccatcgtcagcttcctgtggccgcgccaaaacgaggctttggtcgaagccttgcgcgccaagaaagtcaacgcgctggcgatggacatggtgccccgtatttcccgtgcgcaggctttggacgctttgtcttcgatggcaaacatcagcggctaccgcgccgtaattgaagccgccaacgccttcgggcgtttcttcaccggtcaaattactgccgcaggcaaagtgccgcccgcgcaggttttggtgattggcgccggtgtggcaggtttagcggcgatcggtacggcaaactcgctcggcgcagtggtgcgcgcgttcgatacccgcttggaagtggcggaacaaatcgaatcgatgggcggcaagtttttgaaactcgacttcccgcaagaatcgggcggcagcggagacggctacgccaaagtgatgagcgacgaatttatcgccgccgagatgaagctctttgccgagcaggcgaaagaagtggacatcatcatcactaccgcctccattccgggcaaacccgcgcccaagctgattaccaaagaaatggtggaaagcatgaaatccggctccgtcatcgtcgatttggcggcggcgacgggcggcaactgcgaactcacccgcccgggcgaattgtccgtaaccggcaacggcgtgaaaatcatcggctacaccgacatggcaaaccgccttgccggacagtcttcccagctttacgccaccaacttggtcaacctgaccaagctgttaagcccgaacaaagacggcgaaatcacgctggattttgaagacgtgattatccgcaacatgaccgttacccgcgacggcgaaatcaccttcccgcctccgccgattcaggtttccgcccagccgcagcaaacgccgtctgaaaaagccgcgcctgccgccaagcccgagccgaaacccgttcccctgtggaaaaaactcgcgcccgccgtcatcgccgccgtgttggtactgtgggtcggcgcggtcgcacccgccgcattcctgaaccactttatcgtgttcgtcctcgcctgcgtcatcggctactacgtcgtctggaacgtcagccactcgctgcacacaccgctgatgtcggtaaccaacgccatctccggcatcatcgtcgtcggcgcgctgctgcaaatcggtcagggcaacggcttcgtttcgctgctgtcgtttgttgccatcctgattgccagcatcaacatcttcggcggcttcttcgtaacgcgccgcatgttgaatatgtttaggaaaggataa

SEQ ID NO: 40311 - DNA, 861 bp, Neisseria meningitidis
atgaatccgctttttacccaagaacgcaggattttccataagaaattattggatggcaatgttcttgcaaccaacaataaaggcgtagtcagcaatgcggatgggagcaatacccgaagttgcaatatagccaaggggattgccgacttactgcattcggaaacggtttcggaaagattacccggtcagacatcgggaaatgcttttgaagcaatatgcagtgagtttgtccaatctgcttttgagaaattgcagcatatcagacccggcgactggaatgttaagcaggtcggttctcgcaaccgtctggaaatcgcacgttatcagcaatacgcacatctgacagccttagccaaggctgccgaagaaaaccccgaattggctgccgccttgggcagtgattacaccattactcccgatattatcgttaccagaaatttgattgcagatgcagaaatcaaccgtaatgaatttttagttgatgaaaatattgccacatatgccagtttgcgtgcgggtaatggcaatatgccgctgctccacgccagtatctcttgtaaatggacgattcgcagcgacagggctcagaatgcccgttctgaaggattgaatttggttagaaatagaaaaggcagactgccgcacattgttgtcgtaacggcagaaccgacgccaagccgcatttcatctattgccttgggtacaggggaaatagattgcgtttaccattttgccttatatgagctggaacaaactttacaatcattgaattatgaagacgctttggatttgttttacatcatggtcaatggtaaacgattaaaagatatttccgaccttcccttagatttggcagtttaa

SEQ ID NO: 40312 - DNA, 846 bp, Neisseria meningitidis
atgaatattgcggacggacggcaggcgtttcccgcacctgcaaaactgaatctcgatttgaggattactggaaagcgggaagacggttatcacaatatcgaaagcatattctgcctgatagatttgcaggataccgtatatttgaaaccgagggacgacggcaaaatcatcctgcacaatcctgtcggcggaataccgcaggaagccgatttgagctaccgtgccgcatcgttgctgcaaaaatatgcgcgcaaccccgccggcgtggaaatatggctggacaaaaaaatcccgacaggggcgggtttgggcggcggaagctcggatgcggcaaccgttttgctggtgttgaaccgttggtggcagtgcggtctgacgcagcggcagctcattgattcgggcgcggctctgggggcggacgtaccgttttttattttcggcaaaaatgcgtttgcgcggggtataggcgacaggctggacgaaatggatattccgaaacagtggtatgtcatcgtcaaaccgcccgtccacgtttccactgcaaaaattttcacacacgaaggcttgacacgaaattccgcctcaagcataatgccgactttccaaaatctgcaaccgtttagaaatgatatgcaggcagttgtatttaaagaataccctgaagtttggaaagcctattccgagttgtcccgatatggatttgccttaatgacaggttccggtgcgtgtgtattcacggcgtgtcaagatagggatagcgcatacaatatataccgacaagtttcaggtttgtacgaggcatatttggcagagggtctttcaaagcatcctttgttgtccgtataa

SEQ ID NO: 40313 - DNA, 492 bp, Neisseria meningitidis
atgcgacatatcttatctgttctgattgaaaacgaatcaggtgcgatgagccgcgtggtcggtttgttctctgcacgcgattacaatatcgattctttggcggttgcgccgaccgaagacaaaaccctgtcccgtatgaccatcgttacccacggcgacgagcaggttatcgaacaaatcaccaagcaactcaataaattgattgaagtgattaaagtggtcgatttgaacgaaagccgttttgtcgaacgagaactgatgttggtaaaagtccgtgccgccggcaaagaccgcgacgaatttttgcgtttgaccgaaatctaccggggcagcatcatcgacgtaaccgaccgcagctatacgattgaaattaccggctcgaccgacaagctggattcctttttggaaacggtcggacgcgcccaaattttggaaaccgtacgtacaggcgcggccggcatcggtcgcggtgagcgtattttgaaaatttaa

SEQ ID NO: 40314 - DNA, 417 bp, Neisseria meningitidis
atgaaaacatcaacaattgtttttggtggattttttattacagataatggagaacgaatccaaatccctattttagaaaatcctaacattaaagaaataaataactttttttctgtatcaaattttgaaaaaaaagccggagtccttgttttcagaattattcctgagcctgaatttggcaatactgaattaactatctattttgaaaaaggatattatttaccaataattcaaacaattttagaagatggagatattgaagtaaaaaatcttaaaacagaaaattatagtggaaatacaatggaaattttgggagacgtctaccctattgagcatatctctaaaaatatttctataattcaagatataatttctaaatttattataaaaaacaaaccaatcacaataatgatttaa

SEQ ID NO: 40315 - DNA, 2526 bp, Neisseria meningitidis
atgaatccaaactcaaaacataacactaactttaccaatcttcttaaaccgtctgatagtgatataaaacaatttgccgcacaacacatccgccacctcaccgacctgctcaaccgctatgcctacgaatactacaccctcgacgcgcccagcgtacccgatgccgaatacgacaaattattccgcgagctcgaagcgttggaacgaaaccatcccgagctcaaactgcccgacagtccgacccagcgcgtcggcggcgagcctttagcgggatttgccgaagtgcgccacgaagtgccgatgctgtcgctgaccaacgctttttccccgcaagatgaaaacggcgtgttcgaccatgccgaaatgtacgctttcgaccaacgcgtgcgcgacggtttggacggcggcaaacccgaatacgttatcgaacccaaattcgacggcctcgccatcagcctgctctaccgcgacggcgtattggtacaggcggcaacgcgcggcgacggcacaacgggcgaagacgttacccaaaacatcaaaaccgtcgccaacatccccctgcggctgcacggcgaaaatacgcccgaactcatcgaagtacgcggcgaagtactgatgcaaaaagccgattttgccgccctcaataaaagacaagccgaaaacgggcaaaaaccctttgccaatccgcgcaacgccgctgccggcagcctgcgccaactcgattcgcgcatcactgcgcaacgcaaactgcactttttcccctactccgtcgcccgccagcaaggcggtttcgtcgcggaagaacacatccaagaactcgcctatttccaagcactcggcttcagtctgccaaatggcaatttcggctgtttcaaaaatatcgacgaagtattggcgttttacgaacaaatgcagcaaaaacgccccgaactgccctacgaaatcgacggtatggtggtcaaagtcaacagcttggcgcaacagcgcgaactcggcttcatctcacgcgcgccacgctgggcgattgcccacaaattccctgccgaagaagccctgaccattgtcgaagcgattgacgtgcaaatcggcaggacgggcgcggtaacgccggttgcccgattacaacccgtattcgtcggcggcgtaaccgttaccaacgccaccctgcacaatcaggacgaagtatcgcgtaaagacgtgcgcgtcggcgataccgtcgtcgtgcgccgcgccggagacgtgattcccgaagttgtgcgcgtgatttttgaacgccgcccgatgcgggaaaccgccgttgccgtttcagacggcatcgggcatcggcaggacgatttgtttgccgaaacaccgtccgctaatcaaacccaatccgttccgctccacaagccctaccgcctgccgacccattgccccatctgccgcagcgaaatcgaacgcgaagaaggcgaagccgtcgcccgatgcagcggcggcatgctttgtcaggcacaacgcgcgcaaggcttaatccacttcgcctcgcgcaaagcgatggacatcgacggcttgggtgaaaaacaaatcgaacagcttgtcgcccaagacctcgtccgccacttcgccgacctctaccgcctcgatattccgaccctgcaaaaaatgaaggaagcggcggacaaaaccgttgccgaatcggatcaaatgccgtctgaagacagttcggtcggcgcgtcgggcaaacataaaaaaccaccgaccaagtgggcggaaaacatcctcgcaggcatagaatccggcaaaacgcccgaactcgcgcgcttcctgttcgcgctcggcatccgccacgtcggcgaacgcaccgccaaaacgctggcgcaggcattcggcacattggaacacgtccgccgcgcccccgaacccgtcctcgcctgcctgcccgacatcggtacggtagtggcgcgttccattgcccacttcttcgcccaagccgaacagcaggcgatgatagacgaactgctcgccgcaggcgttgccccgcaaacccaagccgttaccatcccgcccgcccgccacgccgaaccgcaacgctggatcgcccgcctgcccgacttcaaaattagcgaaaacaaagcccaagccttatgggaactcgctggtaaaaacatagaaggtctacaaaacgacaaagccctccccgccgactggcaagcatggcgcagcgaaccacaaaacgccgccctactcgaaaacctgaaaaccttcttcgcgcaaatgccgtctgaagacgaggcggcgcaaggttcagacggcatcaacgaagccgtagcaggcaaaacctttgtattaaccggcaccctgcccacgctcaaacgcgaccaagcccaatccctaatcgaagccgcaggcggcaaagtttccggcagcgtgtccaaaaaaaccgactacgtcgtcgccggagaagccgcgggcagcaagctggaaaaagccaatgccttgggcgtttccgtcctcagcgaagccgaactgcttaccctgctcggctga

SEQ ID NO: 40316 - DNA, 855 bp, Neisseria meningitidis
atgtcggcacaactgatcaatggtaaagaagtttcgcaaaaacgcctgcaggcggttgccgaagcggtggcgcaacgccaacaggacaatctgcacatgccttgcctggccgtggttttggtcggaggcgaccctgccagcgcggtttatgtccgcaacaagaaaactgcctgccaaaaatgcggcatcaaatcactgtcttacgagctgcccgaatcaacatcgcaggaagaactgctggcactggtcgaccgcctgaatgccgattccgaagtggacggtattctggttcagctaccgctgccgaagcacctcgacagccaggcggttttggaacgtatttcgccggataaggacgtggacggcttccatccttacaatgtcggcaggctggcggtcaaaatgccgctgatgcgcccgtgtacgcccaagggcgtgatgacgcttttggaagcttacggcattgatccgaaggggaaaaaagcggtcgtggtcggcgcgtcgaatatcgtcggccgcccgcaggctttggaactgctgctggcgcgcgcaacggtaacggtctgccacagcgcaaccgaaaatctgacagacgaggttgccggagccgatattttggtggtcggcgtaggcattccgaactttgtcaaaggcgaatggatcaaacctggcgcggtcgttattgatgtgggcatcaaccgtttggacgatggcagcctgtgcggcgacgtggaatttgaaacggcaaaagaacgggcggcgatgattacgcccgttcccggcggcgtgggtccgatgacgattgccacattgatggaaaacaccctgcacgcggcttcactgcacgatgcttga

SEQ ID NO: 40317 - DNA, 420 bp, Neisseria meningitidis
atgggtgttttattaaataacacaaaaattttaatcaatatatcctcaatatcatttattttattgaacgtatacattatatacagtaaagttagatttaatttatcaactataccttttgtaaatcatatttctatattaatagcattttcgtttataatttcaacattgcttttgatttataaaatggtaatttttgcacgaggaataaataaaaatcaaaataaaatagaatttgtaaaaatatttactttttattttatggttattttgtatattgccttaataactctatttagacaggaaaatttttattttaatatgaatatttattctatcatttttatagtgatactattctgtctaactcatttcttttttattattaaattttattttgaggtaaataaaaatgtatga

SEQ ID NO: 40318 - DNA, 279 bp, Neisseria meningitidis; identical to SEQ ID NO: 36597

SEQ ID NO: 40319 - DNA, 1281 bp, Neisseria meningitidis
atgaaatccctttttattcggctgctcctgttgggttcggcggccggcgttttctatcatacccaaaaccaatccctgcccgcgggcgaacttgtctatccgtccgcaccgcaaatcagggacggcggcgatgcgctgcactacctcaaccgcatccgcgcccaaatcggtttgcacaagctggcacacgcgccggttttggaaaattccgcccgcaggcacgcacgctatctcacgctcaatcccgaagacggacacggcgaacaccatcccgacaatccgcactacaccgcacaaaagctgaccgaacgcacacgccttgccgggtatctctacaacggcgtgcatgaaaacatcagcacggaagaggaagccgccgaatcgtccgacagcgacatccgcacgcagcaacgccaagtggacggattaatgagcgcaatctaccaccgcctttccctacttgaccgccatacggatgaggcaggagcggcatttgtgcgcgaaaacggtaaaaccgttctcgtattcaatcagggcaacggcaggtttgagcggcattgcgcccaaggcagaaatcagccggaagcaggacggaaatattaccgcaacgcctgccataacggtgcggtcgtgtacaccgacgaagccatgcccgcacaggagctgctctatacagcctatcccgtcggcaacggcgcactgccttatttccacggcgagcgtccagaccccgtgccggaatatgaaatcacgggcaatcctgccagcattgatttttccgaggcggcaggcaaaattacgatgaaaagtttcaagctgtatcagggtaaaaacgaaatccgccccgtcagggttttaaccgccggcaacgaccccaacggcaggctgaccgcgtaccaattcgcgcttttcccgctcaagcctttggaatacggtacgctttatacggcggtattcgactatgtccgcaacggacggcgcgcgcaggcgaaatggcagtttagaacccgaaaacccgattacccttattttgaggtaaacggcggcgagacacttgcggttagaaaaggcgaaaaatatttcatccactggcgcggacgctggtgtttggaagcgtgtacccgttatacctaccggcagcgacccggcagccgcctgtccataggaaggcacgaggcgggcggcatcgttttcagcgttggcggaatggcgggcagccgcatcacgcttgcaccggaaggagaaacggaacgaggcgtaaccctttatttacaggattga

SEQ ID NO: 40320 - DNA, 1098 bp, Neisseria meningitidis
atgcgaaagaatgcaatgatgtatgaccccttatatttcccccgttcagagttggcggaaatcatcgccaaaagcctgtatggaggcataacacacgcctttacgctgtttgcgccgcgaagaatgggcaaaacacagtttcttttgaaagacatcaagcccacggcagaggcggcgggcttcaatgtcttttatttctcattcatggacagcaccgcgcccactgttgactttcaggcggcattattgcgctttgccgaaagtatcaagacgggcggaaaggtgcaaaacctgattgggcaaatcagcaaaatagaaatcatgggcagcagcatagagagacggacggagcggcagcaggcggaattgcggctgtccgacatcatcgccgacattgcagggggcagccgccccagcctgttgctgttggatgaaatacaggaactggcacggcaacctgatacgggcggcttgatacgcagcttgcgtacaggcttggacatacaccagcagcaggtaaaaaccatattcacgggcagcagcacaaacggtttacgcgccatgttcaacgacatcaaagccccgtttttccatttcgcccacgccttagactttcccacgcttggacgggaatttaccgattttcttgccggtgtgtatcaggagaggacgggcagggggttagacggcggcgaactgtaccgcgcatttgagcggctgaacaaaacacccctttatatgcgggcaatgttgcaggacatgataatcaaccctgatttaagcatagggcaggctgaaagcataaggctggaggaaatgcacaaacacgcagacacagccgcgcaatggcggcatttgagcctgatagaacagttgattttatcggagttggcaagcgggcagaccgcgatatattccgcgcaaacgcgccaagccctagcccgtgtaatcggtgtggacgatataggcacaagcacggtgcaaaacaatatccgcaaattggagcgtaaagacctgataaccagagacggcgcgaacaggttgcagataaacagcccgattttaaagacttggattttagagaatgtggagcggtag

SEQ ID NO: 40321 - DNA, 1434 bp, Neisseria meningitidis
atgaacgaatattcccaattaatcaagcatcccgatgtttccctttccccgatttcagacggcatcggggtcgacaatccggcaacgggcgaaattttggcgtatgtccgcaacacgggttcggacaaactgaaaaacctgattcaaaaggcggcggcagcgcaaaaattatgggcggcgaaaactgctttggaacgcgccgacatattgtggcgttggtattttttagttaaagaaaacaaggaagcactggcgcgcctgatgacgatggagcagggcaaaagcctgaccgagtcgcgcggcgaaatcgattatgcggcttcgtttgtgcgctggtttgcggaagaggcgcggcggattgacggcgatgtgctgacaagtgtgaaagcgtcgcaaaaactggtcgtgttgaaacagcctgtcggcgttaccgccgcgattacgccgtggaacttcccatctgcaatgattgcgcgcaaggctgcgcctgctttggcggtgggctgcgcgatgatcgtcaaacccgcatcgctcacgcctttgagtgcgtatgcgttggtcgtgctggcttatgaagcgggcgtaccacaggatttgttgcccgtcgtcagcggtcgcgcatcggaaatcggccgtgaatttgccacgaacccgattatccgcaaaatcagcttcaccggctctaccgaagtcggtgcgaaaatttttgccgacagcgcggcggacattaaaaaactcagtttggagctgggcggcaacgcgccgtttatcgtgtttgacgatgccgatttggacaaagccgtcgaaggtgcgctcgccagcaagttccgcaacagcggtcagacctgcgtctgcaccaaccgcgtttacgcccaatccggcatttacgacgaattttgtcgcaaattgagtgaaaaagtagccgagctcaaattgggcaacggcttggaggatggcgtcaaccaagggccgctgattgaggaaaaagcggtagaaaaagtcgagcagcacattgctgacgcgctcgctaaaggcgcggtctgtctgaccggcggcaaacgcagcgcattgggcggaacgttttttgagccgaccgtcttaagcggcgtaacggcgcaaatggcggtggctcgcgaagaaaccttcgggcctttgtgtccggtattccgttttgaaaccgaagtcgaggtcatcgaggctgcgaacaatacggaatacggtttggcggcctaccttttcaccgccgacaccgcccgccaatggcgcgtcggcgaagccttggaatacggtatggtcggcatcaatacgggcttaatcagcaatgaagcggcaccgttcggcggcgtgaaacgcagcggtttgggacgtgaaggcagcaaatacggtgcggacgaatatctggaattgaaatatctgtgtatggatgtcgggtga

SEQ ID NO: 40322 - DNA, 807 bp, Neisseria meningitidis
atgtggcattgggacattatcttaatcctgcttgccgtaggcagtgcggcaggttttattgccggtctgttcggcgtaggcggcggcacgctgattgtccctgtcgttttatgggtacttgatttgcagggtttggcacaacatccttacgcgcaacacctcgccgtcggcacatccttcgccgtcatggtcttcaccgccttttccagtatgttggggcagcacaaaaaacaggcggtcgactggaaaaccgtatttgcgatgatgccgggtatgatattcggcgtattcacgggcgcactctccgcaaaatatatccccgcgttcgggcttcaaattttcttcatcctgtttttaaccgccgtcgcattcaaaacactgcataccgaccctcagacggcatcccgcccgctgcccggactgcccggactgactgcggtttccacactgttcggcgcaatgtcgagctgggtcggcataggcggcggttcactttccgtccccttcttaatccactgcggcttccccgcccataaagccatcggcacatcatccggccttgcctggccgattgcactctccggcgcaatatcgtatctgctcaacggcctgaatattgcaggattgcccgaagggtcactgggcttcctttacctgcccgccgtcgccgtcctcagcgcggcaaccattgcctttgccccgctcggtgtcaaaaccgcccacaaactttcttctgccaaactcaaaaaatccttcggcattatgttgcttttgattgccggaaaaatgctgtacaacctgctttaa

SEQ ID NO: 40323 - DNA, 384 bp, Neisseria meningitidis
atgttccgtactatgcttggcggaaaaatccaccgcgccaccgttaccgaagccgatttaaactatgtcggcagtattaccgtcgatcaagatctgttagacgcggcaggcatctaccccaacgaaaaagtcgccatcgtcaacaacaacaacggcgaacgttttgaaacctataccattgcagggaaacgcggcagcggcgtgatttgtctgaacggtgctgcggcaaggctggtgcagaaaggcgatatcgtcatcatcatgtcttacgtccaactctccgaacccgaaatcgccgcacacgaacccaaagtcgtcttggtagacggaaacaacaaaatccgcgacatcatctcctatgagccgccgcacaccgtgctgtaa

SEQ ID NO: 40324 - DNA, 2349 bp, Neisseria meningitidis
atgctccctatcgccgcgctggtcggcagtattttcggcaatccggtctttgcggcagatgaagctgcaactgaaaccacacccgttaaggcagaggtaaaagcagtgcgcgttaaaggccagcgcaatgcgcctgcggctgtggaacgcgtcaaccttaaccgtatcaaacaagaaatgatacgcgacaacaaagacttggtgcgctattccaccgatgtcggcttgagcgacagcggccgccatcaaaaaggctttgctgttcgcggcgtggaaggcaaccgtgtcggcgtgagcatagacggtgtaaacctgcctgattccgaagaaaactcgctgtacgcccgttatggcaacttcaacagctcgcgtttgtctatcgaccccgaactcgtacgcaatattgaaatcgtgaagggcgcagactctttcaataccggcagtggtgcattgggcggcggtgtgaattaccaaacgctgcaaggccgtgatttgctgttggacgacaggcaattcggcgtgatgatgaaaaacggttacagcacgcgtaaccgtgaatggacaaataccctcggtttcggtgtgagtaacgaccgcgtggatgctgctttgctgtattcgcaacggcgcggccatgaaaccgaaagcgcgggcaaccgcggctatccggtagaaggtgcgggtaaagaaacgaatatccgcggttccgcccgcggcatccccgatccgtccaaacacaaataccacaacttcttgggtaagattgcttatcaaatcaacgacaaccaccgcatcggcgcatcgcttaacggccagcagggacataattacacggttgaagagtcttataacctgaccgcttcttcctggcgcgaagccgatgacgtaaacagacggcgcaatgctaacctcttttacgaatggatgcctgattcaaattggttgtcgtctttgaaggcggacttcgattatcagaaaaccaaagtggcggcgattaactacaaaggcctgttcccgacgaattacaccacatgggaaactgagtaccataaaaaggaagttggcgaaatatacaaccgcagcatggacacccgattcaaacgttttactttgcgtttggacagccatccgttgcaactcggggggggggggcgacaccgcctgtcgtttaaaactttcgccagccgccgtgattttgaaaacctaaaccgcgacgattattacttcagcggacagatatcccgtactaccagctcgattcaacaccctgtgaaaaccactaattatggcttctcactgtctgatcaaatccaatggaacgacgtgttcagcagccgtgcaggtatccgttacgatcataccaaaatgacgcctcaggaattgaatgccgagtgtcatgcttgtgacaaaacaccgcctgcagccaacacttataaaggctggagcggttttgtcggcttggcggctcaactgaatcaggcttggcgtgtcggttacgacattactgccggctaccgtgtaccgaacgcatcggaaatttatttcacctacgataacggcgcggctacctggctggctaatcctagtttgaaagccgagcgcagcaccacccacaccctgtctttgcaggggcgtggagaaaaaggtacgctggatgcgaatttatatcagagtaattaccataatttcctttcagaagaacagtttacacgacttatacgcgatgaaaagtgtgatgaagattatgctctagcaggttattgtaaactctaccgaaatcagctttattggcatatggaaaatatcgacaaggccagaatccgcggtatcgagctgacaggccgtctgaatgtggacaaagtagcgtctttcgtgccggaaggctggaaactattcggctcgctgggttacgcgaaaagcaaactgtcgggcgacaacagcctgctgtccacccagccgttgaaagtgattgccggcatcgattacgaaagcccgagcgaaaaatggggcgtgttctcccgtctgacttatttgggtgcgaaaaaggctaaagacgcgcaatatactgagtatgagggctaccgatttatcaaaaaagtcaaagattatccgtggttgaataagtcggcttatgtgttcgatatgtacggcttctacaaaccggctaaaaacctgactttgcgtgcaggcgtgtacaatatgttcaaccgcaaatacaccacttgggactccctgcgcggtctgtacagctacagtaccaccaacgcagtagaaaaagatggaagaggtttagatcgttaccgcgcccccggccgcaactatgccgtatcgctggaatggaagttttaa

SEQ ID NO: 40325 - DNA, 300 bp, Neisseria meningitidis
gtggattatccggactttcctcaagagattcctacaccaaattatacagactgggtaaaaattaaattcaagcagttcagctatctgaaatttgtctatggatacgctacaaagagccaagatataaatatcgataatacattggaacttggcgaattaaagcaggatgatgaaatcttggattatggaggtgcgctggaattgataggcggtaggtatgattttccgactgcttttaggatagatatagtttgccgggaaatagagttagaatttttagatcaggagggtttcaattaa

SEQ ID NO: 40326 - DNA, 813 bp, Neisseria meningitidis
atgtcggttgggcattatgaaaattttcccgtcggttcgctgattttgccgcgcaggttgaggaagccggttcacgcggtgtacgcgtttgcacggacggcggacgatatggcggacgagggcagtatgccgtctgaagccaggttggcggggttggagggtttgcggcgcgagttggacgtgttggcatcgggcggccggtcggcgcatcctttgattgcacgattggatgccgaggcggttgtgccgttcggtttggatttgcagccgttttatgatttgctttcggcgttttcgcaggacgtggttaaaacgcggtacgcgcatttcggcgagctggccgattattgtcggcgttccgccaaccctgtcggacgcattatgctggctttgtacgggaaaacggatgcggtgtgcgtggcgcaaagcgacggcatttgtacggctttgcaactggtcaatttctggcaggatgtggctgtggattggcaaaagggcagggtttatatcccgcaggacgatttgttgaaattcggtgtttctgaggaacagatcgcggcaggacgggcggatgcggcgtttcagcggctgatggcgtatgagtgccggcgcgcattccgtatgctgaaggcgggttcgcctttggcaagggaactgaaggggcgtatcggtttggaactccgtatgattgtgttgggggcgcagttgattttgcagaaactggacgcgtgccgatacgatgtgtttgcacaacgccccgttttggataagaaggattggttgattatgctgaaaaaggcgttgtggaaatga

SEQ ID NO: 40327 - DNA, 1164 bp, Neisseria meningitidis
atgacacagttatttttacattcagatacaccaaatgagaaggaactgatttcaatatatgagaaagctgtttcagaggcagtagagctgtatattttctctgcgtatctcactcattgggatgtaaaaaataagctcaatagcaaattgcaagagtttaaatttatttttggacaagatttcggattgtctaaaaaagaggctattcggaaagtgttgaaatggcttccgtcccatttgaaattcacactgatggtagctcaaggcattcagggttttcatcctaaagctgtattttggaagaatgataagaatgaatattatgctttaatcggttcttcaaatttgactcatgctgcgtttaatagcaattatgaagcaaatattttgactaaaatttccgagcaggattttataaaagtcaaatcttgggctgatgaaattgcgatgaaatctatcccagtatcggaagattggcttgaggagtatcaggaagctgaaattaattataagaaatcaactgttagccaatcattgatggataagttatttatggaaatgccaaattataatcaagaactgattgcagcacggagaaaacagatgagaaaccatcaaactgtgtgtaatcaattaaaaagtcttattaagcaatgtgctgcaggaaagatagacaatgatgagttttatgtggaatttaataaattatggtcttggaaaagcgaaaataaaggagaaggggtaggtaatcgatttcaagatcaaacgtggaaaaggaccggaaagtcttcagattttagaaaattatgcattgctatccaatcagtttttgatgcaccacttgctgagagagataatgttgttgccaagcaaattgattggctaaaagaatgtggagtttccactcgtggttcagttttttctgaaatgctttgtcaagaatatccagatagatatccagtgttaaacgctcctattaaaaaatttttagaaaaaaataaatttaagtctgcaaaaggagcaagtgaaggctctagatatattgatttaagtatgaagttaagagctttactagcaatgcagtcagaaataaaaaatttggctgaattagatgttttagtgcaggcagaatatcgcgatagtacagatattgattgggagtga

SEQ ID NO: 40328 - DNA, 324 bp, Neisseria meningitidis
atgggagattccgtactatccgccatccaacaaaccatcacccagcgaaaatctgccaatccgtccgaatcttacgtcgcacagctcttgcataagggcgaagacaaaatcctaaaaaaagtgattgaagaggcgggcgaagtgttgatggcatccaaagacaaaaacccgtcccacctggtttacgaagttgccgacttatggtttcacaccatgattcttctgacacaccacgacctgaaggcggaagacgtattggacgaacttgcgcgccgccaaggtttgtcgggcttggccgaaaaagccgctcgcacggaatcttga

SEQ ID NO: 40329 - DNA, 2586 bp, Neisseria meningitidis
atgttagaagcctatcgtaaagccgccgccgagcgcgccgcccttggtattcccgcccttcctctgactgctcagcaaaccgccgatttggttgagctgctgaaaagcccgcccgcaggcgaaggcgagttcttggtcgaactgcttgcccaccgtgttccgcccggtgtggacgatgccgccaaagtcaaagcctcattcctggctgccgttgccgaaggcagcgcgtccagcccgctgatctcccccgaatatgcgaccgaactcttaggtacgatgctcggcggttacaatatccacgccttaatcgaactcttggacgacgacaaactcgcgcccattgccgccaaaggcttgaaacatacgcttctgatgttcgattccttccacgacgttcaggaaaaagccgaaaaaggcaacaaatacgcgcaagaagttttgcaatcttgggcagatgccgaatggttcgcctcacgcgccaaagttcccgaaaaaatcaccgttaccgttttcaaagttgacggcgaaaccaatacagacgacctctcccccgcgcccgacgcgtggagtcgtcccgatattccgctgcacgcgctggccatgctgaaaaacccgcgcgacggcatcacgcccgacaaaccgggcgaagtcggtccgattaaattgttggaagaactcaaagccaaaggccatccggttgcttacgtcggcgacgtggtcggtactggttcttcacgcaaatccgcgaccaactccgtcatttggcataccggcgaagacattccgttcgtgccgaacaaacgcttcggcggcgtatgtttgggcggcaaaatcgcgccgattttcttcaatacccaagaagattccggcgcgctgccgattgaagtcgatgtatctgctctaaaaatgggtgatgtcgtcgatatcctgccttatgaaggcaaaatcgtgaaaaacggcgagactgttgccgagtttgaattgaaatcacaagtattgctggacgaagtgcaagccggcggccgtatcaacctgattatcggccgaggtctgaccgccaaagcgcgcgaagccctgaaactgcctgcctctactgcattccgcctgccgaaagcgcctgccgaaagcaaagccggtttcaccttggcgcaaaaaatggtcggccgcgcctgcggtcttcccgaaggacaaggcgtgcgtccgggtacttactgcgaaccgcgtatgacgacggtcggctcgcaagacacgaccggcccgatgacccgcgacgagttgaaagacttggcttgtttgggcttctccgccgatatggtgatgcagtctttctgccacaccgccgcctatccgaaacctgtcgatgtaaaaacccataaagaactgcccgcctttatttccacccgtggcggcgtgtcactgcgtccgggcgacggcgtcatccactcgtggctcaaccgcctgctgctgcccgataccgtcggcaccggcggcgacagccatacccgtttccccatcggtatttccttccccgccggctccggcttggttgcctttgccgccgcaacgggcgtaatgccgctcgatatgcccgagtctgtattggtacgcttcagcggcaagctgcaaccgggcgtaaccctgcgcgatttggtgaacgccatcccgctgtacgcaattaaacaaggtttgctgaccgttgccaaagccggtaagaaaaacatcttctctggccgcatcctcgaaatcgaaggcctgcccgatttgaaagtggaacaagcctttgaattgaccgacgcatccgccgaacgctccgccgccggctgtaccgtgaagctcaataaagagccgattatcgagtacatgaaatccaacgtcgtgttgatgaaaaacatgattgccaacggctatcaagacccgcgcactttggaacgccgcatcaaagctatggaaaaatggctggcaaatcccgagttgctcgaagcggataaagatgccgaatacgccgccgtgattgaaatcaacatggacgacatcaaagagccgattatcgcctgcccgaacgacccggacgacgtgtgcttcatgtccgaacgctccggcaccaaaatcgacgaagtattcatcggttcgtgtatgaccaacatcggccacttccgcgccgcctccaaacttttggaaggcaaggcagacacccccgtccgcctgtggattgcgccgccgaccaaaatggacgcgaaacaattgtccgacgaaggacactacggcgtactcggacgtgccggcgcgcgtatggaaatgccgggttgctccttatgtatgggtaatcaggcgcaagtacgcgaaggtgcgaccgttatgtccacctccacccgcaacttcccgaaccgtttgggtaaaaacacctttgtttacctcggttcggcggaattggcagcgatttgctccaaactgggtaaaatcccgaccgttgaagaatatcaagccaatatcggcatcatcaacgaacagggcgataaaatctaccgctatatgaacttcaacgaaatcgacagctacaacgaagtagccgagaccgtgaacgtttaa

SEQ ID NO: 40330 - DNA, 1253 bp, Neisseria meningitidis
atgagcaccttcttccagcaaaccgcccaagccatgattgccaaacacatcgaccgtttcccgctattgaagttggaccgggtgattgattggcagccgatcgaacagtacctgaatcgtcaaaaaacccgttacctcagagaccaccgcggccgtcctgcctatcccctgttgtccatgttcaaagccgtcctgctcggacaatggcacagcctctccgatcccgaactcgaacacagcctcattatccgcatcgatttcaacctgttttgccgtttcgacgaactgagcagtatagtggattaacaaaaaccagtacggcgttgcctcgccttagctcaaagagaacgattctctaaggtgctgaagcaccgagtgaatcggttccgtactatttgtactgtcttcggcttcgtcgccttgtcctgatttttgttaatccactatactttatgccgctaccgcaactggcggcgcaagacgacaccctgtccgaattgctcaaactgattaactgccaactgaccgaaaaaggcttaaaagtagagaaagcatccgccgccgtcattgacgccaccattattcagaccgccggcagcaaacagcgtcaggctatagaagtcgatgaagaaggaaaagtcagcggccaaaccacaccgagtaaggacagcgatgcccgttggatcaagaaaaacggcctctacaaactcggttacaaacaacatacccgtaccgatgcggaaggctatatcgagaaactgtacatcactcccaccaatgcccatgagtgcaaacacctgccgccgttgttggaaggactgcccaaaggtacgaccgtctatgccgacaaaggctatgacagtgcggaaaaccggcaacatctggaagagcgtcagttgttagacggcattatgcgcaaagcctgccgcaaccgtccgctgacggaaacgcaaaccaaacgtaaccgatatttatcgaagacccgttatagtggattaaatttaaatcaggacaaggcgacgaagccgcagacagtacaaatagtacggcaaggcgaggcaacgccgtactggtttaaatttaatccactatatgtggtcgaacagagcttcggtacgctgcaccgtaaattccgctatgcgcgggcagcctatttcgggctgagcaaagtgagtgcacaaagccatctgaaggcgatgtgtttgaaccttttgaaagcggccaacaggctaagtgcgcctgtttgcgcctaa

SEQ ID NO: 40331 - DNA, 492 bp, Neisseria meningitidis
ttggctaaacagcaagagaaagccaaaattgaaaaagcggaacgtgagcggaaaaaagccgaagaacaggcagaacaagctagaaaagaaaaagaaaagcaaaagcttgaagaacaaagacaatttttgattgagcagtttgaagtattgtctcccaaacagcaagaaaatgtcatcaatgagatatttgagcaagtgggaaaaggcgcattcaagcaaattttccaaacggcacggcagcaaggtacggttcatattgatgcgcgatttgtaaaaaatttttataattattttcaacaagaagaacgcgccaaaagggctagaaaacgtgtagatttacccattcagtacacagaagaagatattgagcaggaagtaccaaaagaaaaaggcacaatttttttcggtaacgactggaacgaatatgtttataaacaactaattatgtatagagattttaaaagcatgatgaatgatgatgccattaaataa

SEQ ID NO: 40332 - DNA, 1446 bp, Neisseria meningitidis
atggcgcattttttcaatattaattatccgacttacaaaggtaaaaacatgactgtccgtatcgaacacgatttattgggcgaccgcgagattcccgccgaagtgtattggggcatccacactctgcgcgccattgaaaactttaaaatctccacacaaaaaatttccgacgtgccgcagtttgtccgcagtatggtgatggtgaaaaaagcaaccgcgcaggcaaacggcgaattgggtgcagtaaaacccgaaatcgccgccgccattgaaaaggcttgcgacgaaattctgctgaacaaccgctgcctcgaccaattcccctccgacgtgtatcagggcggtgcgggtacttcggtcaatatgaacaccaacgaagtcatcgccaacctcgcattggaagtcttgggatacgaaaaaggccgctacgacatcgtcaatccgatggatcacgtcaatgccagccaatcgaccaacgatgcctatcccacgggcttccgccttgccgtgtattacagcatcggcgaattgctcgacaaactgactgtcctgaaaaacgcctttgccgccaaagccgaagaatttaaagacgttttgaaaatgggccgcacccagcttcaagatgccgtgccgatgactgccggccaagaattccaatctttccaagtgttgttggaagaagaaatcctcaacctcgaccgcacccgccaactgctgttggaagtcaatttgggcgcaacggcaatcggcacgggcgtgaacacgcccaaaggctacgccgaactggtggtcaaaaaactctccgaagtcagcggcttgccttgcaaactgaccgaaaacctgattgaggcgacctccgactgcggcgcatatgtgatggtacacggcgcattgaagcgcacggcggtcaaactctccaaaatctgcaacgacttgcgcctgctctcttccggcccgcgtgccggcttgaaagaaatcaacctgcccgaattacaggccggttcttccattatgcctgccaaagtcaatcccgtgattcccgaagtggtcaaccaagtctgcttcaaagtcatcggcaacgacacgacgattaccttcgccgccgaagccgggcaactgcaattaaacgtgatggagccggtcatcgcccaatgtatgtttgaaaccatttccctcttgggcaatgccgcagtcaacctgtccgacaaatgcgtcaaaggcattacggtcaaccgcgaaatctgcgaacgttacgttttcaactccatcggtttggtgacttatctgaatccgtatatcggacaccacaacggcgatttggtcggcaaaatctgcgcccaaaccggcaaaggcgtgcgcgaggttgtcttggaacgcgggctgttgagcgaagaagaactcaaccgcatcctctctcccgagaacctgatgaacccccatctgtaa

SEQ ID NO: 40333 - DNA, 438 bp, Neisseria meningitidis
atgatagggcttttaatcatcacacacgaaaccataggcgaagcctaccgcaagctggcacatcattttttcccgggcgggctgcctgaaaacgtccgcatactcggcgtgcagccgacggaagaccaagacgacatcatcaacaacgccattgccgcgcttcaggagtttcccgacaacgacggcgtgctgattatgaccgatattttcggcgcgaccccctgcaatgcagcccgccgcctcgtgcgcgaaaacaaatcggcgattttgaccgggctgaacgcgccgatgatggttaaggccgtccaatattcgccggcggcggaagaccttgccgcctttaccgaatgcgtcagggaggcggcggtaaaaggcattttcgccatcacgtccgcgcccgaagatttggtgtgccggcgcagcggcgatgccgtctga

SEQ ID NO: 40334 - DNA, 333 bp, Neisseria meningitidis
atgcagattttatcttttcaaccggacattgcggaacgtatgctggaaggtacggaaggcgagtcggtcaacgaaaacgcacaattcgtccgtacggacaacggctattggattgcgtggcatgaaggcgtagcggcactgcttgcgcccgatatgccgccgggcattccctgtttttgggtggaaggcgcggaaagccttgaagagttgtgcgtcatggtggaacgcggcgagtttgacgaagtggaagagtttgacggcgatgacgacgaatggctcgaaacggcacagggttgcgggcaccacggcgacgcttgcgcctgcggacattaa

SEQ ID NO: 40335 - DNA, 774 bp, Neisseria meningitidis
atgccggacaacgggcggcataaggcgggaaaaatggaaacgacactgttcaaacccgccctgtggcagataccgcatatcggatccggcggcgaaaccgcccttgcggaaaaaacggaaaccctcaaacaacgcctgcaccggattgtcggcagccaccgggatgcacggtttgccagcagccttgcggcagaagatatggtgattaccgaccttatcgccggcgaaaacctcaatatcggcatttttaccttggatacggggctgctccacacggaaaccctgaacctgctggacaggctcggacgcgcatatccccatttgcggataaagcgtttccggccggttcgagaagatgccgaccgttatgtggaaagcaaaggcaggtttgccttttacgacagcgttgaagcgcgccgcgaatgctgccgcatccgaaaaatcgaaccgctcaaccgcgccattgcaggcgcggacgcctggcttaccgggcaacgccgcgaacaatccgccacacgcacggaactgccgtttgccgaatacgatgccggacggggcatcggcaaatacaacccgattttcgactggtcggaacacgacgtgtgggcatacatcctcgccaacaatgtgccttacaacgatttgtaccggcaaggatttcccagcataggctgcgacccctgcacccgccccgtcaaggcgggcgaagacatccgcgccgggcggtggtggtgggaaggcagaaacagcaaagaatgcgggctgcacaaataa

SEQ ID NO: 40336 - DNA, 318 bp, Neisseria meningitidis
atggcctgtgatgccggcgtggcatcttcttcaacaatcaaaggcaaatatgttgcaggggttaaagttgaaaaaggcgtcattaccgcagaaatgaaatcaagcggcgtaaacaaagaaatccaaggcaaaaaactctccctgtgggccaagcgtcaagacggttcggtaaaatggttctgcggacagccggttgagcgcaccgcccccaccaccaccaacgacgacgtcaaagccgacaccgccgccaacggcaagcagatcgacaccaagcacctgccgtcaacagcatcgacaagaaaatcgacaccaaactag

SEQ ID NO: 40337 - DNA, 1080 bp, Neisseria meningitidis
atgaaaacactgaccgtacacaccccgtcccacagctaccccatctttatcggcaacggactgctgccgcaggcaggaagcctgctcaaaccgcatttgggcaaacgcgccgccatcatcaccaacgaaaccgtcgccccgctctacctcggcacgcttcagacggcattggatgcggcaggcgtatcccatttcagcatcatcctgcccgacggcgaggcgcacaaaaactggcagacgctcaacctcatctttgacgggctgatgcaaaaccgcgccgaacgcaaaaccacgctcatcgcactgggcggcggcgtgatcggcgatatgacgggttttgcggcggctacttatcaacgcggcgcgccatttgttcaaattcccactactttattaagtcaggtcgattcctccgtcggcggcaaaaccgccatcaaccacccgctcggcaaaaatatgatcggcgcgttctaccagccgcaggcggtgcttgccgacttggacacgctgcacaccctgcccgtccgcgaattgtccgccggtatggcggaagtcatcaaatacggcgcgctcggcgacatcggttttttcgaatggctcgaacaaaacatatccggactgatgatgctcgatcgggaaaaactcgcccaagccgtgtaccgctgctgccaaatgaaggcagacatcgtcgcccaagacgaaaccgaacagggcatacgcgcatggctcaacctcggacacaccttcggacacgccattgaaaccgagatgggttacggcacttggctgcatggagaagccgtcgccgccggctgcgtgttggcggtgcgtttgtccgaacaactgggcaaaacctccgccgcagataccgcgcggctcgccgccctgtttgaagccgccggactgccgtccgcaccgcccgtgttcccattcgaaaaatggctcgaacatatgagccacgataaaaaagtcagcggcggcatcatgcgctttatcggtctgaaccggctgggcgaagccaacatcaccgaaattaccgacacggacatcctccgccgcaccctgcaaccgtatctctga

SEQ ID NO: 40338 - DNA, 1266 bp, Neisseria meningitidis
atgttcagcttcttccgtcgcaagaaaaaacaggaaacgccggctctcgaggaggctcaaattcaggaaaccgcagcaaaagcagagtccgaaaccgatcaagtaattgaaaatattaaagaagatgctgaatctttagcagaaagcgtcaaagggcaggtcgaatctgccgttgaaaccgtcagcggtgcggttgaacaggtaaaggaaaccgttgccgagatgctgtctgaagcagaggaagcggcggaaaaagcagcggaacaagtcgaagcggcaaaagaagccattgccgaaaccgtcggcgaggctgtcgggcaagttcaagaagccgttgcgacaactgaagaacacaagctcggttgggcggcgcgtttgaaacaaggcctgaccaaatcgcgcgacaaaatggcgaaatcgctggcgggcgtgttcggcggcggacaaatcgacgaagatttgtacgaagagctggaaaccgtgctgattaccagcgacatgggcatggaagccaccgaatacctgatgaaagacgtgcgcgaccgcgtcagcctcaaagggctgaaagacggcaacgaattgcgcggcgcgctgaaagatgcgctgtacgacctgattaagcctctggagaaacctttggtcttgcccgaaaccaaagagcctttcgtgattatgcttgcaggtatcaacggcgcgggcaaaaccacgtctatcggcaaactcgccaaatatttccaagcgcatggaaaatccgtattgctggcggcaggcgatactttccgtgccgccgcgcgtgagcagcttcaagcttggggcgaacgcaacaacgtaaccgtgatttcgcaaaccacgggcgattccgccgccgtgtgcttcgatgccgtccaagccgccaaagcgcgcggcatcgacattgtgctggccgacaccgccggccgcctgcccacgcagcttcacttgatggaagaaatcaaaaaagtgaaacgcgtgctgcaaaaagccatgcccgacgcgccacacgaaatcatcgtcgtgcttgatgccaatatcggtcaaaacgccgtcaaccaagtcaaagcctttgacgacgcattggggctgaccggtttaattgttaccaagctagacggcacggcaaaaggcggcatcctcgccgcgcttgcctccgaccgccccgtccccgtccgctatatcggcgtgggcgaaggcatagacgatttgcgcccgtttgacgcgcgcgcgtttgtggacgcactgctggattga

SEQ ID NO: 40339 - DNA, 717 bp, Neisseria meningitidis
atgaactttgaaaacgacgacattatccatgcgccgaccacgtcttccctgattctcgaagagcggcacgattcggagctgttccgtgtttacgccctgattttggacggcattaccgatcaggtgctgctgcccggcaaaaagctgaccgaatccgaactttgccgtcagatggtgtgttcgcgcaacaccgtccgcggcgcgctgtcgcttttggcgcacgacaagattgtcgatttgcaacccaacaggggcgcgttcgtccacgttcccgatttgaaagaaatgcaggatgtgttcaatgcgcgcatcgaaatggagacgatgattttgaatatcctcgcagatttgccggatttggaaacgcgcctcaagccgctttatgcgatgataaggcgcgaagaagaggcttccggcaggggcgaccgcgtcggctggaaccgcctgtccaatgccttccacgtcgaactggcgcgcctggtgggcaacgatgtgctgttcgacattatgaacacgctgtgcgcgcggtcttccctgattgtcgccgtggcgggcgtgcatcgcgaggaaaaacacgccatcaatacgcatacgcattccgaacaccgcgaaatcctcgacctgctgctggcgggcaggcgcaaccgcgtggtcaaaatcctgcgccgccatttgggcaactgtatggaacgcttggaaaagactttggaagattga

SEQ ID NO: 40340 - DNA, 345 bp, Neisseria meningitidis
atgaacatcatccgcgcgctcctcatcatcctcggctgcctcgccgccggcgaaaccgccgttttcctagcaggcatcaaactgcccggcagcatcgtcggcatgggcgtgctgtttgcgcttttgcaggcgggttgggtcaaaacgtcttggctgcaacagcttaccgacgcgctgatggcgaatctgacgctgtttctcgtgccgccctgcgtggcggtcatcagctatttggatttgattgccgacgattggttttcgatactggtttccgcctccgccagcactttgtgcgtactgctggttacaggcaaggttcaccgctggatacggagcattatctga

SEQ ID NO: 40341 - DNA, 354 bp, Neisseria meningitidis
atgggaataaaaaatgaacaaataataatttgtaaaaaatataatacagaaatatatcctgtttccgatgtttcaaaaatcggtgttgctgaaaatgtcaaacagacagacctatatccgattaacgggttaagacaccgtcccaaaggcgatactaacggctggtatatctgggccggtgaaaacttctccaatgacgaaaattttttcctgcccctgcatactttccatttgcaaatatggcgacccgaaatcatcccctttttgacacttccgcccggttaccgttttttaattggggaaaacggttatgaagatgtatggtttgatgagttgctattaaatgataattga

SEQ ID NO: 40342 - DNA, 303 bp, Neisseria meningitidis
ttgggattcaataatcttgtttcgcttgccgcgttaattgaaaaggttttccctattcgatatacgcctgccggaatccctgttttagatattattttaaagcacaaatcgtggcaggaggaaaacgggcagcaatgccttgtccaattggaaattccggcacggattttaggcaggcaggcggaagagtggcagtatcggcaaggtgtatatgttcacgtcgaaggttttttagctcaaaaaagcagacgttcccttatgccgatgctcaggatacaaaatattcaagaatataaaggttaa

SEQ ID NO: 40343 - DNA, 807 bp, Neisseria meningitidis
atgaatatgaaaaaatggattgccgccgcccttgcctgttccgcactcgcgctgtctgcctgcggcggtcagggcaaagatgccgccgcgcccgccgcaaaccccgacaaagtgtaccgcgtggcttccaacgccgagtttgccccctttgaatctttagactcgaaaggcaatgtcgaaggtttcgatgtggatttgatgaacgcgatggcgaaggcgggcaattttaaaatcgaattcaaacaccagccgtgggacagccttttccccgccttgaacaacggcgatgcggacgttgtgatgtcgggcgtaaccattaccgacgaccgcaaacagtctatggacttcagcgacccgtattttgaaatcacccaagtcgtcctcgttccgaaaggcaaaaaaatatcttcttccgacgatttgaaaaacatgaacaaagtcggcgtggtaaccggctacacgggcgatttctccgtttccaaactcttgggcaacgacaacccgaaaatcgcgcgctttgaaaacgttcccctgattatcaaagaactggaaaacggcggcttggattccgtggtcagcgacagcgcggtcatcgccaattatgtgaaaaacaatccgaccaaagggatggacttcgttaccctgcccgacttcaccaccgaacactacggcatcgcggtacgcaaaggcgacgaagcaaccgtcaaaatgctgaacgatgcgttggaaaaagtacgcgaaagcggcgaatacgacaagatttacgccaaatattttgcaaaagaagacggacaggccgcaaaataa

SEQ ID NO: 40344 - DNA, 330 bp, Neisseria meningitidis
atgctggatttattgccgtctgagatttggtcaaatccaaaggcgacattcttagaccctgtgtgtaaatcaggggtatttttgcgtgaaatcgtcaaacgcttggatgaaggcttgaccaatcaaataccagataaacaaactcgcattaaccacattttaaaaaatcaagtttttggaagtactgccacgtatgtaggtagctttgaccgatatttgcataaaaactcctttgctggtgaaaggaattattttgccaattttaaaatatttctggcaccaaatagtacaatgacaaagacaatcatgccaatgattaaatcaggatag

SEQ ID NO: 40345 - DNA, 1977 bp, Neisseria meningitidis
atgccacgcattgccgccctgcccgaccatctcgtcaaccaaatcgccgccggcgaagtggtcgaacgccctgccaacgccctgaaagaaatcgttgaaaacagcatagacgcaggcgcgacggcgattgatgtcgaactggcgggcggcggcatccgtctcatccgcgtcagcgacaacggcagcggtatccatccggacgacatcaaactcgcactccaccgccacgctaccagcaaaatcaaaaccttaaacgatttggaacacgtcgccagtatgggctttcgcggcgaaggcttggcaagcatcgcctccgtcagccgcctgaccctgaccagccgccaagacggcagcgcacacgcgacacaagtcaaagccgaagacggcaaactcagcagccctacggcagccgcccaccccgtcggcacgaccatcgaagccgccgaactcttcttcaatacccctgcgcggcgcaagttcctcaagtctgaagccaccgaatacgcccactgtgccacgatgctcgaacgcctcgcgctggcgcatccgcacattgccttctcgctcaaacgcgacggcaaacaagtgttcaaacttcctgcccaaagcctgcatgaacggattgccgccattgtcggcgatgattttcagacggcatctttggaaatcgacagcggcagcggcgcattgcggctctatggcgcgattgccaagccgactttcgccaaaggcaaaaccgacaaacaatactgcttcgtcaaccatcgttttgtccgcgacaaagtgatgctccacgccgtcaagcaggcataccgcgacgttttgcacaacgccctcacccccgctttcgtccttttcctcgacctgccgcccgaagccgtggatgtcaacgtccacccgaccaaaaccgaaatccgcttccgcgacagccggcaggtgcaccaactcgtgttccacacgctcaataaagcccttgccgacacacgcgccgacttgaccgaaagcgtcagcaacgcaggcgaagtgttgcatgacattaccggcgttgtctccaccccaatgccgtctgaaaacgacagcgaaaatctgtttgatagcgcatccgactacccgacaggcaacaaacccgatacacgcaatgcctttggttcatcaggcaaaaccgcgcctatgccctaccaagccgcgcgtgcgccgcaacaacgcagcctgtccctgcgcgaaagccgcgcggcaatgaatacttacgccgagctttacaaaaaaaccgacggcatcgaccttgagttgaaccgattagagcaggcacgtttcggcaatatgccgtctgaaatgcctatcccaaaaacagatgcgccgctttcagacggcatcccgtcccaatccgaactgccgccgctcggcttcgccatcgcccaattattgggcatctacatccttgcccaagccgaagacagcctgctgctcatcgacatgcacgctgccgccgaacgcgtcaactacgagaaaatgaaacgccaacgtcaggaaaacggcaagctgcaaagccaacgcctgcttattcccgtaaccttcgccgcgtcccacgaagaatgcgccgccctctccgaccatgccgatgcactggcaggcttcggcttggaattgtccgacatgggcggcaatacccttgccgtccgcgcagttcccgccatgttgggcaaagccgacgtcgtttctctggccaaagatgtattgggtgaactcgcccaagtcggcagcagccaaaccatcgaagaacacgaaaaccacatcctcgccaccatgtcctgccacggctcgatccgcgccggccgccggcttaccctgcccgaaatgaacgtccttctgcgcgatatggaaaacacgccgcgcagcaaccagtgcaaccacggcaggccgacgtgggtcaaactgactttgaaagaattggacgcactgttcttgcgcggacaataa

SEQ ID NO: 40346 - DNA, 840 bp, Neisseria meningitidis
gtgaaacgaatttttctgtttttggctaccaatatcgctgttttggtcgtaatcaacattgttttggcggttttgggcatcaacagccggggcggcacgggcagcctgttggcgtattccgccgtcgtcggcttcactggttcgattatttcgctgctgatgtccaaattcatcgccaaacaatcggtcggcgcggaagttatcgacacgccgcgcaccgaagaagaagcctggcttttgaacactgtcgaagcccaagcgcggcaatggaacctgaaaacgcccgaagtcgccatctaccactcccccgaacccaatgcctttgccacgggcgcatcgagaaacagctccctgatcgccgtcagcaccggtttgctcgaccatatgacgcgcgacgaagtggaagccgtattggcgcacgaaatggcacacgtcggcaacggcgatatggttacgctgacgctgattcaaggcgtggtcaataccttcgtcgtgttcctgtcgcgcattattgccaacctgattgcccgaaacaacgacggcagccagtcccagggaacttatttcctggtcagcatggtattccaaatcctattcggcttccttgccagcttaattgtcatgtggttcagccgacaacgcgaataccgcgccgacgcgggcgcggcaaaactggtcggcgcaccgaaaatgatttccgccctgcaaaggcttaaaggcaacccggtcgatttgcccgaagaaatgaacgcaatgggcatcgccggagatacgcgcgactccctgctcagcacccacccttcgctggacaaccgaatcgcccgcctcaaatcgctttaa

SEQ ID NO: 40347 - DNA, 420 bp, Neisseria meningitidis
atggcacaattaccgctatatctgacttctgaaatcaaagactttactgtcggcacgcctaaagttttggaatcattttccaaacatatcccttatggtgttgtctttgaagacgacggcgacacgggctacttctatgccgcttcgcaagacgggattctagatgccttgcacatctacaatgtcgaagatgtatccgacaaacatatccccaatcatgtcttgattttatgggatgatgcctgcaccatagccgcattgagtatcaacgactacattcatgccgtctatgattttgtcgaacaggcaggatattgccgcaacggcttccctgaaacaggcggcgaatgggtgaaagtcgaaaaccgcgtcttggacgatgaattgctggacaaaatcttatcccgaaaatctacataa

SEQ ID NO: 40348 - DNA, 2769 bp, Neisseria meningitidis
atgagatcttctttccggttgaagccgatttgtttttatcttatgggtgttatgctatatcatcatagttatgccgaagatgcagggcgcgcgggcagcgaggcgcagatacaggttttggaagatgtgcacgtcaaggcgaagcgcgtaccgaaagacaaaaaagtgtttaccgatgcgcgtgccgtatcgacccgtcaggatatattcaaatccagcgaaaacctcgacaacatcgtacgcagcatacccggtgcgtttacacagcaagataaaagctcgggcattgtgtctttgaatattcgcggcgacagcgggttcgggcgggtcaatacgatggtggacggcatcacgcagaccttttattcgacttctaccgatgcgggcagggcaggcggttcatctcaattcggtgcatctgtcgacagcaattttattgccggactggatgtcgtcaaaggcagcttcagcggctcggcaggcatcaacagccttgccggttcggcgaatctgcggactttaggcgtggatgacgtcgttcagggcaataatacctacggcctgctgctaaaaggtctgaccggcaccaattcaaccaaaggtaatgcgatggcggcgataggtgcgcgcaaatggctggaaagcggagcatctgtcggtgtgctttacgggcacagcaggcgcagcgtggcgcaaaattaccgcgtgggcggcggcgggcagcacatcggaaattttggcgcggaatatctggaacggcgcaagcagcaatattttgtacaaacaggcgggttgaaattcaattccaacagcggaaaatgggaacgcgatttgcaaaggcaattctggaaaaccagttactataaacaatacaaagacccccagaaactgaaaaaatacatcgaagaccaagataaagactggcgggaaaacctggcgccgcaatacgacatcacccccatcgatccgtccagcctgaagcagcagtcggcaggcaatctgtttaaattggaatacgacggcgtattcaataaatacacggcgcaatttcgcgatttaaacaccaaaatcggcagccgcaaaatcatcaaccgcaattatcaattcaattacggtttgtctttgaacccgtataccaacctcaatctgaccgcagcctacaattcgggcaggcagaaatatccgaaagggtcgaagtttacaggctgggggcttttaaaggattttgaaacctacaacaacgcaaaaatcctcgacctcaacaacaccgccaccttccggctgccccgtgaaaccgagttgcaaaccactttgggcttcaattatttccacaacgaatacggcaaaaaccgctttcctgaagaattggggctgtttttcgacggtccggatcaggacaacgggctttattcctatttggggcggtttaagggcgataaagggctgctgccccaaaaatcaaccatcgtccaaccggccggcagccaatatttcaacacgttctacttcgatgccgcgctcaaaaaagacatttaccgcttaaactacagcaccaataccgtcggctaccgtttcggcggcgaatatacgggctattacggctcggaaggcgaatttaagcgggcattcggagaaaactcgccgatatacagggaacattgcgacccgagctgcgggctttatgaacccgtattgaaaaaatacggcaaaaagcgcgccaacaaccattcggtcagcattagtgcggacttcggcgattatttcatgccgttcgccagctattcgcgcacacaccgtatgcccaacatccaagaaatgtatttttcccaaatcggcgactccggcgttcacaccgccttaaaaccagagcgcgcaaacacttggcaatttggcttcaatacctataaaaaaggattgttaaaacaagatgatacattaggattaaaactggtcggctaccgcagccgcatcgacaactacatccacaacgtttacgggaaatggtgggatttgaacgggaatattccgagctgggtcagcagcaccgggcttgcctacaccatccaacatcgcaatttcaaagacaaagtacacaaacacggttttgagttggagctgaattacgattatgggcgttttttcaccaacctttcttacgcctatcaaaaaagcacgcaaccgaccaacttcagcgatgcgagcgaatcgcccaacaatgcgtccaaagaagaccaactcaaacaaggttatgggttgagcagggtttccgccctgccgcgagattacggacgtttggaagtcggtacgcgctggttgggcaacaaactgactttgggcggcgcgatgcgctatttcggcaagagcatccgcgcgacggctgaagaacgctatatcgacggcaccaacgggggaaataccagcaatgtccggcaactgggcaagcgttccatcaaacaaaccgaaacccttgcccgccagcctttgatttttgatttttacgccgcttacgagccgaagaaaaaccttattttccgcgccgaagtcaaaaatctgttcgacaggcgttatatcgatccgctcgatgcgggcaatgatgcggcaacgcagcgttattacagttcgttcgacccgaaagacaaggacgaagaagtaacgtgtaatgatgataacacgttatgcaacggcaaatacggcggcacaagcaaaagcgtattgaccaattttgcacgcggacgcacctttttgataacgatgagctacaagttttaa

SEQ ID NO: 40349 - DNA, 138 bp, Neisseria meningitidis
atgaagattagcgcactcgaccatctagtactaactgttgccgacattgaccgaaccatcgcgttttacacgcaagttttgggtatggaagaagtttcatttggcaacaaccgtaaggcttgtattttagaagactaa

SEQ ID NO: 40350 - DNA, 1581 bp, Neisseria meningitidis
atgtccgtcatcaaacgtgccctgatcagcctgtccgacaaggcaggcgcggtcgaatttgcccaaactctgcacaagctcggtgtcgaaatcctctccaccggcggcacggcgaaactgcttgccgatgcgggcgttcccgtgattgaagtcgccgactataccggcttccccgaaatgctcgacggccgcgtgaaaacgctgcatccgaaaatccacggcggtattttgggtcggcgcgatttggacgaacacgttgccaagatggaagaacacggtatcggcaacatcgaccttgtgtgtgtcaacctctaccccttcgccgccaccatcgccaaaccaaactgcacactggaagacgcgattgaaaacatcgacatcggcggcccgactatggtgcgttccgccgcgaaaaactggaaacacgtcgccatcgttaccgacaccgccgacttccccgccattgccgccgaactcgaagccaacaacggcgcattgagcgacaaaacccgtttcaacctctcacgcaaagcattcagccacaccgcccaatacgacggcatgatttccaactacctgacctccctttcagacgacgttttgagcggccagccccaaatcggcgaattcccaagccagttcaaccaaagctggattaaagtacaagacatgcgctacggcgaaaatccgcaccagcgcgccgcgttctaccgcgatattcaccccgccgccggcagcctcgccgcctacaaacagctgcaaggtaaagaattgtcttacaacaacatcgccgatgccgatgccgcttgggaagccgtcaaatccttcgacgcgcccgcctgcgtgattgtgaaacacgccaatccgtgcggcgttgccgttgcagccgataccttgaccgcctacaaactcgcctacgccaccgacaccaccagcgcgttcggcggcatcatcgccttcaaccgcgaagtagacggcgaaaccgtcaaacaaattaccgacaaccaatttatggaagtcctgatggcgccgaagtttactgccgaagccctcgaaatcgccgctgccaagaaaaacgtgcgcgtattggaagtgccgctcgaagcaggcgcaaaccgcttcgaactcaaacgcgtcggcggcggactgttggtacaaacgcccgacatctgccgcatcagccgcgccgatttgaaagtcgtctccaaacgccaaccgaccgagcaggaatggaacgatttgctgtttgtctggaacgtcgcaaaatacgtcaaatccaacgccatcgtgttcggcaaaggcggacaaacctacggcatcggtgcaggccaaatgagccgcgtggacagcacccgcatcgccgcccgcaaagcgcaggacgccaatttcgacctcaacggcgtatgtgccgcttccgatgctttcttccccttccgcgacggcgtagatgtcattgccgagcagggcatcaaagccatcatccatccggcaggctccatgcgcgatcaggaagtcttcgacgcagcggacgaacacggcatcgccatggtcgtaaccgacgtgcgccacttccgccattaa

SEQ ID NO: 40351 - DNA, 1206 bp, Neisseria meningitidis
atgcaaactttaatttcagcagataatcatttgctgctgtgggcttttgttatgttagctgccgctgctgcgatttttattgagcaaaacagtcgcttggctgggaaagtccctggtgcagtattagctttattgattgcgttgattgcttctaatttgggtgttattccgacggatgctccagtatttgatgctgtatggtcttatattgtacctcttgctattccgttgttattgtttcaattagatcttcatgctctatttaaggaaagtggacgtatgctgtttattttcctgattagttcactagggacggtcattggaacgcttgtctcatttgcactattgaaaaactatattcctgaactagataaggtagctggcatgatttcagcatcttatacgggaggtggtgttaattttgcagctatgtcagctaagcttaaccctgctaaagatgttattgcagcaacaattgttgctgataatttgatgatggcttgttacttttttattttgattggtatctcttcctcatattgggtcagaaaagtttggggaagtccatatcaggataaattggagcaggaatatcatgatccgagtgtgaataaggctgccgagtattggaaacctaaatccatttcgctacagagtatagccttatctttggctgcctcgattttgttggtcgcagtttcattctcattatccagttttttgcaaaatcattttcaaagtgttgatggtgttgcattaaaaatgctgacaggtttaattagtgacaaatatttgctgttaacgacatttacattggcagttgttttatttttccgtaaaggcattcaaaaactagatggcagtcaagaattagggacatattgtatttatctgttttttgttgtgattggtgttcctgcctctataccgttaattattaaaacagcaccattactctttgtttttactttgattattgtggtattgaatttgttactgacgttagtgttaggcaagctgttcaaattcagtattgaagaaattgtattggcttgtaatgccaatattggagggccgactactgcagcagccttagccatcagtaaaggttggcgtgatttagtcggtgcaattttgttaattggtactgtaggctacattatcggtaactatataggttcgtttgtatatgccctattgagctga

SEQ ID NO: 40352 - DNA, 759 bp, Neisseria meningitidis; identical to SEQ ID NO: 39453

SEQ ID NO: 40353 - DNA, 1011 bp, Neisseria meningitidis
atgaaccacaccgttaccctgcccgaccaaaccacctttgccgccaacgacggtgaaaccgttttgtccgccgccgcccgacaaaaccttaatctgccccattcctgcaaaaacggtgtctgcgggcaatgcaaagccgaactggtcagcggcgatattcaaatgggcggacactccgaacaggctttatccgaagcagaaaaagcgcaaggcaagattttgatgtgccgcaccaccgcgcaaagcgacatcagcctcaacatccccggctacaaccccaacgccctccccgtccgcaccctgcccgcacgcatcgaaagtatggttttcaaacacgatgtcgccctcttgaaacttgccctgcccaaagccccgccgtttgccttctatgctgggcaatacatcgatttactgctgccgggcaacgtcagccgcagctactccatcgccaatccgcccgaccaagaaggcattttggaactacacatccgcaggcgcgaaaacggtgtctgctcggaaatgattttcggcagcgaacccaaagtcaaagaaaaaggcatcgtccgcgttaaaggtccgctcggttcgtttaccttgcaggaagacagcggcaagcccgtcatcctgctggcaaccggcacaggctacgcccccatccgcagcatcctgctcgaccttatccgccaagacagcagccgcgccgtccatttctactggggcgcgcgtcatcaagatgatttgtatgccctcgaagaagcacaagggttggcatgccgtctgaaaaacgcctgcttcacccccgtattgtcccgccccggagagggctggcagggaagaaaagggcacgtacaagacatcgcggcacaagaccaccccgacctgtcggaatacgaagtatttgcctgcggctctccggccatgaccgaacaagcaaaaaatctgtttgtgcaacagcataagctgccggaaaacttgtttttctccgacgcattcacgccgtccgcatcataa

SEQ ID NO: 40354 - DNA, 993 bp, Neisseria meningitidis
atgccgtctgaaacagtttgtccgttttcagacggcatttccgttacacacccatccccttatacagtacgaccctattccgaaggtctgttaagaaagcccgctatgccttaccaacaaatcaccatcaacgtcaacgatgccgtcgccgaacgcctcgccgacaccctgatggaatacggcgcactctccgccgccatcgaagatgcctatgcaggcaccgaaaacgaacaagcgattttcggcgaacccggtatgcccgccgaacaaatctggcagcagagcaaagtcatcgccctgttcggcgaacacgacgaagccgccgccatcattcaaaccgccgcacaagaatgcggattaaaagacttggcatacaccggtgaaaccctcgaagaccaagactgggtacgcctgacccaagcgcaattcgaccccatccgaatttccgaccgcctgtggattaccccctcttggcacgaagcccccgaaggcactgccgtcaacctacgcctcgaccccggactcgccttcggcaccggcagccacccgaccacgcgcctctgcctcaaatggttggatacgcaactcaaaaacggcgaaagcgtcctcgactacggctgcggttcgggcatcctgaccatcgccgccctcaaactcggcgcaggttctgccgtcggcgtcgatattgacgaacaagccgtccgcgccggcagggacaacgccgaacaaaacaacgtcgatgcacaattcttcctgcccgacggcctgcctcaagggcaattcgacgtagttgtcgccaacatcctcgccaaccctttacgtatgctcggcgaaatgcttgccgcccgcaccaaacaaggcggccgcatcgtgttatccggtttgttggacgaacaaatcgaagaactcggcggcatttacagccaatggttcgatctcgacccggcggaaaccgaagaaggctgggcgcgcttgagcgggacaaaacgctga

SEQ ID NO: 40355 - DNA, 1359 bp, Neisseria meningitidis
atggatttaaatgtcgaaatcaagaatcttggcaaggttgcccatgctagggtttccattcgcccgcttaccgtcatcacgggttgcaactccagcggcaaaagtttcatcacgcgcgggctgtacagtatcctgcatacgctcaatcaggatgttgtttctgcctatatcctgaacgtgctgtccctgacgaactccgccttattgaggctttcagacggcatcccgagacgttcggcggatgacgacgcactgctgtccgacatcggtctgcttttggaaggtgtcaggcaaagcgtggcagacaggctgtctcccagcccgttgtaccaaccccctgcctcgcagcttgttttaaacgatttgaaaaccgctgttgccgagcttgcacgccgtctgaaggtcggcaaggggacgaagatgcaggcggtcaaacaacattacacagatattgaagattacctgtccgaccttgagttctgtctgtctggagatgtcggtttctacaccgaagctgtcggcagggctttgcactcggcattttccggaaatttccaagtggctgacatcaaaagacttttatcctccgatagtgcaaatttctcattgggcgacggtacggaggtttccattggggacaagggtttgggcttcaaactgtctgaaaccatgctgggtagtctgcaaagcctgaaaaacgtcgtctacctggagtcgcccgtctactacaagatgaggaatgccttaaaggacgcaaggctgttcaggttgaacatgctccgacgtggggcggtcaaccccgtgccccagtatttctacgatttggacgaaatgttggaggccgaactgccccccgtgaacgaagtgttcgggcagattgcggataaggtcgaggcactgataaacggcagactggctgttacgccctcgggggaaatcgtgtacagcgaacgcggtaggcagtccgtgccgctcaatatggcttcgtcggggatttcaaacatcggtatgattgcgctgctgttgcggcgcaatgtgctggacgagggcagtttcctgtttatcgacgagcctgagatgaacctgcatacgtcttggcagcacgcgatgctggacatcctgcttgatttgagcagggcgggtgtcaatgtggtggttgcaacgcacagcttggatatgttgcacaggctggaagccaaggtggaagccgatgcgtcattattgggcagtgtgggcgtatgcaggctgtcttcagacggcatatcccttgaagacggcagcgtcttgggcggtttacgggctgccaaagaagctttgggtgcgccttatcttgaagtcatcgaggagcggctgccttga

SEQ ID NO: 40356 - DNA, 192 bp, Neisseria meningitidis
atgataaagaaagttttactgatgaaatacggcgtattttttgcggcggcaaccgccctcctgctctcggcctgcggttacaaaggcgacctctacctgcccaaagaaggcgacaaggcgcgtttcggcgtaatccaaaccggtttgcagcttcaaagcaagccgcaatccgcttcacaaacccaaaaatga

SEQ ID NO: 40357 - DNA, 435 bp, Neisseria meningitidis
atggtggaagctaaaatttttattctatacggtgcagccaacaaaggtaagagtacgacactcaatacgctttttaatcagatttgtcggaaattttctaaatttctagtcttttttgaaagacatggaaacggcttagattttgttgcagtatttgatcatgaaggtcagagaattggtttttattcatctggtgataatgaatacgaggttaggagaaatttatacaaactttattcgcataattgtgattttatttttggcacgtcaaggacacggggtggtagttgcgatgcagtaggatgttatgcagagttattgcatggcgatgtaaatataattaattggtgtgaaaagtttgagcctacagatgaagacaatgagcgtgctgttaaagagttatttaagtcatttaaaaatataataaataagtta

SEQ ID NO: 40358 - DNA, 657 bp, Neisseria meningitidis
atgaacagacaaaaagtcatcgccatcgacggcccgggcgcatcgggcaaaggcacggtcgccgcccgcgtcgccgccgcattgggatacgattatctcgataccggcgcgctctaccgcctgaccgccctatatgcacaaaaacaaggagtggaatggcacgatgaagaaaatgtttccgcacttgccgaaaaactgcccgccgtattttcaggcagccgcatcctgctcggcggcgaagacgtttcagacggcatccggacagaagccatcggcatgggcgcatccgcagtcgcacagttgcctaaagtccgcgccgcactgctgcaacgccaacgcgattttctgaccgaaaaaggactggtcgccgacggacgggacaccggatcggtcgtcttcccccaagccgaacttaaaatcttcctgacggcagagtccaaaatccgtgccgaacgccgcgccaaacaaatcggcatcccctgcgaaggtttggcattcgagcgcatcctgtccaacatcgaagccagagacgaggcagaccgaaaccgcaaggttgcccccctgaaacaacaacccgatgccctgcttttggatacgagccgcctgactatagaagaaactgtaaaaaaagtgcttgattggtatcgtaaagtttaa

SEQ ID NO: 40359 - DNA, 1113 bp, Neisseria meningitidis
atgcaaaccgccgcccgccgctcgttcgactacgatatgcccctcatccaaacgccgacttccgcctgccaaatccgtcaggcgtgggcgaaggttgccgatacgcccgaccacgagacggcaggccgtctgaaagacgaaatcaaggctttgctgaaggagaaaaacgcggtcttggtggcgcattattacgtcgatccgctgattcaggatttggctttggaaacgggcggatgcgtgggcgattcgctggaaatggcgcgcttcggtgcggaacacgaagccggtacgctggtggtggctggtgtgcgcttcatgggcgagagcgcgaaaatcctctgccctgaaaaaacggtgctgatgcctgatttggaggcggaatgttctttggatttgggttgtcccgaagaagcgttttcagcgttttgcgaccaacaccccgaccgcacggtggtggtgtacgccaacacttccgccgccgtgaaagcgcgtgccgactgggtggtaacgtcttcggtggcgttggaaatcgtgtcgtatttgaaatcgcgcggcgagaaactgatttggggacccgaccgccacctcggcgactacatccgccgcgaaacgggcgcggatatgctgttgtggcagggttcgtgcatcgtccataacgaattcaaagggcaagagctggcggcgttgaaggcggaacatcccgacgcggtggtgctggttcatcccgaatcgccgcaaagcgtcatcgaactgggcgacgtggtcggctcgaccagcaaactgctcaaagccgccgtatcgcgtcctgaaaaaaaattcatcgtggcgaccgatttaggcatcctgcacgaaatgcaaaagcaggcgcccgacaaagaatttatcgccgcaccgacggcgggcaacagcggaagctgcaaaagctgcgcgttctgcccgtggatggcgatgaattcgctgggcggcatcaaatacgccctgacaagcgggcacaacgaaatcctgttggacagaaagctgggcgaagccgccaaactgcctttacagcgtatgctcgacttcgcggcaggactcaaacgcggggatgtgttcaacggcatgggccccgcctga

SEQ ID NO: 40360 - DNA, 2121 bp, Neisseria meningitidis
atgttcgacaaacacgttaaaactttccaatacggcaaccacaccgttactttggaaaccggcgaaattgcccgccaagccgccgctgccgttaaagtctctatgggcgacaccgtggttttggttgccgttaccaccaacaaagaagtgaaagaaggccaagacttcttccccctgaccgtcgattatttggaacgcacttacgccgcaggtaaaatccccggcggtttcttcaaacgcgaaggcaaacaaagcgaaaaagaaatcctgaccagccgtctgatcgaccgcccgattcgtccgctgttccccgaaggtttcttccacgacattcaaatcgtggcaatggtcgtgtccgtcgatcccgaaatcgattccgacattcctgcaatgttgggcgcgtccgccgcgctggtgttgagcggcgtaccgtttgccggcccgattggcgcggcacgcgtgggttatgtaaacggcgtgtacgttttgaacccgactaaagccgaattggcgaaatcgcaattggacttggtggtcgccggtacttcaaaagccgtgttgatggtggaatccgaagccaaaatcctgcccgaagacgtgatgctgggcgcggtggtttacggccacgatcaaatgcaggttgccatcaatgcaatcaatgaatttgccgacgaagtcaatccggaactttgggattggaaagcacctgaaaccaatgaggaactggttgccaaagtccgcgggattgccggcgaaaccattaaagaagcgttcaaaatccgtcaaaaacaaacgcgttctgccaagttggacgaagcttggaatgcggtaaaagaagccttgattaccgaagaaaccgacacgctggcagccaacgaaatcaaaggcattttcaaacacttggaagccgatgtcgtccgcagccaaattttggacggccaaccgcgcatcgacggccgcgacacccgcaccgtccgtccgctgaacatccaaaccggcgtattgccgcgcacgcacggttccgcattgtttacccgtggcgaaacccaagctttggccgttgcaactttgggtacttcgcgcgacgagcaaatcatcgacgcgctgtccggcgaatacaccgaccgctttatgctgcactacaactttccgccgtactctaccggcgaagtgggccgcatgggcgcgccgaaacgccgtgaaatcggtcacggtcgtttggctaaacgtgcgttgttggccgtattgccgaaacctgaagatttcagctacaccatgcgcgtggtctccgaaattaccgaatctaacggctcttcctctatggcttccgtctgcggcggctgcctgagcctgctgtctgccggcgtgcctttgaaagcacacgttgccggtatcgcgatgggtctgattctggaaggcaacaaatttgccgtcctgaccgacattttgggcgacgaagaccacttgggcgatatggactttaaagtggccggtacgaccgaaggcgttaccgcgctgcaaatggacatcaaaatccaaggcattaccaaagaaattatgcaaatcgctttggcacaggccaaagaagcgcgtctgcacatcttggatcagatgaaagccgccgttgcgggcccgcaagagctgtccgcacacgcgccgcgtttgtttacgatgaaaatcaaccaagacaaaatccgcgaagttatcggtaaaggtggcgaaaccatccgttcgattaccgctgaaaccggtacggaaatcaatattgccgaagacggtacgattaccattgccgcgaccactcaagaagccggcgatgcggcgaaaaaacgcatcgagcagattactgccgaagtggaagtgggcaaagtgtatgaaggcactgtggtgaaaatcctcgacaacaacgtcggcgcgattgtcagcgtgatgccgggcaaagacggtttggtacacatcagccaaatcgcccacgagcgcgtacgcaatgtcggcgactacctgcaagtcggtcaggtggtgaacgtgaaagcattggaagtggacgacagaggccgtgtccgtctgtccatcaaagccctgctggatgcgcctgcccgtgaggaaaatgccgccgagtaa

SEQ ID NO: 40361 - DNA, 1335 bp, Neisseria meningitidis
atggcaaaaaaatatttcggcacggacggcgtgcgcggcgaagtcgggcagtttccgattacgcccgattttgtattgaaactcggctatgcggcgggtcaggtcttggttcagcacgacaccggccagaaaccgaccgttttaatcggcaaggatacgcggatttccggctatatgctggaggccgctttggtggcgggttttaccgccgcaggtgtcaacgttatccaaaccggtccgctgcctacgcccggcgtggcttatctgacccgtgcgctgcgtttgtccgccggtgtgatgatttccgcgtcgcacaatgcctattccgacaacggcatcaaattctttgccgaaggcggcgtgaaattgagcgatgaagtcgagttggaaatcgaagccaaaatcgatgaagaaatgaaaacacagccttccgcccgcctcgggcgcgcacgccgcatcaacggcgcggacgaccgctatatcgaattttgcaaatccaccttccctacgcattccgatttgcgcgggctgaagctggtcgtcgatgccgccaacggcgcggcttacagcgtcgcacccaaagtgtttcacgaactgggcgcacaagtcgtcagcatcggcaacgaacctaacggctacaatatcaatgaaaaatgcggcgcgacccataccaaaaccctccaggccgtcgtgttgcaaaacgaggcagactacggcatcgcgctggacggcgacggcgaccgcctgatgatggtcgataaaaacgggcaggtttacgacggcgacagcctgatttacgtcatcgccaaagcccgcgccggcgaaggtgtcaacatcggcggcgtggtcggtacggtgatgaccaatatggcgatggaaaacgccttgaaagagcagggcgtggatttctgccgcgccaaagtcggcgaccgctatgtgttggaacaattaaaccggcgcggctggctcgtcggcggcgaagcgagcgggcatatcctgtgtatggacaaacacaataccggcgacggcattatttccgcgctgcaagtcttggcggcattgcaaacgctgaaccaagacctcgccgctgtttgcgccgactggcagccgtatccgcaaacgatgattaatgtccgtatcggcaaggggcaaaactggcaggaagcctcaaaaaccgtgttggcggaagtggaaaaagaactcgaaggcaaaggaagggttgtgttgcgcgcttcgggaaccgaaccggtcgtgcgcgtgatggttgaagcgcggcaggcggattgggcgcgcgacggggcggaacgtatcgccgccgccatcggcggcatttag

SEQ ID NO: 40362 - DNA, 933 bp, Neisseria meningitidis
atgctctcacaactggagtatggcattgcgaaggaaaacagaccgaaccggcaggcagaccgctttgccggttcggttttaccgcttgccgccagtctgacccacaagccgaacatcatgaaacccataccgaccgacacattccaacctgccatactgccccaagcctttgaaaccgaaatcaaatccacctgcacggggcgaatctatcggattcagacggcaacgctcggcgaaatgccgtctgaaggctatcccgtcctcttcgttctggacggcgaagcctttttcccctcacttttcaacatcatgcagtcgctgatgcccaaccccgttacccgaagcaacgccccctgcctgattgtcggtatcggctatacgacaggcagtgtgcgcgacctgacgcaacgtgccgccgactacacgccgccgcttggagacaacgccacagcagacgaacggcagcagttcggacaggcagaccgcttcgccgcctttatcgacagcgagctgaccgcctttttagaaagcaaataccggctggacaaaaatgaaaccgccgtattcgggcattcgttcggcgcactgttcggactgtattccctgctttcccaccgccgtttcagacggcattggctcgtatccccatcgatttggtggcacaacaggcggatactcgattttatgccgtctgaaaaccggctaaacggcatcgatgtctgcctcaacatcggcgcgctcgaacggggtagcggttgcaaacgcagggaagaacgcgatatggcaggactgtccgaacgcatggcggcagagttggacaggcacggggccgccgtctttttccgggaatatccgaatgccgaccacggcaatgtctcgttctactcgctgaccgattgcgtcgaatatttgaggaaggcttggcagaggtag

SEQ ID NO: 40363 - DNA, 483 bp, Neisseria meningitidis
atgacacaacaacgccaactgccttcccacgaactcattatgtccgaactgatgatgccggacaccgccaatttcagcggcaacgtacacggcggcgaactcctgctcctgctcgaccaagtcgcctattcctgcgccagccgttacagcggcaattattgcgttaccctgtcggttgacaaagtcctgtttaaagaacccatccacatcggcgatttggttaccttttacgccgctgtcaactacacgggacgcacctcgatggaaatcggcatccgtgtcgaagcacaaaacatccgcaccggcgaaatccgccacaccaacagctgctacttcacgatggttgcggtcaaagacggcaaacccgtccctgtccctccgctggaaatcctgaccgaccgccaacgctgccgctacgaaaaagccaaaaaacgcagagacatcagcctgcaagcctctgaagacatgtcctgcggctgctga

SEQ ID NO: 40364 - DNA, 1215 bp, Neisseria meningitidis
atggataaatttcccaagtctgcaaagctcgatcacgtctgttacgacatacgcgggccggttcacaaaaaagcccttcagttggaagaggagggcaataaaatccttaaactcaatatcggcaaccctgcgccgttcggctttgaagcccctgatgaaatcttggtcgatgtcatccgcaacctgccgacttcgcaaggctattgcgattctaaagggctgtattccgcccgcaaagccattgttcactactatcagaccaaaggtttgcgcgatattacggttgatgatgtctatatcggcaacggcgtgtccgagctgattacgatgtctatgcaggcattgctcaacgacggcgacgaaatcctgattcccgcgcccgactaccctttgtggacggcggcggcaacgcttgcgggcggtacggtacgccattatctgtgcgacgaagaaaacggctggttccccaaccttgccgatatggaagccaaaatcacgcccaaaactaaagccatcgtcgtcatcaatcccaataatccgacaggcgcggtgtacagcagggaaatcctgttggaaatcgccgaactggcgcgcaagcacggtttgattattttcgccgacgagatttacgataaaatcctttatgacggcgcggttcaccaccacatcgccgcgcttgcccccgaccttttgacggtaacgttcaacggtttgtccaaatcctaccgcgtcgccggcttccgccaaggctggatggtgctcaacgggccgaaacatcacgcaaaaggttacatcgagggtttggatatgctctcgtccatgcgcctgtgtgccaatacgccgatgcagcacgcgattcagacggcattgggcggctatcagagcattaacgaatttatcctgccgggcgggcggcttttggaacagcgcaacagggcgtgggaactggtcagccaaatccccggcgtgtcctgcgtcaaaccgatgggcgcgatgtatatgttcccgaaaatcgataccgaaatgtaccgcatccgcgatgacatgaaattcgtttacgatttgctggtgcgcgaaaaagtcttgctggtacagggaacggggtttaattggattaaacccgaccatttccgcattgtcacgctgccttacgtccatcagattgaagaggcgatgggcaggctggcaagattcctgcaaacctaccgccaataa

SEQ ID NO: 40365 - DNA, 309 bp, Neisseria meningitidis; identical to SEQ ID NO: 36432

SEQ ID NO: 40366 - DNA, 1194 bp, Neisseria meningitidis
atgaaccccaaacacctcatcgcattttccgccctgttcgccgccacgcaggcagaagccctgcctgtcgcctccgtcagcctcgacaccgttaccgtttccccgtccgccccctacgccgatacaaacgggctgctgaccgactacggcaacgccgccgcctcgccttggatgaaaaaactccgatccgtcgcacaaggcagcggcgagaccttccgcatcctgcaaatcggcgactcgcacaccgccggcgacttctttaccgacagcctgcgcaaacgcctgcaaaaaacatggggcgacggcggcataggctgggtttaccccgccaacgtcaaagggcagcgcatggcggccgtccggcacaacggcaactggcaaagcctcaccagccgaagtgcagcagcagacttcccgctcggcggcatcctcgcccacaccggcagcggcggcagcatgaccctgaccgcatcggacggcaagaccggcaaacagcgcgtttccctgtttaccaaacccctgctcgccgaacaaaccctgaccgtcaacggcaacaccgtctccgccaacggcggcggctggcaggtactggatacccgcgcggcactgcccttgaccatacagaccgaaatgccgtgggacatcggcttcatcaacatcgaaaatcccgccggcggcattaccgtttccgccatgggcatcaacggcgcacaattgacccattggtcgaaatggcgtgccgaccgtatgaacgaccttgcccaaaccggcgccgatttggttatcctttcctacggcaccaacgaagccttcggcgacaacatcgacattgccgacactgaacaaaaatggctggataccgtccgccaaatccgcgacagcctgcctgccgccggcatcctcatcatcggcgcacccgaatccctgaaaaacacgctcggcgtatgcggcacacgccccgtccgcctgaccgaagtccaacagatgcagcggcgcgtcgcccgtcaggggcagacgatgttctggtcttggcaaaacgcgatgggcggcgtttgcagcatgaaaaactggctcaaccaaggatgggccgccaaagacggtgtacacttctccgccaaaggctaccggcgcacggcggaaatgctcgccgacagcctcgaagaactcgtccgcgccgctgcaatcaggcaataa

SEQ ID NO: 40367 - DNA, 312 bp, Neisseria meningitidis; identical to SEQ ID NO: 36570

SEQ ID NO: 40368 - DNA, 1986 bp, Neisseria meningitidis
atggctaaaaacaaccaatacagcgaatccagcatcaccgtcctcaaaggtttggaaccggtcaaagaacgtcccggtatgtacacccgcaccgacagcccgacccatatctgccaagaagtcatcgacaacgcggcggacgaggcgttgggcggtttcgctacggcaatcgacgtgcaaattcatgaagacggttcgctttccgtacgcgacaacggccgcggtattcccgtcggtctgcaccctgaagaaggcgtacccgtagtcgaactcgtgttcacccgtctgcacgcaggcggcaagttcaacaaaaaagacggcggcagcgcgtatgccttttcaggcggcctgcacggcgtgggcgtatccgtgaccaacgccctttccacccgccttgaggtaacggtcaaacgcgaaggcaaaatccaccgtatcgtgtttgccggcggcgacgtggtcgaaccgttggcacaagtgggcaaatgcgccgtcaaagacagcggcaccgaagtgcgcgtctggccggacggcaaatattttgaaagcccgaattacagcatccccgaactcgaacgcctgctgcgcgccaaagccgtgctgctgccgggcgtgcgcgtttccctgacccgtccggtcaaaggcgaagacgaagcgcacacccaaacctggcattaccccgacggcctgaaaagctatctgaccgacctgattgccgacgcgcaggaagccgtacctctgttctcttgcgaaaactacatttcagacgaacacaacggcgatttcagcatcggcgaaggcgcagcatttgccctgacttggctggaagaaggctcgtgtgccaacgaaagctatgtcaacctcatccccaccccgctgggcggtacgcacgaagcgggcttgaaacaagccgtgttcaacgccgtcagcaacttcatcaacctgcacaacctcttaccgcgcggcgtgaaagtgcaaagcgacgacgtgttcggcaaaactgcctttgtcctctctgcccgtgtcctcgacccgcagttccaaggtcagaccaaagacaaactgaccaaccgcgacgcgctgaaactcgttgctaccgtatcgggcgaccctttggaactgtggctgaaccaaaacgtggacttcggcaaaaaaatcgccgaactcgccatccgtcaggcacaggcgcggatgcgttcggttaaaaagattgaaaagaaaaaaggcagcggcgtcgccgtcctgcccggtaagctgaccgactgcgaaagcgaagacatccgcgaaaacgaactcttcctcgtcgaaggcgattccgccggcggctcagccaaactcgcccgcgacaaagccacccaagccatcctgcccctgcgcggcaaagtgctcaacagctttgaagtccaccccgaccaactcttcggcaacgccgaaatccacgacatttccgtcgccatcggcgtcgatccgcacggtattaacgaccatcccgatttaagcggcctgcgctacggcaaaatcgccatcctgtccgatgccgacgtggacggctcgcatattcaagttttgctgctgaccttattctaccgccacttcccgaaactggttgccgacggacacatctacgtcgcccagccgccgctgttccgcgtcgatgtcaacgcacaaggcaaaagcaaacctgcccgcaaattctacgccctcgaccaaaacgaactcgacagcattttggagcggctgcaaaaagaaggcgtcaaagaaaccgcctattccatcagccgtttcaagggcttgggcgaaatgaaccccgaccagctcaaagacaccaccatgcaccctgacacccgccgcctgttgcaggtgcaaatccccgaaggcgcggatgacgagacgcgcgacatcttcgtcaaactgatgggcaaaggcgaagccgccgcccgccgcgcttggatggaacgcgaaggcgatacggcggaactcgatatttga

SEQ ID NO: 40369 - DNA, 996 bp, Neisseria meningitidis
atgaaaacatctatccgatacgcactgcttgccgcagccctgaccgccgcaacccccgcgctggcagacattaccgtgtacaacggccaacacaaagaagcggcacaagccgttgcagatgcctttacccgggctaccggcatcaaagtcaaactcaacagcgccaaaggcgaccagcttgccggtcaaatcaaagaagaaggcagccgaagccccgccgacgtattctattccgaacaaatcccggcactcgccaccctttccgccgccaacctcctagagcccctgcccgcctccaccatcaacgaaacacgcggcaagggcgtgccggttgccgccaaaaaagactgggtggcactgagcggacgttcgcgcgtcgtcgtttacgacacccgcaaactgtctgaaaaagatttggaaaaatccgtcctgaattacgccacgccgaaatggaaaaaccgcatcggttacgcccccacttccggcgcgttcttggaacaggttgtcgccatcgtcaaactgaaaggcgaagcggccgcattgaaatggctcaaaggtctgaaagaatacggcaagccttacgctaaaaactccgtcgcccttcaagcggttgaaaacggcgaaatcgatgccgccctcatcaacaactactactggcacgcttttgcgcgtgaaaaaggcgtacaaaatgtccacacccgcctgaatttcgtccgccacagagatcccggcgcactcgttacctattccggcgcagccgtgttaaaatcctcccaaaacaaggatgaggcgaaaaaattcgtcgccttcctcgccagcaaggaaggacagcgcgccctgaccgccgtccgtgccgaatatcctttgaatccgcacgtggtatccactttcaatttggaacccatcgccaagttggaagcaccccaagtgtccgccaccactgtttccgaaaaagaacacgccacccggctgcttgagcaagccggtatgaaataa

SEQ ID NO: 40370 - DNA, 990 bp, Neisseria meningitidis
atgaaaattaccgttatcggcgcaggttcgtggggtacggcgctcgccctgcatttttcccaacacggcaaccgcgtatccctgtggacgcgcaacgcagaccaagtccgccaaatgcaggaagcgcgtgaaaacaaacgcggactgcccggcttttcctttcccgaaaccttggaagtgtgtgcggatttggcagacgcgctcaaagacagcggacttgtccttatcgtaacctccgttgccggattgagaagcagcgcagagctgctcaaacagtacggcgcgggacacctccccgtcctcgccgcctgcaaaggattcgagcaggatacagggctgctgacctttcaagtattgaaagaagtattgcccgacaataagaaaatcggcgtactctccggtccgagttttgcacaggaactcgccaaacaactgccctgcgccgtcgtcctcgcttccgaaaaccaagagtggattgaagaactcgtaccgcagctcaacacgactgtcatgaggctttacggcagtaccgacgttatcggcgtggcggttggcggcgcggtaaaaaatgttatggcgattgccaccggattgtccgacggcctagagtacgggcttaacgcccgtgccgcactggttacgcgcggattagctgaaatcacccgccttgcctccgcaatgggcgcacagcccaaaaccatgatggggctggcaggcatcggcgacctcatcttgacctgcaccggcgcactctcacgcaaccgccgcgtcggcttgggtttggcagaaggcaaggaactgcatcaggtgctggtcgaaatcggacacgtttccgaaggggtcagcacgatagaagaagtcttcaatactgcctgtaagtaccaaatcgatatgccgattacccaaaccctgctgcaactcatccgtaaggaaatgacccctcagcaggtcgtcgaaagactgatggaacgcagcgcgcgtttcgaataa

SEQ ID NO: 40371 - DNA, 1356 bp, Neisseria meningitidis
atgtcggaatatacgcctcaaacagcaaaacaaggtttgcccgcgctggcaaaaagcacgatttggatgctcagtttcggctttctcggcgttcagacggcctttaccctgcaaagctcgcagatgagccgcatcttccagacgctcggtgccgatccgcacagcctcggctggttctttatcctgccgccgctggcggggatgctggtgcagccgattgtcggccattactccgaccgcacttggaagccgcgtttgggcggccgccgtctgccgtatctgctttatggcacgctgattgcggttattgtgatgattttgatgccgaactcgggcagcttcggtttcggctatgcgtcgctggcggctttgtcgttcggcgcgctgatgattgcgctgttggacgtgtcgtcaaatatggcgatgcagccgtttaagatgatggtcggcgacatggtcaacgaggagcagaaaggctacgcctacgggattcaaagtttcttagcaaatacgggcgcggtcgtggcggcgattctgccgtttgtgtttgcgtatatcggtttggcgaacaccgccgagaaaggcgttgtgccgcagaccgtggtcgtggcgttttatgtgggtgcggcgttgctggtgattaccagcgcgttcacgattttcaaagtgaaggaatacgatccggaaacctacgcccgttaccacggcatcgatgtcgccgcgaatcaggaaaaagccaactggatcgaactcttgaaaaccgcgcctaaggcgttttggacggttactttggtgcaattcttctgctggttcgccttccaatatatgtggacttactcggcaggcgcgattgcggaaaacgtctggcacaccaccgatgcgtcttccgtaggttaccaagaagcgggcaactggtacggcgttttggcggcggtgcagtcggttgcggcggtgatttgttcgtttgtattggcgaaagtgccgaataaataccataaggcgggttatttcggctgtttggctttgggcgcgctcggctttttctccgttttcttcatcggcaaccaatacgcgctggtgttgtcttataccttaatcggcatcgcttgggcgggcattatcacttatccgctgacgattgtgaccaacgccttgtcgggcaagcatatgggcacttacttgggcctgtttaacggctctatctgtatgcctcaaatcgtcgcttcgctgttgagtttcgtgcttttccctatgctgggcggcttgcaggccactatgttcttggtagggggcgtcgtcctgctgctgggcgcgttttccgtgttcctgattaaagaaacacacggcggggtttga

SEQ ID NO: 40372 - DNA, 270 bp, Neisseria meningitidis; identical to SEQ ID NO: 36672

SEQ ID NO: 40373 - DNA, 1035 bp, Neisseria meningitidis
atgcaaaccctgaccattatccgccccgacgatatgcacctgcacctgcgcgacggcgacgcgctcaaagccgttgccccttataccgcccgccaaatggggcgcgccgtcattatgcccaacctcaaaccgcctgtcgtcagtgtagccgacgcgcttgcctacaaagcgcgcattatggcggcgttgcccgaaggcagcgcgtttgagccgttgatgacgctttatttgactgataacgccacgcccgaacttgtacgcgaagccaaagccgccggcatcgtcgccttcaaactctaccctgccggcgcgaccaccaattccgattccggcgtaaccgacctgttcaagctcatccccgtgttggaagaaatggcgaaacagggcattttgttcctcgttcacggcgaagtaaccgaccccgaaatcgacatcttcgaccgcgaagccgcctttatcgggcgcgtgatgaaacccgttttggcgcaagtgccgaatcttaaagtcgtgttcgaacacatcaccaccgccgaagccgcccgcctggttttggaagcaggcgacaacgtagccgccaccgttaccccgcaacacctcctgctcaaccgcaacgacctcttggtcggcggcgtgcgcccccatcatttctgcctgcccgtactcaaacgcgaaacccaccgtcaggcattggttgccgccgttaccggcgagaaggcgcacaaattcttcctcggcaccgactccgcgccgcacgccaagtccgccaaagaaaacgcctgcggctgcgccggtatgttcagcgcgatgaccgccgtcgagctttacgccgaagtgtttgaaaaagcaggcgcgttggacaaactcgaagccttcgcctcaaaaaacggcgcaaggttctacggcattcctgaaaataccgacacgatcaccctcgtcaaacaaagccaaaccgttcccgcaagtgttccctacggcgacggcgaacttgtcccgatgcgcgcgggcggcgaaatcggctggacggtgcagtattga

SEQ ID NO: 40374 - DNA, 1419 bp, Neisseria meningitidis
atggaaaatatattgtctgttctggtgggtacagtcaatcggttcctttgggactacctgctgatttacgcgcttttgggtatcggcctgttttttacgctgtatcttggtgcgccgcagattaccaagctgggcgcgggattcaaatccgtattcggcggcttgtttgccaaaggcgataaagacgacaagtctttatcgcagtttcaggcgttggcggttgccatatctgcgcaaatcggtacgggcaacgtcgccggcgtggcgaccgccatcaccgcaggcgggccgggcgcgattttttggatgtgggtttctgccgttttggggatgtccacgatttttgcggaggcactgctggcgcagaaataccgcgtcgtcagccacggcaaatacatcggcgggccggcgttctacatcacccacggtctgactccgaaaatcggcaggggcgcggcgcgttttttgtccggtttcttttccattgcgttgattatcgcattgggctttatcggtaatgcgacacaggcaaactccattgcttctgccgttaccattgcatttgatgtgccttctttggcagtcggtattgtgcttgccgtccttgcgggcatggttgtgattggcggcgtgaaccgtattgccaatattgcccagtttgtcgtgccgtttatggcggttgtttatattttgtgcgccgtcgttatcctgtttgaattttccgactatattgtgccgatgttcaaccacatctttaccgccgccttcaatcctgaagccgttttgggcggtgcggcgggtatcggtatgcgcgaagcgatacgtttcggcgtggcgcgcggtctgttttccaacgaagcggggatgggttctaccccgcacgcccacgcgactgcggatgtgaagcatcctgtgcagcaaggtatggcggcatttgtcggtgtgtttatcgatacgattttggtatgtacggctacggcattgattatcctgctgaccgatgccaacctttcgggcgaacagggcgcggcggttactcaatttgcctttaacaaggcatttccgggcttcggttcgcaattgcttgccgtgtgtctgacctttttcgccttgacgaccattatcggctggtattatttcggcgagtccaacatccgttttcttttcaggggaagacacttgggcatctatcgcgcattggttctgcttgccatcgttttaggtacgctcggcaaagtcgatttggtttggagcctgtccgatatgttcaacggctttatggttatcccgaacttgatagccctgtttttgttgcgtaaggaaatccgtgccatttatgatgattatttggcacagaaaaaagcgggtcgggatttgtcctatcagtatgaattccacgagttccacgacaagggctga

SEQ ID NO: 40375 - DNA, 273 bp, Neisseria meningitidis
atgcgctgccaagacgggcgcaactataccggttcgtttaaaaacggcaaattcgacggacaaggcgtttataccgttgccgccaaccgcgaaatatttatcgaaccgttcaattccgacagtaccaaattccgcaacatggtactctcgggcacattcaaaaaaggcttggcacacggcagatttaccgtctcgcaaaacggcgaaaccctcttcattatgaaatgcgaaaacggcatgattaaagaagtgaagctgcccaaaaacaaataa

SEQ ID NO: 40376 - DNA, 387 bp, Neisseria meningitidis
atgaacgaacaagaactgcaagacctgcaaaaaatggtcggggtcgccgtcaacgccctcgaagacatcaaagccaaagacatttccgttctcgaaacgcaagacaaaacttcgctgtttgccagaatgattatcgccagcggcgacagtacgcgccaagtcaaagcactggccaacaacgttgccgtcgatttgaaagaagccggttttgaaatcctcagcaccgaaggcgacagcggcgaatggacgctcgttgatgcaggagacctcgttgtccacgtcatgctccctgccgtgcgcgacttctacgacatcgacaccctttggggcggcgagaaaccgagttttcacgccggaatgcagaagccgtggcacgcggcagactga

SEQ ID NO: 40377 - DNA, 549 bp, Neisseria meningitidis
gtgtctcaaaacactccaatcaaaccttggtacaaacacgtctggccgtggatcttgatggcggggccgatttttgtcgtcatcgccagcgtcgctatgttttttgtcgcgcagcagcacgcgacagatttggttacggacgattattataaagacggcaaacatatcgacatccagcttcatcgggatgaagaggctgtcagacggcatatcggggtgcaggttctcatttcccccgatatgaatgcggcaaaagtgtttgtcggcggcgagtttgacggcaaacagcctttgaacctgctgctgatgcacccgacccgcaaggcggacgatcaaaccgtcgccctcaagcccgtcggcagcgcgcagaacggcagggcggaatatgaggcggtgttcaaaaccctttcgccgaccaaccactggtatgtgcgcgtggaggacgcggcaggcgtgtggcgcgtcgagaacaaatggattaccagccaaggcaatgcggtcgatttgaccccgatggacaaacttttcaataatgccggaagcaaataa

SEQ ID NO: 40378 - DNA, 1059 bp, Neisseria meningitidis
atgattacaccgcaacaggctatcgaacgattaatcagcaataacgagttgttttacgatgaaatgaccgacttgatgcgtcagattatgagaggacaggttctgccggagcagatagcggccattttgacaggattgcgtatcaaggttgaaaccgtttccgaaattaccgcagctgcagccgtcatgcgcgagtttgcgacaaaagtgccgctggagaatgcagaggggctggtcgatatcgtcggtacgggcggggatggcgcgaaaacctttaatatttcgacgacttcgatgtttgttgccgcagcggcaggcgcgaaggttgccaaacacggaggccggtcggtctcttcctccagcggtgcggctgacgtggtggagcagatgggcgcaaacctcaacctgactcccgaacaggttgcccaaagtatcaggcagaccggcatcgggtttatgttcgcgcccaatcaccacagtgccatgcgccatgtcgcccctgtacgccgttcgctcggtttccgaagtattttcaacatattgggtccgttaacgaatcctgcgggcgcgccgaaccagcttttgggcgtgttccacaccgatttgtgcggcatcctttccagagtattgcaacagctcggctccaagcatgttttggttgtttgcggggagggcggtttggatgaaattacactgacgggcaaaacacgcgttgccgagctcaaagacggaaaaatcagcgaatacgacatccgcccagaagatttcggtatcgaaacccgccgcaatttggatgaaatcaaagttgccaatactcaggaatctttgttgaaaatgaatgaggtgctggaaggaagagaaggggctgcgcgcgatatcgtattgctcaacaccgccgccgccctgtatgccggaaatatcgctgcttcgctttcagacggcatatctgccgcacgggaagccatcgattcaggcagggccaaatcgaaaaaagaggagtttgtcggttttcaaccacaacaaagatgccattttcttggaaagatggagcttgggtga

SEQ ID NO: 40379 - DNA, 639 bp, Neisseria meningitidis
atgtccaaactgaccccccgcgaaattttgaccgccggcgcagttgtgccggtaatggcgattgacgacttaagcaccgccatcgatttgtcccacgcccttgtcgaaggcggcatccctaccctcgaaatcaccctgcgcacccctgtcggcctcgacgccatccgcctgattgccaaagaagtgcccaacgccatcgtcggcgcgggtacggtaaccaatcccgaacagctcaaagccgtcgaagacgcaggcgcggttttcgccatcagcccggggctgcacgaatccctcgccaaagccggccacaacagcggcatccccctgattcccggtgttgccaccccgggcgaagtccaactggctttagaacacggcatcgacaccctcaaactcttccctgccgaagtcgttggcggcaaagccatgctcaaagccctgtacggtccttacgccgatgttcgcttctgcccaaccggcggcatcagcctggcaactgcccccgaatacctggcactgcccaacgtcctgtgcgtcggcggctcatggctgacaccgaaagaagccgtgaaaaacaaagactggaacaccatcacccgcctcgccaaagaagcggcggcattgaaacccaaagcctga

SEQ ID NO: 40380 - DNA, 423 bp, Neisseria meningitidis
atgcaggttacatcaaaatggatagacgggatgtgctttgtcggcacgacggaaggcgggcacagcgtcgttatggaaggttcggcagtggaaggcgcggtcaagcgcgggcccagcccgatggaaatgctgctgttgggcgtggcgggctgttcgagcatcgatgtggtgatgattgccgaaaaacagcgtcagaaagtgactgactgccgtgcgacggttacggcgaaacgggcggacgatgcgccgcgcgtgtttaccgaaatccacatccatttcaaagtattcgggcatgatttgaaagaatcggccattgagcgcgccgttcagatgtctgccgaaaaatactgttcggcttcgattatgttgggcaaagcggcaaagattacccacagttttgaaattgccggggcagataaatag

SEQ ID NO: 40381 - DNA, 489 bp, Neisseria meningitidis
atgctcaaaataaccctaattgcggcgtgtgcggaaaacctgtgcatcggggcgggcaatgcgatgccttggcacattcccgaagatttcgcatttttcaaagcctataccttgggcaaacccgtcattatggggcggaaaacgtgggaatccctgcccgtcaaacccctgcccggacggaggaacatcgtcatcagccggcaggcggattattgcgcggcaggcgcggaaacggcggcaagtttggaggcggcattggcattgtgcgccagcgcggaagaagccgtcattatgggcggcgcgcagatatacggccaagcgatgccgttggcgaccgatttgcggataaccgaagtggatttgtctgtggaaggagatgcatttttccctgaaatagaccggacgcattggaaagaagcagagcggacggaacgccgtgtcagcagcaaaggcacgagctatgcttttgtgcattatttgagatattga

SEQ ID NO: 40382 - DNA, 213 bp, Neisseria meningitidis
atggagttagaaacggtcgtgccgccggaggaaggtgagggcgaaggagagggcgcggatggggaaatgcccgaatatcttgaacttcatggcgggcgggaagatgatatttccgcaccttcgcaacccgaaccgccgacccgcaatatcaaaccgctgcttttcgggctgctgattgcctttttgggctatctgctcggtaagattttttga

SEQ ID NO: 40383 - DNA, 1152 bp, Neisseria meningitidis
atgagtaatagagaccaactttttaaagccccgccgtttgaaaaccacagcccgctgacctggtatcaggctgcctcacaactgcccaacttcatccgcgacgacgcgcaggctgccgccatcgaatacctcgatcggctttggaccgaattgatgatgttcaaacgcaaaagaaaccgttttttaggcaggagtttgcgttccccgcaagtccccaaagggctttatttctatggcggggtcggacgcggcaaaagctttctgatggacgcttttttcggctgcctcccttaccgccgcaaacgccgcgtccactttcatgcctttatggcagaaatccaccagaggctgaaaaccctgaaaagcgaaagcaacccgttgaaatccgttgccgccgagattgccaaagaaacccgcgtattatgttttgacgaatttcatgtcagcgatattgcggatgcaatgattttaggccgtctgctggaaaacctgcttaacgagggcgttgttttggtggcgacttcaaactacgcgccttccgaactctacccgcaaggtcaaaaccggagcagttttcttcccacaatcgcgctcatcgagtccagcctgaccatcttaaacgttgacggcggtgaagactaccgactgcgtaccctccgccccgccgagattttctttacgcctgccaatgaagaaaatgaggcaaaactggcaaaactgttcaaagaaatgacaggcattaccgatttgaaccccggcatcagcaccatccatggtcgagagattccccacaaagccgagtccggctgtgccatatggtttgatttccgcgcactgtgcttcggcccccgctcacagtccgactatctgtatttggccgaacattatgaaatggtttttatttcaggtttggaacaactctcaccgcaagaaaaggcggaggcgcggcggctgacttggctgattgacatactctacgatttccgggtcaaactgtgtgccaccggcgcggtagatgtcaaccatatctatacggaaggcgattttgccgaagaatttacccgcaccgccagccggatggtcgaaatgcagtccgaagtttatttggaacagccgcacctgaccctatctcccaaggcttcaggcggataa

SEQ ID NO: 40384 - DNA, 456 bp, Neisseria meningitidis
atgcataaaattccaaaaggaacggcactggcattcgacttcggcgaagcgcgtatcggcgtggcacaaggagacgcggaattagggctatcccatcctttgagcaccgttaccggcggcagcaacgatgaaaagttcgcggcaatcgccaagctggttcaagaatggcagccgcgttattttgtcgtcggactgcccgtgcataccgacggcacgaaacatgaaatgacgcacctgtcgcgcaagttcggacgcaggctgaacggcaggttcaatctccccgtctattgggttgacgaacggctgtcgtccgtctatgccgaaagcctgctttcggaagcacaggtcttcggcaaaaaacgcaaatcggtgctcgaccaagtggcggcgcaagccatcttgcacggttttttcgagggcggtccggcggaatgtttcaacgggcgtgagggttaa

SEQ ID NO: 40385 - DNA, 1053 bp, Neisseria meningitidis
atgaaaccgacttaccaagacatcaaagccgccgcgcgttaccgctggcaggagatacacgccgccataggcatagcccctaagtttttacgcaacaaacaccagccttgccccgcgtgtggaggcgaagaccgcttcagatacgacgacaaggacggcaaaggcacattcatttgcacccattgggagaacggagcgggcgacggtttcggcttggttatgcactttctaggttgcgattttcagacggcattaaagcaggtttcgggcattttcggcatggacgagacaaaccccttaccgataccgccaacgcgcccacagcttcaaccacgccccgaaaaagaccatatcggcaaacttgccgcattgtgggacgaagcagagccgttaacgcccgattgccccgttgtccggtattgggcggggcgcggtttgaccgtagcacggcttcccgaaaacatccgccatcatgcaggcatggaatattggacgcagggggaggacggcaaaccgctgttcatcgggcgtttccacgcggcaatagcggcttccacacgcggcagcactgtttgcggtttgcacattacctatctggaagcacaacggggcggcggctttgccaaagcgcggattaagcacccccaaacgggcgaagcattgcccgccaagaaaatgagaagccgcaaacagggcgcaatgacgggcggggcggtttacctgttccccgtccctgaaaacgggcggctgatggtatcggagggcatagagaccgccttagccgcgcgtgaactgttcaacgcccatgattggggcttatgcgccgccctaagcgcaaacggtatgaagcggctggagctttcagacggcattaaagagcttgccgttattgcagaccacgacgcaccgcgccccgtaggggaaacggcggcattaagcctggcaaaacgcgcccaaagcggcgggatagccgtccgatactggataagcggcacggcgggctatgacgcgctggacgaattgaacgaccgcaaacgcagcggcaaggcgtaa

SEQ ID NO: 40386 - DNA, 561 bp, Neisseria meningitidis
atgccgacagcttttgcatacaatgcacgcatcccgaatagcgacacagatgctgttcagacataccgaaaaccaagttacggaaagagagatattatgcaaggcaatcaagctgttgttgattatatgaacgaattgctgtctggcgagctggcggcacgcgaccaatactttatccactcccgcctctactccgaatggggctacaccaaactttttgaacgtctcaatcacgagatggaagaagaaaccacacacgccgaagacttcatccgacgcatcctgatgctgggcggcacgccgaaaatggcacgcgccgaactgaatatcggcacggacgtggtttcctgcctcaaagccgacctacaaaccgaatatgaagtacgtgatgcgttgaaaaaaggcatcaaactgtgcgaagaggctcaagactatgttacgcgcgacctgatggttgcccaactgaaagataccgaagaagaccacgcccactggctggaacagcagcttcgcctgatcgagttaattggcgaaggcaactactaccaaagccaactgtaa

SEQ ID NO: 40387 - DNA, 162 bp, Neisseria meningitidis
atgcctgcgacagcggtttccaaccatttgagccgactgcgcgtggaaggtctggtggactttacgcgttaccaccgcattatcgaataccgcctgatttccgaagacgcggcaacgattctgcggacaatccgcgatttggaaaacaaacgcgcggtatag

SEQ ID NO: 40388 - DNA, 1761 bp, Neisseria meningitidis
atgatcttaagaaaatttcaaattaaaaatttccgatctcttattaacgttaatgttaaatttattgataatctacctattgtaattagtggtgaaaataatattggtaaaactaattttttaagagctttaaacgtatattttaatcatattcatgataaaaatttataccatgctgaaactgatattccacatcacatatattatggttcgcgaggaggaagaaccaagacagaattaattggggaatttgaaaatcacggtaaaattataaaacttttagtacgttttgatgcaaaaggtaactcttcatacaaattagattccaaagatattaatgataacaaagcctttgaatttttatcagaatttaaatttatatttatagaatctcataacatacatttaccaagcctcattggagctattctagaaaaagacggcttactagctttggataaaaaacgtacaaaacaaagtcgtcctttagaaaaattggaagagtttatagatctatctagacaagccatcaccgacattgagaatgacataaaccattgctttaaagaacttactgattttgatggaattttgaaagaggctaaaattctaataaactttgcagaatttgatagattgagagatgtaattcgcacaatgacatccatcactctacaagacggcaataatcatgaaattgaatctaaaggtagtggagctcaaagagcagtttttctttcgttaatgaaatatatttcaaaaaatattaaaaataaaaaaattatttgggcaattgatgaaccagaagcatttttacaaccaaaattacaaagaaaagtatttgaaactttgcaatcaatgtgtaaagaagataagcaaacaattatactcactacacactcacaacattttattaacttaagaaatattgatacggttaatttatttatagggaattctgaacctaaggagtatgaaagacgacctggtaaaatattttatgaaataaacactcaaaatattgcttttacctctacatccgaaaagatcaaagcaattaaagaacatttaggaattaacaataatgacggatgggagcttttgccatttaatgtcttagtagaaggagaggaagacaaaaaatacttagaaaaactgatggaagccgtagatattgaaattccaaacattatctgcgctggaggagcaaccaaaattgcaggatacttgcaatattataatgatttcgccaaagataacccctttccagaaaaaccaaaaattttatgtatttttgataatgataaaaagggaagagaatctaaatcaaaaatcaatcctaaaaaattaacctctctggaaatccaaagcattcttattcctagacatgactacaccattttggatgataatcctaggaactttagtggacaatctcaaaactgggcaatagaagattttttatctcctgtcctaattatagaaactgcaaataatttactacggaaagacaaatataaaatcattggaaaaaaacagataaacgttcgaaatcaagttgcacatagaaataaaattattctcgaatatctttcagagtgcacctcacaaaataatcctgacaaggatgattacctttggggctcagatggaagaaaaatagctctatgtaaatctttctgtgataatcaaactccagaaaaaatacttgaacatctgaatcaaaatcaaagagattttttaaataaattaaaaggttaa

SEQ ID NO: 40389 - DNA, 927 bp, Neisseria meningitidis
atgaaagtcatcttcgccggcacgcccgattttgccgccgccgccttaagagccgttgccgccgccggttttgaaattccgctggtgctgacccagcccgaccgtccgaaagggcgcggtatgcaactgactgccccgcccgtcaaacaagccgcgctggaactcggtttgcgcgtcgaacagcccgaaaaactgcgtaacaacgccgaagccctgcaaatgctcaaagaggtcgaggcagacgtaatggtggttgccgcctacggtttgattctgccgcaagacgtgttggatgcgccgaaacacggctgcctcaatatccacgcctcgctgctgccccgttggcgcggcgcggcgccgattcagcgcgcgattgaggccggcgatgccgaaaccggcgtgtgcattatgcagatggatgccggtttggacaccggtgatgtggtcagcgaacaccgctacgccatccgacctaccgataccgccaacgaagtccacgacgcgctgatggaaatcggtgcggcggcggttgttgccgatttgcaacagcttcaaagcaaaggccgtctgaacgcggtcaaacagcccgaagaaggtgttacttacgcccaaaaactaagcaaagaagaggcgcgtatcgattggagcgaaagcgcggcggttatcgaacgcaaaatccgcgccttcaaccccgtgcctgccgcgtgggttgagtatcagggcaagccgatgaaaatccggcgggcggaagtggtggcgcaacaaggcgcggcaggcgaagtgttgtcctgttcggcggacggtttggtcgttgcctgcggcgaaaacgcgctgaagattaccgaattgcagcctgccggcggcaggcgtatgaatatcgcggcgtttgcagcaggacggcatatcgaagcagggacgaagctgtaa

SEQ ID NO: 40390 - DNA, 330 bp, Neisseria meningitidis; identical to SEQ ID NO: 39814

SEQ ID NO: 40391 - DNA, 1386 bp, Neisseria meningitidis
atgatggcaagagataaccgcatccaaatgtttccgcacgaatggcgcgccagtacgacgctttccggcgtgtacgcgctgcgtatgctgggtatgttcctcgtgctgcccgtattggcggtgtatgccgcctcgctgcccggcgcggaaggcaacaaaacgctggtcgggctggcaatgggcatttacgggctgacacaggctctgctgcaactgcctttgggcatcgcttccgacaagttcgggcgcaagaaaaccatttatgtcgggctgattgtgtttgcagcgggcagcttccttgccgccgccgccgatacgctgcccatgctggtcgccgcacgcgccatacagggtgcgggagcggtcagtgcggcggttaccgcgctgctggcggatttgacgcgcgacggcgtacgtacccgcgcaatggcgatgatcggtttgagtatcggtctgacgttttcggtcagcctcgtcgttgcccctgtgattgccgacgcggtgggcgtacgcggcttgttcctgctgaccggtattttgaccgttgccagtatcggcgtggtggcgtggatgactcccgacccggaggtttccaagctgcacgaagatacgcaggcgcagccttcgcgcataggcgaagttttgaaaaaccgtaggctgctgacgctcgatttcggcattttcgctctgcacgccgcgcaaatggcattgtttaccgcgctgcctttcgcgatgacccagctcggtttggaaaaaatccagcattggaaagtctatctgccctcgaccattacgggcttggtggtgatggttccgctgattattgtcggcgagacgcgcaacaagctcaaacaggtttttgttttgggcatcgtctgcatcgcggcggcgcagctcggtttgctgtccggtatgcgctcggtaggcttgattaccgcttatttggttgtttactttatcggtttcaatgtgttggaagccagcctgccgtctatggtttccaaaatcgcgccgtccgacctgaagggtacggcgatgggcgtgtacaacacgatgcagtcgctcggactgtttgccggcggcgcggcaggcggcttgctgtttcaaaaatacggcttttccggcgtatttgccttttgcagcatattgatgctgctgtggctggtaattgccgttttatcgcctgcgcccaagcccgtcaaaaacctcagttaccctgtcggcggcgtgtggcagggcaatcaggaagggttataccgcgccttgtcggagcttgagggtgtggaagacatcggtttcagtttcgacgggcagaccgtctatctcaaagtgttgcagaagggtttcgatcaggctgccgctgaaaaaatcatcacaggagtttaa

SEQ ID NO: 40392 - DNA, 747 bp, Neisseria meningitidis
atgccctcggcggatcctatgtgccggactgccgcaaatcatcccttttcccgaaaaatatttgacttcaaactgcctatgaaccacgacatcactttcctcaccctgttcctactcggtttcttcggcggaacgcactgcatcggtatgtgcggcggattaagcagcgcgtttgcgctccaactccccccgcatatcaaccgcttttggctgatcctgctgcttaacacaggacgggtaagcagctatacggcaatcggcctgatactcggattaatcggacaggtcggcgtttcactcgaccaaacccgcgtcctgcagaatattttatacacggccgccaacctcctgctgctctttttaggcttatacttgagcggtatttcttccttggcggcaaaaatcgagaaaatcggcaaaccgatatggcggaacctgaacccgatactcaaccggctgttacccataaaatccatacccgcctgccttgcggtcggaatattatggggctggctgccgtgcggactggtttacagcgcgtcgctttacgcgctgggaagcggtagtgcggcaacgggcgggttatatatgcttgcctttgcactgggtacgctgcccaatcttttggcaatcggcattttttccctacaactgaaaaaaatcatgcaaaaccgatatatccgcctgtgtacgggattatccgtatcattatgggcattatggaaacttgccgtcctgtggctgtaa

SEQ ID NO: 40393 - DNA, 2301 bp, Neisseria meningitidis
atgcaccgaccgaccgccaaacagattctgcacgaagtatttggttatcccgaatttcgcggcaggcaggaggctgtcatcaatactttggcaggcggcgggagtttgatggtgctgatgccgacgggcggcggaaagtctttgtgttaccagattcccgcgctgatgcgcgaaggcgtggcggttgtcgtatcgccgctgattgcgctaatgaacgaccaagtggccagcctgcatgtggccggcatcgaagcggcggcagtcaacagcggcacatcggcagatgaggcgcacgagattgccgacaagcttgcccaaggccgtctgaaactgctttatgtcgcgccggaacgcctagttaccgaccgctttttgcgttttctcgaccaacaaaccgtcagcctgtttgccattgatgaggcgcattgcgtcagccaatggggacacgatttccgccccgaataccaacagctcggcatgcttgccgaacgctatccgaacgttccgcgcatcgccctgaccgccaccgccgatgtcgccacgcgcgccgacatcaaacattatctgcacttggacgatgcgcccgaatttatttccagcttcgaccgcccgaatatttattatcaggttatcgaaaaaaacaacggcaaaaaacaactgcttgaatttatccgcaaagaaatggcggggcaaagcggcattgtgtattgcctaagccgcaaaaaggttgaagatgtggcgcagtttttgcgtgaaaacggattaaacgcgattccgtatcatgctggtttgagcatggacgtgcgcgaggaaaaccaacgccgctttacgcatgaagacaatattatcgtggtggcgaccgtggcgttcggcatgggcatagacaaacccgacgtgcgctttgtcgcccatctcgatatgccccagagtgtcgaacatttctatcaggaatcggggcgtgccggccgggacgggctgcctgccgcgagctggctgtgttacggtttgaacgattgggtgttgctgcgcgaacggattgccgaaggcaacagcgacgaggtgcaaaagcaaatcgaaatgcaaaaactcgatgccatgctttccgtctgcgaaaccgccgcctgccgccgcgtactgctgctcaaacatttcggcgaagaatccgaaccctgcggccattgcgacaactgcctgcatccgcccgtacggtttgacggcacggtgttggtgcaaaaattactcagctgcgtgtaccgcgccggacaacgttttgccgccggttacattaccaaccttttgcgcggcaaaagcgacgattggatacgcggcaaccggcacgaacaactgtccaccttcggcatcggtacggagttgtccgacaaagaatggcgcagcgtcatccgccagtgtatcagcctcggctacctcaccgtcaacattacccgatatcaggcattgcaactgaccgaagccgccaaaaaagtcctcaaaggcgaaaccgaagtgatgctgcgtccgctcaagcgcgacaagcccgccgcccgcaccctcaaagacaactggctgcgtaccgaacgcgaagaacgcctgtggcaggcattgcgcgtttggcgtatgaaacaggcagaagccgaagtcatccccgcctatatgattttcggcgacaaaaccctgcgcgaccttgtcgaaaaaatgccgcaagacctcaacggactgcacgacatctacggtttgggcgaagccaaaatcgaccgtttcggacacggcatcctcgaagtctgccgcaacaccgccgactttagccacaatgccgtcatccgcccgcaaaccgaacgcgaacaacaactgcgtcaaaaactcgaagcctggcggtatgaacaggcaagggcggaaaactgcgccctgcataccgtcctctccgacgaaagccttgccgatatgcttgccgatacgcccgaaaccgaaaccgacctcgaaggcgtacacggcttgggcagcgtacgcgccgccaaatacggacgggacatcctcgccgtctgccgtccgttttcagacggcatcgatgaagccgccaaacacaaacgccgcctgatgcgcgccctgattcaatggtgcaacgaaacggcaaaacacgaacagtccgaaccctaccgcattctcagcaaagccgccctgcgcgccattgccgccaaacagccggaaggtttggcggagcttgccgccgtatacggcgtaggcgaagaaaaagccgcacgttacggtgcggcggtgttggcggtgttggaacggaatgccgtctga

SEQ ID NO: 40394 - DNA, 372 bp, Neisseria meningitidis
atgagaaaaccccaacgcggctatgcccgccaagaccgtgtcaaagaacaaattatgcgcgagcttgccgaactcgtccgtaccggactgaaagacccgcgcgccggcttcatcactatcaacgaagtcgaagttacccgagattacagccacgccaccgtgttctacaccgttttgaaccaagatgcgcgcgaaattacggaagaagtgctggaacacgcgcgcggacacctccgcagcgaattggccaaacgcatcaagctgttcaaaatccccgagctgcatttcaaatacgacgagtccttggaacgcggtatgaacctgtccgcccttatcgaccaagtggcggcggaaaaaccggttgaagactga

SEQ ID NO: 40395 - DNA, 864 bp, Neisseria meningitidis
atgaacaaattttcccaatccggaaaaggtctgtccggttttttcttcggtttgatactggcgacggtcattattgccggtattttgttttatctgaaccagagcggtcaaaatgcgttcaaaatcccggcttcgtcgaagcagcctgcagaaacggaaatcctgaaaccgaaaaaccagcctaaggaagacatccaacctgaaccggccgatcaaaacgccttgtccgaaccggatgctgcgacagaggcagagcagtcggatgcggaaaaagctgccgacaagcagcccgttgccgataaagccgacgaggttgaagaaaaggcgggcgagccggaacgggaagagccggacggacaggcagtgcgtaagaaagcgctgacggaagagcgtgaacaaaccgtcagggaaaaagcgcagaagaaagatgccgaaacggttaaaaaacaagcggtaaaaccgtctaaagaaacagagaaaaaagcttcaaaagaagagaaaaaggcggaaaaggaaaaagttgcacccaaaccgaccccggaacaaatcctcaacagcggcagcatcgaaaaagcgcgcagtgccgccgccaaagaagtgcagaaaatgaaaacgtccgacaaggcggaagcaacgcattatctgcaaatgggcgcgtatgccgaccgccggagcgcggaaggacagcgtgccaaactggcaatcttgggcatatattccaaagtggtcggttatcaggcgggacataaaacgctttaccgcgtgcaaagcggcaatatgtctgccgatgcggtgaaaaaaatgcaggacgagttgaaaaaacatgaagtcgccagcctgatccgttctatcgaaagcaaataa

SEQ ID NO: 40396 - DNA, 1671 bp, Neisseria meningitidis
atggaaaaaatctggttagacagctacgagaagggcgtcagtgccgaaatcgacatcacgcaatacaattccgtcagcgacgtattccgccaaagcgtggaaaaatttgccgaccaacctgcttttcaaaacatgggcaagacgctgacttatgccgaaaccggcaaactggcaacagattttgcttcttatctgcaaaacgtccttaaattgcctcgaggagagcgcgtggcaataatgttgcccaatgtactgcaatatccggttgcccttttcggcattttgcaggcaggtttggtggcggtgaacaccaatccgctctatacaccgcgcgagttggagcatcagctgaaagacagcggcgcgaccgccatcatcgttttggaaaatttcgccaacacgctggagctggtgctgccgcgcacgcagatcaaacacgttatcgtcgcctctgtcggtgaaatgttcgggctgcttaaaggttcgctgattaatttcatcatccggaaaatcaagaaaatggtgcccgaataccgtattcgggaaaccgtttcctttcagacggcattgaaagaaggggcgaagcacgttttccaacctgtcgcattaaaccgcgaagataccgcgctgttgcaatacacgggcggcacgacaggtgttgccaaaggggcggtgctgagtcacggcaacatctgcgccaatatgcttcaggcaaaagaatggattaaaaaccagttgcgcgagggaaaagaaaccgttatcgccgccttgccgctgtaccatattttcgccttaaccgtgaatctgatgatttttgccaatgccggctcgaaaatcatcctgattaccaacccgcgcgatatgaaaggctttatcggacaactgaaaaaacagcgggttaatgtatgtatcggcgtgaacacactgtttaacgcaatggttaaccgtcctgattttgccgaagtcgatttttcaggattgcggctgactttgggcggcggtatggcgacccaaaaagccgttgccgaaaaatggaaaaaaatcaccggcacgcccatcgtcgaagcctacggtctgaccgaagccagccccggcgtgtgctgcaaccccttaaacatcgaatcatacagcggcagcatcggtttgcccgtctcgtccaccgaagtcgaactgcgcgacgcaaacggcaaagaagtccccgtcgggcagccgggcgaattgtgggtaaaaggccctcaagtgatgcaaggctactggaaccgccccgaagaaaccgccaaagccatagacgcgcgcggcttcttggaaaccggcgatattgccgtcatggacgaaaaaggctggttgaagctggtcgatcgtaagaaagacctcgtcgttgtttccggattcaatgtttatccgaacgaaatcgaggaagtcatcgcgcatcacggcaaagtgatggaagtcgcctgtatcggcgttcccgacgaaaaaaccggagaagccctaaaagtatttgtcgtcaaaaaagacccgtcattgaccaaagaagaacttatcgccttttgccgcaccgaattaaccgcatataaagtaccgaaaaatatcgaattccgagacgagttgcccaagtccaacgtcggcaaaatcctgcgccgcgagttgcggcaaagtaccgggaaataa

SEQ ID NO: 40397 - DNA, 606 bp, Neisseria meningitidis
atgacccgtcaatctctgcaacaggctgccgaaagccgccgttccatttattcgttaaataaaaacctgcccgtcggcaaagatgaagttgtccaaatcgtcgaacacgccgttttgcacacaccttcttcgttcaattcccaatctgcccgcgtggtcgtgctgtttggcgaagagcatgataaggtgtggcaatttgtcgaagacgcgctgcgtgccgtcgtgcctgccgacagttttgaaccgaccgcgcaaaaattgaacctgtttaaggcgggtgcggcaaccattttgttttatgaagatcaaaatgtcgtcaaaggtttgcaggagcagttccctgcttatgccgccaactttcccgtttgggcggaccaggcgaacgcgatggtgcagtatgccgtttggacgacacttgccgcggtcggcgtaggtgcaaacctgcaacattacaatcccttgcccgatgcggcgattgccaaagcgtggaatatccccgaaaactggttgttgcgcgcgcaaatggttatcggcggtattgaaggggaggcaggtgaaaagacctttgaacccgttgcagaacgtttgaaagtgttcggcgcataa

SEQ ID NO: 40398 - DNA, 657 bp, Neisseria meningitidis
atggattttgaaaaagcgcggttcaatatggtcgaacagcaaatccgtccttgggatgtattggattttgacgttttggacgctttggcggagattccgcgcgagctttttgtcgatgaggacttgcagggtttggcgtatgcggatatggagctgccgcttgccaacggtcataagatgctcgagccgaaagtcgtggcgcggctggcgcagggcttgaagctgacgaaaaacgatacggttttggaaatcggcacgggttcgggctatgcgaccgcgctgttggcaaaattggctggtcgtgtggtgtcggacgacatcgatgccgaacagcaaaaccgcgccaaagcggtgttggacggcttgggtttggacaatatcgattatgtgcaaaacaacgggttgaccgaactttccgcaggtgcgccgtttgatgcggtttacgtcggcggtgcggtcaatattgtgcctgatgtgttgaaacaacagttgaaagatggcggacgcatggtggttatcgtaggccgcaagcctgttcagcgcgcgcttttgattacgcgcaagggcgatgtgtttgaagagaaggtgctgttcgataccttggtggcgcatttggacgataaggataccgatccgtttggcggtttcgatttttaa

SEQ ID NO: 40399 - DNA, 2751 bp, Neisseria meningitidis
atgctgacaaacattgccaagaaaatcttcggcagccgcaacgaccgcttgctgaaacaataccgtaaatccgttgccagaatcaacgcgctcgaagaacagatgcaagccctaagcgatgctgatctgcaagccaaaactgccgaattcaaacaacgcctcgccgacggtcagactttggacggcattttgcccgaagccttcgccgtctgccgcgaagcgtcccgccgcaccctcggtatgcgccacttcgacgtgcagcttatcggcggtatggtgctgcacgacggcaaaatcgccgaaatgcgtaccggcgaaggcaaaaccctggtcgccaccctcgccgtctatctcaacgcgctggccggcaaaggcgtacacgtcgttaccgtcaacgactacctcgcctcacgcgatgcgggcattatggagccgctctacaatttcctcggccttaccgtgggcgtgattatttcagatatgcagccgttcgaccgtcaaaacgcctatgccgccgatatcacctacggcaccaataatgaattcggcttcgactacctgcgcgacaatatggttaccgaccaatacgacaaagtgcagcgcgaactgaatttcgccgtcgttgacgaagtggactccatcttgattgacgaagcgcgcactccgctgattatctccggccaggcagacgacaacattcagttgtaccaaatcatgaacaccgttccgccccacctcgtccgccaagaaaccgaagaaggcgaaggcgactactgggtagatgaaaaggcgcaccaggtcatcctgagcgaagcaggtcacgaacacgccgagcaaatcctaaccaaaatgggattgctggcagaaaacgactcgctctattccgccgccaacatcgccctgatgcaccaccttatggcggcattgcgcgcgcatacgttattccacaaagaccaacattacgttatccaagacggcgaaatcgtcatcgtggacgaattcaccggccggctgatgtccggccgccgctggtcggagggtctgcatcaagccgtcgaagccaaagaaggcgtggaaatcaaacgcgaaaaccaaacccttgcctccatcaccttccaaaactatttccgcctgtacaccaagctctccggcatgaccggcacagccgataccgaagctttcgagttccaaagcatctacaacctcgaaaccgtcatcatcccgaccaaccgccctgtacagcgcaaagacttcaacgaccagattttccgttccgccgaagaaaaattcgaagccgtcgtcaaagacatcgaagaatgccacaaacgcgggcagcccgtcctcgtcggtacgaccagcatcgaaaactccgaactggtctcccaccttctgcaaaaagccggactgccacacaacgtcctcaacgccaaagaacacgaacgcgaagcgctgattgtcgcccaggcaggcaaagtcggcgcgattaccgttgccaccaatatggcgggacgcggtacggacatcgttttaggcggcaacctgaagcaccaaaccgatgccatccgtgccgacgaagccttgagcgacgaagagaaacaggcacaaatcgccgcactcgaaaacggctggcaggcagaacacgacaaggttatggaagcaggcggtttgcacatcatcggcacagaacgccacgaaagccgccgtatcgacaaccagttgcgcggacgctccggccgtcagggcgaccccggatccagccgtttctacctctcgtttgaagacccgctgctgcgcctattcgcactcgaccgcgccgccgccatcctcaaccgccttgcacccgaacgcggcgtcgccatcgagcacaacctgctgacgcgccaaatcgaaggcgcgcaacgcaaagtcgaaggcagaaacttcgatatgcgcaaacaggttctggaatacgacgacgttgccaacgagcaacgtaaagtcatttacagccagcgcaacgaaattctgaccagcaaagacatcagcgacctgatgcaggaaatccgttctgatgtcgtcagcgacctcgtggatacctatatgccgcccgacagcatggaagaacaatgggacatcccgactttggagaaccgtctggctgccgaattcagactgcacgaagacatccaatcctggctgaaggcggacaatgcgattgacggtcaagacatcaaagaacgcctgatcgaacgcatcgaaaacgaatatgccgccaaaaccgaactggtcggcaagcaggcaatggccgatttcgagcgcaacgtgatgttgcaggtcatcgacaaccaatggcgcgaacacctcgccgctatggactacctgcgccaaggcatacacctgcgcagctatgcccaaaaaaatccgaagcaggaatataaacgtgaagcctttaccatgttccaagacctgtggaacggcatcaaattccatattgcctccctgcttacctcggttcaaatcgaacaaaaccctgtcgcggcggttgaagagcaacccgtcggcaacatccagtccatccattccgaatcgcccgatatggaagaacttttgggtcagtcgcaaaccgatctggttaccgaagcctttaatcccgatgggacggatttcagccccgaagccttggaagcgcggggacaaatcgtccaccgcaacgacctctgcccctgcggcagcggtttgaaatacaaacaatgccacggcaaactggcttga

SEQ ID NO: 40400 - DNA, 279 bp, Neisseria meningitidis
atgcttgaaattgagattgtgtacgggctgcccgaccgacaggttttgaaaaccatgcagcttgccgaaggaacaaccgtccgcgccgccgcactgcaaagcggtttggacggcatatttgaagatttaaacctgcattccgcgcctttgggcattttcggcaaagccgtcaaagacgacacgccgctgcgcgacggcgaccgcatcgaagtgtaccgcccgctgttgatcgaccccaaagaagcgcgccgcaaacgcgttcaaaatcaagaagaataa

SEQ ID NO: 40401 - DNA, 381 bp, Neisseria meningitidis
atgagtaaatctacaatcggatacaaaatggtacaattgcttgcaacagaagcagaccggctaataggtgaaaaaatccgacaacgacgaaaagagttgggctattctgcagaaaagctggcggaacacatcaatctttctcaacagcagatttcacgctacgaacgtggcgtaggtaaaattaatatttcgcacttagtcgatattgccgtttttctggaaacaccgattgcttggtttttccaagattgcctgcccaaaccactgacggtagcctgtactcctgagaacacacccgaacagcaatggcacagccttaatccaaaccaaaaagctgcctttgccgcctttttggatactttaaggaataaagaaacatga

SEQ ID NO: 40402 - DNA, 975 bp, Neisseria meningitidis
atgccgtctgaaaacaaaattgcatttatgcaaggttccccgcgcccgttatgggcggcattcgcactcttactgatctgctgcggactgtttttaacgctcaacgtcaaaggcgattgggattttgttttgcaactgcggctgaccaaacttgccgcgctgctgatggtcgcctatgcggtcggcgtgtccacgcaactcttccaaacactgaccaacaatccgattctgaccccttcgattttgggtttcgattcgctgtatgtgtttttgcagaccttgctggtgtttacgttcggcggcgtgggctatgcttccctgccgttgacgggcaaattcggctttgaacttgccgttatgatgggcggctcgctgctgctgttttacacgctcatccgtcagggcggacgcgatttgccgcgtatgattttaatcggcgtgattttcgggattttgttccgcagcctgtcgtcgctgctttcgcgcatgatcgaccccgaagaatttacggcggcgcaggcgaatatgtttgccggattcaataccgtccacagcgagcttttgggcataggcgcgctgattctgctcgtcagcgcggcggtcgtttggcgcgaacgctaccgcttggacgtacaccttttggggcgcgaccaagccgtcaatttgggcatcagctacacgcgcaacaccttgtggatactgctttggattgccgcattggtggcgacggcgaccgccgtggtcggcccggtaagctttttcgggcttctcgccgcctcgcttgccaaccacttttccccgtccgtgcgccattccgtccgcctgccgatgacggtttgtgtcggcggcatcctcctggtcggcggacagaccgtattcgaacacttcttgggcatgaaggcggtattaagcgtggtggtcgaatttgcgggcggactcgttttcctctatctcgttttaaaacacaaaaaatga

SEQ ID NO: 40403 - DNA, 822 bp, Neisseria meningitidis
atgatgaaaggtatggataaattgagataccaacaggattttttaaatatccgccccatttttacagccggcgaacaagaatacctgaccgaattgtccgatcggcttcctttatctgttttaacggactccgtgcgtaatattgaagaaatcggtatcgattttgtgtacagttctgccaaattggaaggaaacacttataatcaatacgatacgcaggcattgcttaaactcgggcaaaccgcaggcgggaagttatattcggatgccgtaatgttaatcaacctgagggaaagttaccggcacctgctgtccggtttggacagccccgatccgtttgactggttggatttcttaaaaaccacccacagcctgatttcggaaaacttactggaaaaaggctctggcggcgtagtccgccgcgacagcgttaccataagcgggacagactacacccctttatccaacccgcaaagtttggatacggaattaaaatggttgcttcaagaagcccccaaaatagaaaatcctttcgaccgtgccatttatctccataataatttggcgtatctccaatattttaaggactgcaataaacgtactgccagaaactgtatgaccttgtcgctgatgcgctccggtttttttccttgcgtattcgcccccgacagttatcccgcctatgccgaggctgtcgtagcctattacgaaaccggcgattacggtttattcaagaaatattttatttcggcatacgaaaataccgtaaataagtacggcccacagcctgatatggatattttccgcaacttctccctttaa

SEQ ID NO: 40404 - DNA, 210 bp, Neisseria meningitidis
atgactgaatcgcggcaaacacgccttcaagtcaaatgtccgacctgtcaaacggcagtagtatggaaaccggaaaacgcattccgccccttctgttcgcaacgctgcaaactgatcgacttgggcggatgggcagacgggaaatatacggtttccagccaaacggaaagtttgccggaaatatccgaacccgacatggcataccgctga

SEQ ID NO: 40405 - DNA, 543 bp, Neisseria meningitidis; identical to SEQ ID NO: 40003

SEQ ID NO: 40406 - DNA, 1596 bp, Neisseria meningitidis
atgtcccaagaaatcctcgaccaagtgcgccgccgccgcacgtttgccatcatctcccaccccgacgcgggtaaaaccacgctgaccgaaaagctgttgctgttttcgggcgcgattcagagcgcgggtacggtaaaaggcaaaaaaaccggcaaattcgccacctccgactggatggacatcgagaagcagcgcggcatttccgtggcatcaagcgtgatgcagttcgactacaaagaccacaccgtcaacctcttggacacgccgggacaccaagacttctccgaagacacctaccgcgttctgaccgccgtggacagcgcgttgatggtcatcgacgcggcaaaaggtgtggaagcgcaaaccatcaaactcttgaacgtctgccgcctgcgcaatacgccgattgtcacgttcatgaacaaatacgaccgcgaagtgcgcgattctttggagttgctggacgaagtggaaaacatcctgcaaatccgctgcgcgcccgtaacctggccgatcggcatgggcaaaaacttcaaaggcgtgtaccacatcctgaacgacgaaatctatctctttgaagccggtggcgaacgtctgccgcacgagttcgacatcatcaaaggcatcgacaatcccgaattggaacaacgctttccattggaaatccagcagttgcgcgacgaaatcgaattggtgcaggcggcttccaacgagtttaatctcgacgaattcctcgccggcgaactcacgcccgtattcttcggctctgcgattaacaacttcggtattcaggaaatcctcaattcattgattgactgggcgcccgcgccgaaaccgcgcgacgcgaccgtacgtatggtcaagccggacgagccgaaattctccggatttatctttaaaatccaagccaatatggatccgaaacaccgcgaccgcatcgccttcttgcgcgtctgctccggcaaattcgagcgcggtatgaagatgaaacacctgcgcatcaaccgcgaaatcgctgcctccagcgtggtaacctttatgtcgcacgaccgcgagctggtggaagaagcctacgccggcgacatcatcggcatcccgaaccacggcaacatccaaatcggcgacagcttctccgaaggcgaacaactggcgtttaccggcatcccattctttgcgcccgaactgttccgcagcgtccgcatcaaaaacccgctgaaaatcaagcaactgcaaaaaggtttgcaacagcttggcgaagaaggcgcggtacaggtattcaaaccgatgagcggcgcggatttgattttgggcgcggtcggcgtgttgcagtttgaagtcgttacctcgcggctggccaacgaatacggcgtagaagccgtgttcgacagcgcatccatctggtcggcgcgctgggtatcgtgcgacgacaagaaaaaactggcggagtttgaaaaagccaacgcgggcaacctcgccatcgacgcgggcggcaacctcgcctacctcgcccccaaccgcgtgaatttggggttgacgcaagaacgttggccggacatcgtgttccacgaaacgcgcgaacattcggttaaactgtaa

SEQ ID NO: 40407 - DNA, 216 bp, Neisseria meningitidis
ttggatgcgggcgaatttagccatttccgtatcaatcacagcacacattttgccgaacgacaaaaccatattaatggaactgagaacttttggaatcaagcaaaacgtcatttacgcaagtttaacggcattcccaaagcgcattttgagctgtatttaaaggagtgcgaatggcgttttaacaacagtgagataaaagttcttgttccattttaa

SEQ ID NO: 40408 - DNA, 666 bp, Neisseria meningitidis
atggcagtattaagcaaagagcaggttctatccgcatttaaaaaccgcaaatcatgccggcattacgatgcggcacgtaaaatcagtgccgaggattttcagtttattttagaactcgggcgtttgtcgcccagttcggtcggttcggagccttggcagtttgttgtggttcaaaaccccgaaatccgacaggcaatcaagccgttttcttggggtatggcggatgctttggataccgccagtcatttggtggtgtttttggcaaagaaaaatgcccgcttcgacagcccgtttatgttggaaagcctcaaacggcgcggcgttaccgaaccggatgccatggcaaaatctttggcgaggtatcaggcgtttcaagccgacgacatcaagattttggacgattcgcgcgccttgtttgactggtgttgccgccagacctatatcgcgttgggcaacatgatgacgggtgcggcgatggcaggtatcgattcctgcccggtggaaggtttcaactatgccgagatggaacgcgtattgtccgggcagttcggtttgttcgatgcggcagaatggggcgtgtccgttgccgcgacattcggctaccgcgttcaggaaatcgccacgaaagcgcgcaggcccttggaagaaaccgttatttgggcataa

SEQ ID NO: 40409 - DNA, 516 bp, Neisseria meningitidis
gtggtcgttgtaacgccaaaaacgcaacatctacaatacaccgaaagcaatgggatagcaattaaaaccgtacaccgccgcaccagtttcgacagctgccgcgcaacagcaggcaaaaaatcacggtttgacgtggaaagcggcgcaaatttcgacaaaacggtcgaactgccgattgaggatggggatgggaaaattggcgtagttgccgaaccctccggttctgggaaaaccggtatcggtaaggctcgagagctttacgcgccgacttgtgcgggcggcaagccgatagccgatgaaatcgcgcctgataaggcatttcacgaagtaacggcggcattgtcggcggccggtttgggcagcgtccccgtccggctgcgcccgtacacgccccgacatgaaagaagcgcgtgccgccgggatggtcgtattgcccgaatggcagggtatcggcatcggcacacggtttttaaacacccccagcgaaatgcggtaccgaggcggaaaccgctataa

SEQ ID NO: 40410 - DNA, 642 bp, Neisseria meningitidis
atggcagtgaaattaccgaacggtgcgaccgttcacattgcgaccgctttggcggcggagaaaaaagctacggtggcaactaatgctgccgaatgcgtcctgacggtagcaggacacgggtttgccaacggcgatttggttttgtttaaaagcggctggggaaagttgaatgaacgcgttttccagattggcgatgtcaaagccgatacattcaagctgaccggcattgatacttccaatgcagatgagtttccggcaggcagcggtattggtgctgttcagaaaattaccgattgggtgcaagtttcgcaaattgtagaattttcgaccagtggcggcgagcagcaatatgtggattttggtttcctggaggacggttttgaccagcaaatcccatccacgaaatcagctatgtcaatgtcgattaagatcgctgacgatacttcgttgtccggctacaaggcggctgcaaaatgcagcgataaaggcggcaagtggcctttgaaagtggttttgaaaggtggtgggctgatttgctataacggttatcccagcatgaataaaacccccgaattggttcgtaaccaagtaatggcggtaacgttgtcctacgccatttccggcgaagtaaaccgttattga

SEQ ID NO: 40411 - DNA, 2298 bp, Neisseria meningitidis
atgcaaccgcacgctccacataccgattccaatacgctgatgctcggccgatacgccgaacgcgcctatctcgaatacgccatgagcgtggtcaaaggccgcgcgctgcctgaagtttcagacggccaaaagcccgttcagcggcgcattttgtttgccatgcgcgatatgggtttgacggcgggggcgaagccggtgaaatcggcgcgcgtggtcggcgagattttgggtaaataccacccgcacggcgacagttccgcctatgaggcgatggtgcggatggcgcaggattttaccttgcgctatcccttaatcgacggcatcggcaacttcggctcgcgcgacggcgacggggcggcggcgatgcgttacaccgaagcgcggctgacgccgattgcggaattgctgttgtccgaaatccatcaggggacggtggatttcgtgccgaactacgacggcgcgtttgacgaaccgctgcacctgcctgcacgtctgcctatggtgttgctcaacggcgcgtcaggcatcgcggtaggtatggcgaccgaaattccgccgcacaatttgaacgaagttacgcaggcagcgattgcgctgttgaaaaagccgacgctggaaaccgccgacctgatgcaatatattcctgcgcccgattttgccggcggcggtcaaattatcacgtcggcggacgaattgcgccggatttacgaaaccggcaaaggcagcgtgcgcgtgcgtgcgcgttatgaaatcgagaagctggcgcgcggacagtggcgcgtcatcgtaaccgagctgccgccgaacgccaattccgccaaaatccttgccgaaatcgaagaacaaaccaacccgaaaccgaaagcgggtaagaaacagctcaaccaagaccagctcaacaccaaaaagctgatgctggatttaatcgaccgcgtgcgcgacgagtccgacggcgaacatcccgtgcgactggtgttcgaaccgaaatccagccgcatcgataccgataccttcatcaacacgctgatggcgcaaacttcgctggaaggcaatgtgtccatgaacttggtgatgatggggctggacaaccgccccgcgcagaaaaacctgaaaacgattttgcaggaatggctggatttccgcgtcgttaccgtaacacgccgtctgaaattccgtttgaaccaagtggaaaaacggctgcacatcctcgaaggccgtctgaaagtctttctgcacatcgacgaagtgattaaagtcatccgcgaatcagacgacccgaaagccgatttgatggcggcgttcgggctgaccgaaatccaagccgaagacattttggaaatccgcctgcgccagttggcgcgtttggaaggtttcaaactcgaaaaagaattgaacgaattgcgcgaggaacaaggccgtctgaacatccttttgggcgacgaaaacgaaaaacgcaagctgattatcaaagagatgcaggcggacatgaagcagttcggcgacgcgcgccgcacgctggtggaagaagccggacgcgccgtgttgacgcaaaccaccgccgatgagccgatcacgctgattctgtctgaaaaaggttggatacgcagccgtgccggacacaaccttgatttgagccaaactgcgtttaaagaaggcgaccgcctcaaacaaaccctcgaaggccgcaccgttttacccgtcgtcatcttggattcactgggcagaacctacacgctcgatgccgccgaaatccctggaggacgcggcgacggcgtaccgatttcatccttgatcgagctgcaaaacggcgcgaaacccgttgcgatgttgacaggattgccggaacaacattatttattatcgggcagcggcggctacggcttcattgccaaactgggcgatatggtcggacgcgtgaaagcgggcaaagtggtgatgaccgcagacagcggcgaaaccgtcctgccgccggttgccgtctatgcctcctcgttcatcaaccccgactgcaaaatcattgccgccaccagtcaaaaccgcgccatcgccttccccatcggcgaattgaaaattatggcgaaaggcaaaggactgcaaatcatcggattaaacgccggcgaatcgatgacgcataccgccgtttcttccgagccggaaatcctgattgaaagcgaaggcaggcgcggcgcagcgcacaaagaccgcatccccatctccctgcttgaggcaaaacgcggcaaaaaaggcagactattacccatatcgggcagcctgaaacagctttcttcccccaaataa

SEQ ID NO: 40412 - DNA, 483 bp, Neisseria meningitidis
atgatgaaaaagatactggccgtatcggcactatgcctgatgactgcggcggcacgggctgccgatacttacggctatctcgccgtttggcagaatccgcagaatgcggacgatgttttgcaggttaaaactacaaaagaagattcgacgaaaagcgaagcgtttgccgagttggaagccttttgcaaaggtcaggacacgcttgcgggcattgccgaagacgagccgaccggatgccggtcggtcgtgtcgctgaacaatacctgtgtcgcgctggcatacccgaaagccttgggcgcgatgcgcgttgaaaacgccgttgtgattacttctccgcgttttacgagcgttcatcaggtcgcactcaaccagtgcatcaaaaaatacggcgcacagggacaatgcggcttggaaacagtgtattgcacgtcttcttcttattacggcggaactgtgcgctctttgattcaaaatctcaaataa

SEQ ID NO: 40413 - DNA, 330 bp, Neisseria meningitidis
atgggcagcctgattattgaagatttgcaggaaggcttcggaaaagaagcagttaaaggcaaagagattaccgtgcattacacaggttggctggaagacggcaccaaattcgactccagcctcgaccgccgccagccgctgaccatcacgctcggcgtcggacaagtcatcaaaggctgggacgaaggcttcggcggcatgaaggaaggcggcaaacgcaagctgaccatcccttcggaaatgggctacggcgcacgcggcgcgggcggcgtgattcctccgcacgccactttgatatttgaagtcgagctgctgaaagtgtacgaataa

SEQ ID NO: 40414 - DNA, 1359 bp, Neisseria meningitidis
atgaaaccactggacctaaatttcatctgccaagccctcaagcttccgatgccgtctgaaagcaaacccgtgtcgcgcatcgtaaccgacagccgcgacatccgcgtaggcgatgtgtttttcgcattggcgggcgggcggtttgacgcgcatgattttgttgaagacgtattggctgcgggtgcggcggcggttgtggtttcgcgcgaagattgcgttgcaatggatggcgcgttgaaagtcgatgacacgcttgccgcattgcaaacgctggcaaaggcgtggcgcgagaatgtgaacccgtttgtgttcggtattaccggctcgggcggtaagacgacggtgaaggaaatgttggctgcggtattgcgccgccgtttcggcgataatgccgttttggcgacggcaggcaacttcaacaaccacatcggattgccgttgactttgttgaaattaaacgaaaaacaccgctatgccgtgattgaaatgggtatgaaccattttggcgaactggcggttttgacacaaatcgccaaacccgatgccgcattggtcaacaacgccatgcgcgcccatgtcggctgcggtttcgacggagtgggcgatattgccaaagcgaaaagcgagatttatcaaggcttatgttcagacggcatggcgctgattcctcaagaagatgccaatatggctgtcttcaaaacggcaacgcttaatttgaatacgcgcactttcggcatcgatagcggcgatgtccacgcggaaaatatcgtgctgaaaccgttgtcgtgcgaatttgatttggtgtgcggcgacgaacgcgccgccgtggtgctgcctgttcccggccgccacaatgtccacaacgccgccgctgccgccgcgctgtctttggctgcgggtttgagtctgaacgatgtggcggaaggtttgcaaggcttcagcaacatcaaaggccgtctgaacgtcaaagccggcatcaagggcgcgaccctgattgacgatacctacaacgcgaaccccgacagcatgagggcagcgattgacgtgttggcgcgtatgcctgcgccgcgcatttttgtgatgggcgatatgggcgaactgggtgaggacgaagccgccgccatgcacgccgaagtcggcgcgtacgcccgcgaccaaggcatcgaagcggcttattttgtcggagacaacagcgtcgaagcggcggaaaaatttggcgcggacggtttgtggttcgccgccaaagacccgttgattcaagtgttgcgccacgatttgcccgaacgcgccaccgtgttggtgaaaggttcgcgctttatgcagatggaagaagtggtcgaggcattggaggataagtga

SEQ ID NO: 40415 - DNA, 468 bp, Neisseria meningitidis
atgcaggtatttctgacgattcccggctatgatgttgaggcagaaatcgaaaaattcgtttggatggatgctgtgatttggcagatgccgggctggtggatgcacgagccttggacagtgaaaaaatacatagacgaagtattaaccgctggacacggcaaactctaccaaagcgacggcagacaccgcgtcaatccgactgagggctacggcacaggcggcttgttgcaaggcaaaaaacatatgctttcactgacttggaatgcgccgattgaggcgtttacccgcgaaggcgatttctttgaaggcaaaggcgttgatgttttgtatatgcacttccacaaagccaacgagtttttgggtatgacccgcctgtcgacattcttatgtaacgatgtggttaaaaatccgcaagtggaaaaatacttggcagattatcaggcacacttggaaaaagtgctcggctaa

SEQ ID NO: 40416 - DNA, 321 bp, Neisseria meningitidis
atgttcggcaagcagctttttgaagaagtcggttcgaaaatcagcgaaaccatcgccaacagccctgccaaagatgtggaaaaaaatattaaggcgatgctgggcggcgcgttcaaccgtatggatctggttacgcgcgaagaattcgacatccagcagcaggttttaatcaaaacccgtaccaaactggcggctttggaagcgcgtttggcgaaactcgaagccgcgcaaaatcccgaacgggcagcattggaagcggctgaagccgctgccgaagaagccgtcgccgaaatcaggcagcaaaccgaagccggcgaataa

SEQ ID NO: 40417 - DNA, 591 bp, Neisseria meningitidis
atgaaaaaatcctccttcatcagcgcattgggcatcggtattttgagcatcggcatggcatttgccgcccctgccgacgcggtaaaccaaatccgtcaaaacgccactcaagtattgagcatcttaaaaagcggtgatgccaacaccgcccgccaaaaagccgaagcctatgcgattccctatttcgatttccaacgtatgaccgcattggcggtcggcaacccttggcgcaccgcgtccgacgcgcaaaaacaagcgttggccaaagaatttcaaaccctgctgatccgcacctattccggcacgatgctgaaattaaaaaacgccaacgtcaacgtcaaagacaatcccatcgtcaataaaggcggcaaagaaatcatcgtccgcgccgaagtcggcgtacccgggcaaaaacccgtcaacatggacttcactacctaccaaagcggcaacaaataccgtgcctacaacgtcgccatcgaaggcgcaagcctggtaaccgtgtaccgcaaccaattcggcgaaatcatcaaagccaaaggcatagacggactgattgccgagttgaaggctaaaaacggcagcaagtaa

SEQ ID NO: 40418 - DNA, 429 bp, Neisseria meningitidis
atgatgttttcttggttcaagctgtttcacttgttttttgtcatttcgtggtttgcagggctgttttacctgccgaggattttcgtcaatatggcgatgattgatacgccgcgcggcaatccggagtatgtgcgcctgtcggggatggcggtgcggttgtaccgttttatgtcgcctttgggcttcggcgcggtcgtgttcggcgcggcaataccgtttgccgccggctggtggggcagcggctgggtacacgtcaaactgtgtttgggcttgatgctcttggcttaccagttgtattgcggcgtgctgctgcgccgttttcaggattacagcaatgctttttcacaccgctggtaccgcgtgttcaacgaaatccccgtgctgctgatggttgccgcgctgtatctggtcgtgttcaaaccgttttga

SEQ ID NO: 40419 - DNA, 198 bp, Neisseria meningitidis
atgaataccgtcccaaaaagcaggattcccgtcaaaccgctgcccgaaaaaaccacagacgaagccaaagtcgaaaaatggcggcagctcggtgcggaacacggtttgtcgggcgaatgggtagttgccgccagattgggcgaaaacggttttaccgaagaacagatggaaaatatcgccaacctgttcggcagataa

SEQ ID NO: 40420 - DNA, 1623 bp, Neisseria meningitidis
atggaaacaataccggcagcgcaaaacaaagccgtaagcccgtctttttcagacggcatctccggtcagactgtcaacaattccgataaaatgctatactcgcgcccgttgccgcgccgtccgaaaccgccctttgggaaagcagaaatgatcagcaaacaagaataccaagcccaagccgcccaaggctacaaccgcatcccgctcgtgcaagaactccttgccgatttggatacgccgctttccctctatctcaaactcgccaaccgcccctatacctacctgctcgaatccgttgtcggtggcgaacgtttcggccgctattcttttatcggcctgccttgcagccactatctcaaagccagcggcaaacacgtcgatgtttatcaaaacggcgaaattgtcgagcaacacgacggcaaccccctgccctttatcgaagccttccacaaccgcttcaaaacacccgaaatcccaagcctgccgcgctttaccggcggactggtcggctacttcggttacgaaaccatctacaattttgaacacttcgcccaccgcctgaaaaacaccaccaaagccgacccgctcggcacgcccgacatcttgctgatgctgtcgcaagaattggcggtgatcgacaatttgagcggcaaaatccatctcgtcgtttacgccgatccgtcgcagcccgacggctacgaacgcgcccgcgaacgcctcgaagacatccgtacacagttacgccaaagttgcgccatcccgctttcgctcggcagcaaacacaccgaagccgtcagcgaattcggcgaagagccgttcaaagcctgcgttaacaaaatcaaagactacatctttgcaggcgactgtatgcaggttgtccccagccagcgcatgagcatggaatttaccgacagcccgctcgccctctaccgcgccctgcgtacgctcaacccttcgccttatctcttttactacgatttcggcgatttccacatcgtcggctcctcgcccgaaatccttgtccgccgcgaacgcgacgatgtcatcgtccgccccatcgccggcacgcgcctgcgcggcaaaacccccgccgaagaccttgccaacgaacaagatttgttaagcgatgccaaagaaatcgccgaacacgtcatgctcatcgatttagggcgcaacgacgtcggccgcatcagcaaaacgggcgaagtcaaagtaaccgataaaatggtgattgaaaaatactcccatgtgatgcacatcgtttccaacgtcgaaggccgtctgaaagagggcgttaccaacatggacatcctcgccgctaccttccccgcaggcacactctccggcgcacccaaagtccgcgccatggaaatcatcgaagaagtcgaacaggagaaacgcggcatctacggcggcgcggtcggcgtatggggcttcaacaacgacatggatttggcaatcgccatccgcaccgccgtggtgaaaaacaacacgctatacgtccaaagcggcgcaggtatcgtcgccgactccgacccgacctccgaatggcaggaaacacaaaacaaagcccgagccgttatacgcgccgcgcagatggtgcaggaagggttggataaataa

SEQ ID NO: 40421 - DNA, 1311 bp, Neisseria meningitidis
gtggctaatcaacaaacgtcatcaggttcatccaaatttggagatcttaagaaacgtcttttgtttctatttggagcattgattgtttttcgaattggtgcccatatacccgtacctggagttgatgctgttgctttagctaaattatacgaaagcgctggaaacggcatcctgggaatattgaatatgttttccggtgggtcgttagagcgctttagtatatttgcaataggaattatgccatatatttcagcttctattattgtacagctcgcttctgaaattttgccatcattgaaggctttaaaaaaagaaggggaggctggtagaaaggtaattacgaaatatactaggtatggtactgttttgttagcaattcttcaaagtctaggtgttgcatctttcgtatttcagcaaggaattgttgtaacaagttcatttgagtttcatgtttccacggtagtttctttggtaacgggaaccatgtttcttatgtggcttggggagcaaattactgaaaggggtatcgggaacggtatttctttaatcattacggcaggtattgcttcaggtattccttcgggtattgcaaagctggttacactgacgaaccaaggttctatgagcatgcttacggcgttgtttattgtatttggtgccttattattaatttatttggttgtatactttgaaagtgcacagcggaagattcctattcattatgcaaaacgccagtttaatggtagggcgggtagtcaatatacgcatatgcctttcaagttgaatatggctggtgttattcccccaatttttgcttccagtattattctatttccatctactcttttaggttggtttggttcggctgatacaaatagtgttttgcacaaaatagctggattgttacaacacggtcaattgctgtatatggctttatttgcagcgacagttattttcttttgttatttttatacggctttggtttttagccctaaagaaatggcagagaatttaaaaaagagtggtgcttttgttcctgggattagacctggtgagcagacctctaggtatttagaaaaagttgtattacgtttgacattgtttggagctctttatattacaactatttgtttaattccagagttcttaactacggttttaaatgtacctttttatttgggtggcacgtctttgttgattctagttgttgtaacgatggattttagtacacaaataaattcgtataggcttactcaacagtatgataagttaatgactcgttcagaaatgaaatcattttctcggaaatag

SEQ ID NO: 40422 - DNA, 447 bp, Neisseria meningitidis
atgcagcacgaagaaggcaaccgccaacgccctcaaggcgaactgctcctgcgtaccgtcgctatgccgcgcgataccaatcccaaccaagatattttcggcggctggattatgtcgcagatggatttgggcggcggcatattggcggcggaaatcgcgcggggacgcatcgttaccgtcgccgttcaagaaatgaacttcatccgcccggtcaaggtcggcaacgtcgtctgctgctacgggcattgcgtccgcgtgggcaatacttccctccagcttaaagtagaagtctgggtcaaaactttgatgaacgattgcgttaccgaagaccgccacctcgtaaccgaagccgtgttcacttatgtcgccatcgatgcggaaggcaatccgcgcccgattccgaaagaaggcaaccccaaattggcgggcttattgcctactccgtaa

SEQ ID NO: 40423 - DNA, 1140 bp, Neisseria meningitidis
atgagtcaaaatgcctcggtgggcattgtaacgccccaaaaaattccgtttgaaatgccgctggttttggaaaacggtaaaactttgccgcgtttcgatctgatgattgaaacctacggcgagctgaatgccgaaaaaaataatgcggttttaatctgtcatgcgctgtcaggcaaccatcatgttgcgggcaggcattcggcggaggataaatatacgggctggtgggacaatatggtcggacctggcaaaccgattgatacagaacgttttttcgtggtcggtttgaataatctgggcggctgcgacggcagcagcgggcctttgtcgattaatcctgaaacgggcagggaatacggcgcggattttccgctggttacggtgaaggactgggtaaaatcccaagccgcgcttgccgattatctcggcatcgggcaatgggcggcggttgtcggcggcagcttgggcggcatgcaggctttgcagtgggcgatttcctatcccgaacgcgtgcgccacgccttggtgattgcgtccgcgccgaaactgtccacgcaaaatatcgcgttcaacgatgtggcgcgtcaggcgattttgaccgatcccgatttcaacgaaggacattaccgcagccgcaacaccgttcccgctcggggcttgcggattgcccgcatgatggggcacattacctatcttgccgaagacggtttgggcaaaaaattcggacgcgatttgcgttccaacggctatcaatacggctatggcgttgaatttgaagtagaatcctatctgcgctatcaaggcgacaaattcgtcgggcggtttgatgccaacacctatttgctgatgaccaaggctttggactatttcgatccggcggcggatttcggcaacagcctgacccgcgccgtgcaggatgttcaggcaaaattctttgtcgccagcttcagcaccgactggcgtttcgcgcccgaacgttcgcacgaactggtcaaggccctgattgccgcccaaaaatccgtgcagtatatcgaagtcaaatccgcacacgggcacgatgcctttttaatggaagacgaagcctatatgcgtgcggtcgccgcctatatggacaacgtttataaggaatgtcagcaatga

SEQ ID NO: 40424 - DNA, 1914 bp, Neisseria meningitidis
atgaacccaagccccctactcgacctgattgacagcccgcaagacttgcgccgtctggacaaaaaacagctgccgcgccttgccggcgagctgcgcgcctttctgttggaatctgtcgggcagaccggcgggcatttcgccagcaatctgggcgcggtcgagctgacggttgcgctgcactacgtttacaacacgcccgaagacaagctggtgtgggatgtcggacaccaaagctatccgcacaaaattcttaccggacgcaaaaaccagatgcacaccatgcgccaatatggcggtttggcgggttttccgaaacgttgcgagtccgagtacgacgcgttcggcgtggggcattcctccacctccatcggcgcggcgttgggcatggcggcggcggacaaacagttgggcagcgaccgctgcagcgtcgccattatcggcgacggcgcgatgacggcggggcaggcgtttgaagccttgaactgcgcgggcgatatggatgtggatttgctggtcgtcctcaacgacaacgaaatgtcgatttcccccaacgtcggtgcgttgcccaaataccttgccagcaacgtcgtgcgcgatatgcacggactgttgagtaccgtcaaagcgcaaacgggcaaggtattagacaaaatacccggcgcgatggagtttgcccaaaaagtcgaacataaaatcaaaacccttgccgaagaagccgaacacgccaaacagtcactgtctttgtttgaaaacttcggcttccgctataccggccccgtggacggacacaacgtcgaaaatctggtcgatgtattggaagacctgcgcggacgcaaaggcccgcagcttctgcacgtcatcaccaaaaagggcaacggctacaaactcgccgaaaacgatcccgtcaaataccacgccgtcgccaacctgcctaaagaaagcgcggcgcaaatgccgtctgaaaaagaacccaagcccgccgccaaaccgacctatacccaagtgttcggcaaatggctgtgcgaccgggcggcggcagattcccgactggttgcgattacccccgccatgcgcgagggcagcggcttggttgagtttgaacaacgattccccgaccgctatttcgatgtcggcatcgccgagcagcacgccgttacctttgccggcggtttggcttgcgaagggatgaagcccgtcgtggcgatttattccacctttttacaacgcgcctacgaccaactggtgcacgacatcgccctgcaaaacctgcccgttttgtttgccgtcgaccgcgcgggcatcgtcggcgcggacggcccgacccacgccggtttgtacgatttgagcttcttgcgctgcattccgaatatgattgtcgccgcgccgagcgatgaaaacgaatgccgcctgttgctttcgacctgctatcaggcagacgcgcccgccgccgtccgctatccgcgcggcacgggtacgggcgcgccggtttcagacggcatggaaaccgtggaaatcggcaagggcattatccgccgcgaaggtgggaaaactgccttcattgcctttggcagcatggtcgcccccgcattggcggttgccgaaaaactgaacgccaccgtcgccgatatgcgcttcgtcaaaccgatagacgaagagttgattgtccgccttgcccgaagccacgaccgcatcgttacccttgaagaaaacgccgaacagggcggcgcaggcagcgcggtgctggaagtgctggcgaaacacggcatctgcaaacccgtcttgcttttgggcgttgccgataccgtaaccggacacggcgatccgaaaaaacttttagacgatttgggcttgagtgccgaagcggtggaacggcgtgtgcgcgcgtggttgtcggatcgggatgcggcaaattaa

SEQ ID NO: 40425 - DNA, 201 bp, Neisseria meningitidis
gtggataccgttggcagtttagcgattggttatgccacaggcggcaatgctggggcttttactggtgcgaatgcagattggaataatcggcagttgcattcgagtgaatataaattagcagaacaatatgcagacatagtagcttctcgtctaaacatttcaaaagaaacttgtacggtaatttatttgggaataaactaa

SEQ ID NO: 40426 - DNA, 1350 bp, Neisseria meningitidis
atggcaaaccaaaccaatagcaaagcaaaagcattgttaggctggatggacgctcgtttccccctgtctaaaatgtggaatgagcatttggctcaatactacgcaccgaaaaactttaatttttggtactacttcggctctttagccttgcttgtcctcgtgattcaaatcgtcagcggtattttcctgacgatgaactacaaaccggacggtaacctgaatgcctaccatctgcctgctgcctttactgcagtcgagtacatcatgcgcgacgtgtccggcggttggattatccgctacatgcattccaccggcgcatctttcttcttcattgttgtttatctgcacatgttccgtggtttgatttacggttcgtacaaaaaaccccgtgagttggtgtggattttcggttctctgattttcttggcattgatggcggaagcctttatgggctacctgctgccttggggtcagatgtccttttggggtgcgcaggtaattattaacctgttctccgccatccctgttatcggtccggatttgtccacttggattcgcggcgacttcaacgtttccgacgttaccctgaatcgcttctttgccctgcacgttatcgcggtacctctggtattgctcggcttggttgtggcgcacatcatcgccctgcacgaagtgggttctaacaaccctgacggcgttgaaatcaagaaaaacaaagacgaaaacggtatcccgcgcgacggtatcccattccatccttactataccgttaaagacatcttgggtgtggttgtattcctgattgtcttctgtgccgtattgttcttcgcaccggaaggcggcggctacttcctcgaagcgccgaacttcgatgcggcaaatgcgctgaaaacacctccgcacattgcgccggtatggtatttcacaccgttctacgccattttgcgtgcgattccctcgttcttgggaacgcaggtttggggtgtaatcggtatgggcgcggcggtcgtgttgattgccctgctgccttggctggataggggcgaggtgaaatccgtccgttaccgcggcccgattttcaaaaccgcattggtcttgttcatcatttcctttatcggtttgggtattttgggcgcgatggtggcaaccgatacgcgtactttggtcgcgcgcatcctgtccttcgtctatttcgcattcttcctgggtatgccgttctataccaagctggataaaaacaaaccggttcccgaacgcgtaaccatgagcaccgccaaacaaaaaatcatgttctttgtttacgtcggcattaccgccgtgggtgcttacctgtttgcaaccaacatctga

SEQ ID NO: 40427 - DNA, 714 bp, Neisseria meningitidis
ttgaatttaatccacgatacattaccagttaacgttctattgcctatgtgtacacgaaaacaacaaggtttcacgctaacagagctgctcatcgtgatggccattgcagccattatggcgatgatagccctccccaatatgagccaatggattgcatcccgccgcattgccagtcacgcggagcgggttgccaaccttttgcgtttctccaggggcgaagccgtccggctcaatctccctgtctatatctgtcctgttcaagttaaaaaagacggtgcgcccaacaataaatgtgacttcggcaagaaggggcagggaatgttggcttttggcgataagaatggcaataagatatatgacaatgatacggcggatgttcttctccgcagtgtggtattgaatgatgatatcaataataagcggattaattatgccttcaaccatatcgctttcggtcagactcagccgaccgctgaccgtgtagtttggacattcaatcaaaacgggacgttcggttatacgaaagaccagcatcttacaagcaaatccagctttttttattccgacggttatatccaaatcgtgctgacagatgcgagagcagtttcagatgccgataagaaattccgttcggcggtggttttgattaacagcagcggcagggttgaggtttgtcctagaaacgataggcgtaccgtatgccaatataaatga

SEQ ID NO: 40428 - DNA, 324 bp, Neisseria meningitidis
ttgttagaaaattgtaatggtttacacaatcgttttccatatctaatttttgttttcttattgccctgccggataaagcaggtctgcctccgtactgtctatcctcacatttactttcctgccatcggcttttatctccccggttttaccgtttttgccaacttcgcggctttggcggcggcaatgttgaaggcggcttcgacggtttcggcggcattggggttgacccgtactcatccgcaaacggcaacacgacggacggtgtttgcttttcagccgtctgccgttttgaccaaggtgctgccgtggaaggagcaggtgtag

SEQ ID NO: 40429 - DNA, 2121 bp, Neisseria meningitidis
atgacactgaaagcaagcaagcaagcaagcaagcaagcaagcaagcaagcaagcaagcaagcaagcaagcaagcaagcggtcgggttaatctattaacattatctgttttatcgctgttttgcacgccatatgcttggggttcggatgcgtacgatcccgtcaaagaagccgagattaaaaacaaatttattttagaagcggcggaaaacagagattcacacgtttggcgcggcccgtgcagcatatcttttgattgctttggtatgttcagtgctcagcttggttcaaatactcgttctaccgaaatcggcggcgatgccgatttttcattttcagacaagccggcaaacggcgtttcccattatttttccagcggtaaaaccgatccaaattcatctgaagccttgtatgacgaaatcaatatcacgggtaaaaactacaatagcggcatcctcgccgtcgataatatgcccgttgttaagaaatatgttacagagaattacggagctgatttaaagcaggcggttaaggatcaattaaaggatttatataaaacaagacccgaagattgggaaaaaaataaaaaaatagttgaggaagcgataataaaacaatatggaatacctagaaataaaattaataaatttagaaaagttattgatccaattatagaagaagctgtactcactcctcatagtaatacatcacagactagtctcaacaacatcttcaataaaaaattacacgtcaaaatcgaaaacaaatcccacgtcgccggacaggtgttggaactgaccaagatgacgctgaaagattccctttgggaaccgcgccgccattccgacatccatatgctggaaacttccgataatgcccgcatccgcctgaacacgaaagatgaaaaactgaccgtccataaagcgtatcagggcggtgcggatttcctgttcggctacgacgtgcgggagtcggacgaacccgccctgacctttgaagacaaagtcagcggacaatccggcgtggttttggaacgccggccggaaaatctgaaaacgctcgacgggcgcaaactgattgcggcaaaaacggcggattccggttcgtttgcgtttaaacaaaattaccggcagggactgtacgaattattgctcaagcaatgcgaaggcggattttgcttgggcgtgcagcgtttggctatccccgaggcggaagcggttttatatgcccaacaggcttatgcggcaaatactttgtttgggctgcgtgccgccgacaggggcgacgacgtgtatgccgccgatccgtcccgtcaaaaattgtggctgcacttcatcggcggccggtcgcatcaaaatatacggggtggcgcggctgcggacgggcggcgcaaaggcgtgcaaatcggcggcgaggtgtttgtacggcaaaatgaaggcagccggctggcaatcggcgtgatgggcggcagggtcggccagcacgcatcagttaacagcaaaggcggtgcggcaggcagtgatttgcatggttatggcgggggtgtttatgctgcgtggcatcagttgcgcgataaacaaacgggtgcgtatttggacggctggttgcaataccaacgtttcaaacaccgcatcaatgatgaaaaccgtgcggaacgctacaaaaccaaaggttggacggcttctgtcgaaggcggctacaacgcgcttgtggcggaaggcgttgtcggaaaaggcaataatgtgcggttttacctgcaaccgcaggcgcagtttacctacttgggcgtaaacggcggctttaccgacagcgaggggacggcggtcggactgctcggcagcggtcagtggcaaagccgcgccggcattcgggcaaaaacccgttttgctttgcgtaacggtgtcaatcttcagccttttgccgcttttaatgttttgcacaggtcaaaatctttcggcgtggaaatggacggcgaaaaacagacgctggcaggcaggacggcactcgaagggcggttcggcattgaagccggttggaaaggccatatgtccgcacgcattggatacggcaaaaggacggacggcgacaaagaagccgcattgtcgctcaaatggctgttttga

SEQ ID NO: 40430 - DNA, 540 bp, Neisseria meningitidis
atgaagataacacactgcaaattaaagaaaaaagtacagaaagagctgctccgtttttttgtactcgaagttaccgcccgttctgctgccgatattttgggtatccatcccaattcggcagtcctgttctaccgcaaaatccgtatggtcatcagccattatctggccttggctgccaatgaggttttcgagggctctgtcgagttggacgaaagctatttcggcggacggcgtaaaggcaaacgtggtcgcggtgcggcaggaaaagtggttgtcttcggcattctgaaacgtaacggacgggtctataccgttgtcgtagataatgccaagtccgatactttaatgcctgttatcaaacagaaaatcatgccggacagcattgtttataccgacagcctgagcagttacgacaagttggacgtaagcggttttatccattaccgcatcaaccattccaaggaatttgctgaccgtcagaaccacataaacggcattgagaacttttggaatcaggcaaaacgcgtcttgcgcaaatag

SEQ ID NO: 40431 - DNA, 1446 bp, Neisseria meningitidis
atgaattggtctgatttgaatttgatgcccgcactgcccgaagtcgcgctgctgtcgctgctggtgttattgttgctggcagacttgtgggtcagtgatgacaaacgccgttggacgcattacggcgcgttggcaacggtggcggttacggcggcggtgcagcttgccgtgtgggaacagggcagcacgtcttcgttcaacgggatgtatattgcggacggtatgtcgcgtttggcaaaaatggttttatatgccttgatgtttaccctgtttgtctatgccaagccctacaaccaagtgcgcggtatttttaaaggcgagttttacaccctgtcgctgtttgccctcttgggcatgagcgtgatggtgagcgcggggcattttttaactgcctatatcggtttggaactcttgtcgcttgccctttacgccctgattgccctgcgccgcgattccggctttgccgccgaagccgccttgaaatattttgttctgggcgcgctggcatccggtctgctactctacggtatttctatggtttacggcgcaaccggttcgctggaatttgccggcgtgctcgcctcttccttcaatgaagaagcaaacgaatggctgttgaaactgggtctggtgtttatcgtcgtcgccgttgcgttcaaactcggcgcggtgccgttccatatgtgggtgcccgacgtgtatcacggtgcgcccacttctgttaccgccctagtcggcactgccccgaaaatcgccgccgtcgttttcgctttccgcatcctcgttaccgggttgggaaccgtgcatcatgactggtctctgatgtttgccctgcttgccgccgcctcgctgctggtcggcaaccttgccgccatcatgcagaccaatatcaaacgtatgctcgcctattccaccgtatcgcatatggggtttatcctgctggcgtttatggcgggcgcggtcggctttgcggcgggtctctattacgccattacctacgcgctgatggcggcggcagggttcggcgtgttgatggtgttgtcggatggggacaacgagtgcgaaaacatcagcgatttggcagggctgaaccaacaccgcgtatggcttgcctttttgatgttactggttatgttctctatggcgggcattccgccgctgatgggtttttacgccaaatttggcgtgattatggcactcttaaaacaaggctatgtttggttgtccgtatttgccgtcgtgatgtcgctgattggcgcgttctactacctgcgcgtggtcaaagtcatgtattttgacgaatccggccgcgcccatcccaccgtcggcggcaacaatgccgcaaaattccttttgagcgtcaacgcgctgctgttggtgctgtggggcattatgccgcaaaccgttatcgactggtgcgccaaggcgttggaaaacacgctgtaa

SEQ ID NO: 40432 - DNA, 885 bp, Neisseria meningitidis
atgagcagcggaaatatccacatccacagcatgaccggctttgccaacgcggcggcagagtgcggcagcaaacgcatcaacctcgacatccgcgccgtcaaccaccgctttttggacattcaaatcaggatgccggatgatttgcgctatttggaaagcggtatccgcgagaaaatttcatcccatatcgcgcgcggcaaagtcgaatgcaaaatccaaattcaagatacggaaaacagcagacagtccttggaactcaactcggatttggtgaaccagcttgccgaaatcaacaaaaacctccgcaagcatcacgatttggcaaaactgggcgttgccgacatcctgcgtttccccggcgtattggcaagccaaagggaaaatacggaggaattggcaaaaagcattaccgaactgaccgaaaaagcgttaaaagactttactgccgcacgccggcgcgaagggaaaaaattgggcgagcacctgttacaacgcctcgaaagcatggaagaaatcatagatgcattgagcgaactctttcctaccctgctggaaacacataaagaaaaaatccgcgcccgcctcgtcgaagcagtcggcgacatcaataatgacaggctgcaacaggaatttgccctctttattcaaaaatccgacatcgacgaagagttcagccgcctgcgcacgcatatcgacgaagtacgccgcatcgttaccgaacacaaaggcagcagcggcaaacggctggacttcctgatgcaggaattaaaccgcgaagccaacactttgggcagcaaatccattgccgccgaatgcacccaagcctcggtcgaactgaaagtcttaatcgagcagatgcgggaacaagtgcagaatatcgaataa

SEQ ID NO: 40433 - DNA, 603 bp, Neisseria meningitidis
atgttcaacataccggccgtcgccgtttcctatctgatcggctcactttcttttgccgtcatcgtgtccaagtattacggcatggacgacccgcgcacctacggatcgggcaatccgggggcaaccaatgttttacgcagcggcaaaaaaaaggcggccgcgctgacgcttttgggcgatgccgccaaaggtttggttgccgttttgcttgcacgcgtgcttcaagaaccgctcggtttatccgacagcgcaatcgctgccgtcgcactcgccgcgctggtcggacatatgtggccggtgtttttcggatttaaaggcggcaaaggcgtggcaacggcattgggcgtgcttctggcactctctcccgcaactgccttggtctgcgcgttgatttggcttgtgatggcattcggcttcaaagtatcctcccttgccgcattaaccgccacaatcgccgccccccttgccgcactgttttttatgccccacccttcttggatttgggcgacgctccttatcgccatgctggtgttgttccgccacaaaagcaatatcgtcaagctgctcgaaggcagagaaagcaaaatcggcggcagccgctga

SEQ ID NO: 40434 - DNA, 1146 bp, Neisseria meningitidis
atgaccgaaactcaatccctagagcttgccaaagagctgatttcccgaccatccgttacccctgacgacagggattgccaaaaactccttgccgaacgcctgcacaaaatcggttttgcggctgaagaactccatttcggcgacaccaaaaacatctggttgcgacgcggcacgaaagcccccgtcgtctgttttgcagggcataccgacgttgtgccgacaggccctgtcgaaaaatgggattcgcccccgttcgagccggccgagcgcgacggaagattatacgggcgcggtgcggcggatatgaaaaccagcatcgcctgttttgttaccgcctgcgaacgctttgttgccgaacaccccgatcatcaaggcagcatcgcgctcctgattacttccgacgaagagggcgacgcgctggacggcacgaccaaagtcgtcgatgtgttgaaagcgcgcggcgagttgattgactactgcatcgtcggcgaaccgaccgccgtggacaaattgggcgatatgattaaaaacggccggcgcggctcgctgtcgggcaacctgaccgtcaaaggcaagcaaggccatattgcctatccgcatttggcaatcaatcccgtgcatacttttgccccggccttgttagagctgacgcaggaagtctgggacgaaggcaacgaatacttcccgccgaccagtttccagatttccaatatcaacggcggcacaggcgcgaccaacgtcattccgggcgagctgagcgtcaaattcaatttccgcttctccaccgagtccaccgaagcagggctgaaacaacgcgtccacgccattttggacaaacacggtgtgcaatacgatttgcagtggtcgtgttcggggcagcccttcctgacccacgcgggcaaactgaccgacgtggcacgcgccgccattgccgaaatctgcggcgtagagaccgaattgtccaccaccggcggcacttcggacggacgcttcatcaaagccattgcaaaagaactcatcgaattaggcccgtccaatgccaccatccaccaaatcaacgaaaacgtgcggctggacgatattccgaagctgtctgcggtgtatgaggggatattggcgcgcttgttggctggaaatgccgtctga

SEQ ID NO: 40435 - DNA, 717 bp, Neisseria meningitidis
atgacagacaccgccgaaaaccaaacaccaaacgaccgtcaagcaggacacccccgcagcatccgcagcttcgtcctccgccaaagccatatgaccgccgcgcagcaacgcgccatcgataccttatgggacagcttcggcatcgactaccaagcaacaccggccgatcttgatgcccgtttcggaagcagccgacccaaaatccttgaaataggcttcggtatggggacggcaaccgcagaaatcgcccgcaggctgcccgaaaccgactttcttgccatcgacgtacacggtcccggcgtaggcaacctgctcaaactcatcaacgaaaaccatttggaaaatatccgcgtgatgcggcacgacgccgtagaagtcgtcgaaaatatgctgcaagacggctcgctcgacggcatccacatattcttccccgacccgtggcacaaaaaacgccaccacaaacgccgtctgatacaagcccccttcatcgccaaactgctgcccaaactcaaaaccggcggctatatccacttggcgacagactgggaagaatatgcgcagcagatgcttgaagtcctcagcagcttcgacagcctgcaaaatacggcggcagactacgcccccaccccggactaccgccccgaaaccaaattcgaagcgcgcggcaaacgcctcggacacggcgtttgggacttggtattcaaacggatcggataa

SEQ ID NO: 40436 - DNA, 189 bp, Neisseria meningitidis
gtgatggaaagcatgtttatattggtgcccatcagcattattttggcgtttgtcatcggctggtttttttggtggtcgggcaaaaacgggcagtttgacgacttggaagggccggcgcaccgcatcctgatggatgatgattcgacaagtaaactgattgaaaaagagagggaaaacgatgtacgctaa

SEQ ID NO: 40437 - DNA, 1185 bp, Neisseria meningitidis
atgaccgaaccgacctcccgccgccgtttcctgaaaacctgcaccgccgccgccggcgcgggactgcttcaggcttgcggcacatccgccacatccgttccgccccttccctcttcccattctgttgtgaaagcccgaaccgtgcctctccaaacgccacgccgtcaaagttcggacggcaaccttctgcgcgttgtcgcttcgtcaggatttgccgaagacaccaaccgcgtcaacacagccttaacccgcctttacaatgtcggttttaccgtaaccaaccaacaggcgggcagccgccgtttccaacggtttgccggcacggacacgcaacgtgccgccgatttccaagaggtcgcttccggccgcgtcgccacgcctaaagtgctgatgggcttgcgcggcggttacggtgcggcgcggattctgccgcatatcgattttgcttcgctcggcgcaaggatgcgcgaacacggcacgctctttttcggattcagcgacgtatgcgccgtccagctggcattgttggcaaaaggcaatatgatgagttttgccggcccgatggcttatagcgattttggcaaacccgcccccggtgcgtttacgatggatgcctttatcaagggtgcaacccaaaaccgcctgaccgttgatgttccttatatccaacgcgccgatgtcgaaaccgaaggcatattgtggggcggcaacttaagcgtcctcgcctcgctcgccggcacgccttatatgcccgacatcgacggcggcattttgttcctcgaagatgtcggcgaacagccctaccgcatcgaacgtatgctcaatacgctgtatctttcgggtattttgaagaaacagcgcgccatcgtgttcggcaatttccgtatggaaaaaattcgagatgtctatgatccgtcttatgatttttctgccgttgccaaccatgtttcgcgcacggcgaaaatccccgtgctgacgggcttcccgttcggacacattgccgacaaaatcactttccctctaggcgcgcacgcccgaatccgtatgaacggaaacagcggttattcggtcgcgtttggaggctacccgacactcgatgcgtccgccctgactttggataccctgctcccaccgccggatttgcccatcttccccgaaagcggtgttgccgatatctcggaataa

SEQ ID NO: 40438 - DNA, 435 bp, Neisseria meningitidis
atggataacaaaaaagaatttattaataatttaacaaataggtatatgtggatctatccattggtcttaaatattctatttctacctttttaccagtcctaccaatctttttttattgcgcttggttgtttgtttgcactggttagaaaaatgcaaagcttagattttaaattacaaaatcatattgtattgttaaatataaaaagtgcttgggcagataaaaaagtatttttgattaggatagtagtgtcatggttggcagtaatggaaatatggatgtgttttatttcggaatcatcaacgtgggtatgcggtgctttttgtttaaatagtgaaatattggaaaaaatttttcgtggctttggttattctggtagtttatattttttatttatattgatgattgatctcaataagttaagagagagtatttga

SEQ ID NO: 40439 - DNA, 669 bp, Neisseria meningitidis
atgaaaaacctcgccatcttcgacctcgacaacaccctcatcaacaccgattccgaccacgcctggccgcaatacctcatcaaaaaaggcttggttgacgctgccgaaaccgaagcgcaaaacgaaaaattctaccgcgactaccaaaacggctgcctcgacatcgacgcattcctcaaattccacctcgccccgctcgcccgttacagcaaagaagagctggcggaatttcaccgcgaatttatggcggaatacatcatcccccacatctcgcctatgcagcgtatgctggtgcagagccaccaaatggcaggcgacgaaaccctcgtcatctcatcgaccaacgagttcatcatcacccccgtctgccgccttttcggcattaccaacatcatcggcacacaactcgaatccggttccgacggccgctacaccggcaattacatcggcacgcccagcctcaaagaaggtaaaatcacccgcctgaaccaatggctcgccgaacgcggcgaaacgctcgaaagctacggcaaaacctatttttacagcgactccaaaaacgacctgccgctgctgcgcctcgtcgacgaacccgtcgccgtcaaccccgatgccgagctggaaaaagaagccaaagaaaaaggctggccggttttgaatttcaaatga

SEQ ID NO: 40440 - DNA, 780 bp, Neisseria meningitidis
atgagcgcaaccattcccccaaaaatcatccgatacgacagcaatccgaccgatgtctattttttcggcacttgcgtccttgatctttttatgcccgaagcaggcatggatgccattgccctaatcgagcagcagggcatacgcgtccatttcccgatggcgcaaagctgctgcggccagcctgcctattcatccggccatccgaccgaagccttcgatgtcgccaaagcgcaacttgaccttttccccgaaaactggccgattgtcgtaccgtccggttcgtgcggcggtatgatgaaacaccattggccgacgctgtttaaaggcagcgagtacgaggaaagggctgtggattgcgccggccgcatcatcgagtttacccatttcctgcttgccatcggtttcaaacccgaagacaagggcgaaccgctcaaagtcgccgttcacacttcctgcgccgcccgccgcgaaatgaatgtccatctttcaggctggcaactgattgacggtatggaaaacgtcgaacgcatcgtccacgaccacgaaagcgaatgttgcggcttcggcggcacattctccgtcaaacaagccgatatttccggcgcgatggtaaccgacaaagtcgccgcgctgaaagaaaccggcgcaaccgaaatcatcagcgcggactgcggctgtatgatgaacatcggcggcaaaatcgccaaggacgagccggatatgccgcgtccgaaacatatcgcatccttcttgttggaacgcaccggaggcaaagcatga

SEQ ID NO: 40441 - DNA, 465 bp, Neisseria meningitidis
atgaaatgcccgttttgcgcccaccccgacacccgcgtcgccgattcgcgcctgatggaagaacgcaacgccgtgcgccgccgccgccactgccccagctgcggcaaacgcttcggcacgctcgaaaccgccgaactcaaaatgcccgccgtcatcggtccggacaaaaaacgctcgccctttaatgcacaacgcctccgcaacgacctgaccgccgccgcccgaaaatccgccctgacacccgaacagatcgacgaaaccgtccgcctgacggaacacaggctctacacttcgggtcagcgcgacatcccctctgccgcacttgccgacatggtgctaaaagaactgctccgacaagatacggaagccgccgtccgtttcgccgccctgcacaaacgcttcgacaatccggcagactttgcctcgtggctggcgcaagccgtcaaaacagaccgcaaagcctga

SEQ ID NO: 40442 - DNA, 594 bp, Neisseria meningitidis
ttgtacggcagccaccatttgctatgcactcaaacagatggggataacgcgcaaaaaaagaccaccacttacaaagaacaagacccggccaaagtaacgcattatttgacacagccggccgaattttccgactaccaacgtgtttatttggatgaaacaggatttgaccgctacctgttccgtccctatgcccgcagcctgaaagggcaaatagtgaaagcgcagataagtggaaaaagataccaacgcttatctttggtgtccgcacaagtcggcaaccggctgattgctccgatggtttatcaaaatacgatgaccggagtcttttttgaagcgtggtttcagcaatgcctactgcccgcattgactcaaaaatcggtgattattttagataatgcgcgatttcaccgtatgggtgtcttacgggaaatggcggaaaaattgggacataaggtattgcctcttgcaccttattcacctgaactcaacccgattgagaaagtgtgggcgaatattaagcggtatctgcgaaccgttttgtctgattacgcccgatttgacgatgcactactgtcctattttgattttaattga

SEQ ID NO: 40443 - DNA, 495 bp, Neisseria meningitidis
atgaagaaaaccctgttggcaattattgccgttttcgccttaagtgcctgccggcaggcggaagaggggccgccgcctttaccccagcagattagcgaccgttcggtcggacactattgcagtatgaatctgaccgaacacaacggccccaaagcccagatttttttgaacggcaaacccgatcagcccgtttggttttccaccatcaagcagatgttcggctataccaagctgcccgaagaacccaaaggcatccgcgtgatttacgttaccgatatgggcaatgttaccgattggacgaatcccaatgccgacacggagtggatggatgcgaaaaaagccttttacgtcatcgacagcggctttatcggcggtatgggtgcggaagacgcgctaccgttcggcaacaaggagcaggctgaaaaatttgcaaaggataaaggcggtaaggttgtcggtttcgacgatatgcctgatacctatattttcaaataa

SEQ ID NO: 40444 - DNA, 366 bp, Neisseria meningitidis
atgcgtcatcgtaatggcaatcgcaaattaaaccgtaccagcagtcatcgtgctgcaatgctgcgtaatatggcgaattcattattgactcacgaaactattgtaacaactctgcctaaggccaaggaattgcgccgtgtagtagagccgttgattacattgggtaaaaagccgtcattggcaaaccgccgtttggcatttgaccgtactcgcgaccgtgatgttgtagtaaaactgtttggcgatttgggtcctcgttttactgctcgtaacggtggttatgttcgggtgttgaaatacggattccgtaaaggtgataatgcacctctggcactggttgaattggttgacaaaccggctgctgag

SEQ ID NO: 40445 - DNA, 1248 bp, Neisseria meningitidis
atgttgaaacaaacgacacttttggcggcttgcgcctcctttgccgcactgttgggcggttgtgctacccagcagcctgcccccgtcattgcaggcaattcaggtatgcaggacgcgccgtcttcggcagtttacaacaacccctatggagcaacgccgtacagcccggctcctgccggcgatgcgccttatgtgccgccggtgcaaagcgcgccggtttatacgcctcctgcttatgttccgccgtctgcacctgccgtttcgggtacatacgttccttcttacgcacccgtcgacatcaacgcggcgacgcatactattgtgcgcggcgacacggtgtacaacatttccaaacgctaccatatctctcaagacgatttccgtgcgtggaacggcatgaccgacaatacgttgagcatcggtcagattgttaaagtcaaaccggcaggatatgccgcaccgaaagccgcagccgtaaaaagcaggcccgccgtaccggctgccgcgcaaccgcccgtacagtccgcacccgtcgacatcaacgcggcgacgcatactattgtgcgcggcgacacggtgtacaacatttccaaacgctaccatatctctcaagacgatttccgtgcgtggaacggcatgaccgacaatacgttgagcatcggtcagattgttaaagtcaaaccggcaggatatgccgcaccgaaaacctcagccgtagaaagcaggcccgccgtaccggctgccgtgcaaacccctgtgaaacccgccgcgcaaccgcctgtgcagtccgcgccgcaacctgccgcgcccgctgcggaaaataaagcggttcccgcgcccgccccgcaatctcctgccgcttcgccttccggcacgcgttcggtcggcggcattgtttggcagcgtccgacgcaaggtaaagtggttgccgatttcggcggcaacaacaagggtgtcgatattgccggtaatgcgggacagcccgttttggcggcggctgacggcaaagtggtttatgcaggttccggtttgaggggatacggcaatctggtcatcatccagcataattcttccttcctgaccgcatacgggcacaaccaaaaattgctggtcggcgaaggccagcaggtcaaacgcgggcagcaggtcgctttgatgggcaataccgacgcttccagaacgcagcttcatttcgaggtgcggcaaaacggcaaaccggttaacccgaacagctatatcgcgttctga

SEQ ID NO: 40446 - DNA, 594 bp, Neisseria meningitidis
atggccgacggtatgggcaatatgattggctgggaaaaaacggggcttgttgtcggtaagcagtggataaccgcaaaagacgacaaggtgtccgatgtctgcaatgccaacggcgagatgggcgtaatcgggctttacgagcctttctcacacggcgcattgacgatacccggtcatccgaactgccgatgcgaggttgtttccgtatcgggtggcgaattgggggaatttgccgaaaaaaaggagcttcgtaaagcggctatgcagtatgcgcgggataactttatcggcaaaagctatgtcaataaaaacagcgggcatgaactgaaggtaacttggcaaggtgtgaaacacgctgcgtcaaaggcaaatcaggcggaattatccatcatgacaaaacttgatgacttattgcgctacgcaaaatatgagggttcttattcggataggaaaggtcatcctaatattattgcagcacataagtatcgtgccgttgccaaggttgggaatgagtctttaaatatcggtgtgattgtaagggaatttccagacgaccataaacattacgaccatttcatcttgaaggatgaataa

SEQ ID NO: 40447 - DNA, 2007 bp, Neisseria meningitidis
atggctgatatgaagaaaattacccctcaaaacctgcgccccctgctttcggaaagcttgggacataccgattttgtcaacgtcctcaacgcactgattaaatttttgcgccgtggcggcaaaaaatgtgcgggggaacgtttcgacctgattatcgacacattcaaacaagacagggaattactgtcccgcttcagccggtgtttttacatctggctcgcgcaggtgcacatttatccggcactcatcaaactcggcatcttctcgcgccacagctttgcccgggaaatgggcatacgcatctacgaacgcttcagcccgtcatataaagattttgccaacttgggcgaagtcttcctttatcttttccattccgaaaacgacgacaaatggctgcaaacgctcaatatccgccaatggctggttttatacgaactcatccggagccacgccgagccgtccaaattgcagacggcgggcatccgccttgccgatgcgcgtttgcgcgccatcgaaatgctgtctgtctggacggcatccgaagccatcgaacccgacctcatccgcatcgccccgcgcctgctggaagccgattcttccttcgtcgccctccaacgcgaaaccgccaaactggtcgaacactaccgcaacggcaccacgccttacgacaccgcccacctcgaagtgatgttcgaccaatgtttcagccagattgactatttgcgccgcaaagggacgggcgccggctccggttcgtcggtcaaagtcgcccacctgctcgaacggctccggcagaccgtagaccgtctaaagctgctcaccgacatccaaaccggtgccggcaacagcaaccgcctgaccatcgcgctgatgaactccctcatctacgcggcggtcgaacaatacagcacccgccacctgcgccgcagcagcatccgtatgctcgcccgcagcattaccgaaaacaaaagccaccacggcgaacactacatcacccgcaaccgcaaagaatatttcaaaatgttctactcggcggcaggcggcggcatcatcatcgccctgatggcgctgctcaaaatccgcatcggcacactcggcctcagccccttcctgacttccttgtcggctgggttcaactacggcatcggctttatgatcatccatatgctgcactgcaccgtcgccaccaaacagcccgcgatgactgccgccagctttgccgaacaggtcgatctcaacgaaggcggcaaagcggtggacaacaaactcgccaagctcctcatcgacgtatgccgttcccaaagtgtcgccgttttcggcaacgtttccatcgccatccttttggcgtgcgccatatcgttcggctatgcccatctgtaccggcagcccatactcgatgcccacaccgccgcctaccagttcaaatccatagacatcatcgcttacccgacgctgtggtatgccgccattgcaggtctgtggctgttctgctccggcatcatcgcaggttttttcgacaaccgcgccgactacctcaacctgcgccaacgcctgcccttcaaccccttgctgcgtaaaatcatgcgccccgggccccgccgcgtcctcgccgcctacatccacaaacactacggctcgttggcaggcaacttcatcttcgggatgctcttgggtatgaccggctatttcggacacctcctcgggctgccgctggacatccgccacgtcgccttttcctccgccaacctcggctatgccgccgtcagcggcaacgtcggtttgggcacgttcgtactcggcattttcagcgtcctcgccatcggcctggtcaacctctgcgtcagcttcagcctcgccctcttcgtcgccctgcgctcgcgcggcacgaaaatcggcagcatccgcaatctgattaaaagtttttggaatcagattaaaagcaatccctgcatacttttcctcccgcccgccaaagaacagggacatcctccttcggacaagccttga

SEQ ID NO: 40448 - DNA, 753 bp, Neisseria meningitidis
atggcaaaccaaagacctatctacggcttccatgccgtcaacgcccgattgtggcaaaaccccaaatccatcgtcgaactctatgtccaagaaggcaaaaacgatgtacgcacgcgcgaagtgttggaaaaggcggcaaacgaaaacatccgcgtatattttgccgatgccgaccgcctcaacgccatcagcaaaggtgcgcgccatcagggcgtggtcggatttatcgatgcctccaaaaaccacgtccacctcgaagacgtattggaaaacttaagcgaaccgccgctgctgctgatactcgacggcatcaccgacccgcacaacctcggcgcatgcctgcgtaccgccgacgcaatgggcgtacatgccgtcatcgcaccgaaagacaaaagcgcggggctgaacgccaccgtcagcaaagtcgcctgcggcgcggcggaaactgtcccctacatcactgtaaccaacctcgcccgcaccctgcgcgagctgaaagaatacggcatctggattatcggcaccgacatgggcggcgacgccgacctttaccattgcaatctgcccgacagcgcggcgtgggtaatgggcaacgaaggcgacggtatgcgccgcctcacgcgtgaacactgcgacatgctggtgtccatacccatgttcggcacggtcgaaagcatgaacgtctccgtgtccgcaggaatggtattaagtgaaacccgccggcaacgcgtattgaaaaacgaaaaagcgtaa

SEQ ID NO: 40449 - DNA, 5952 bp, Neisseria meningitidis
atgaataaaggtttacatcgcattatctttagtaaaaagcacagcaccatggttgcagtagccgaaactgccaacagccagggcaaaggtaaacaggcaggcagttcggtttctgtttcactgaaaacttcaggcgacctttgcggcaaactcaaaaccacccttaaaaccttggtctgctctttggtttccctgagtatggtattgcctgcccatgcccaaattaccaccgacaaatcagcacctaaaaaccagcaggtcgttatccttaaaaccaacactggtgcccccttggtgaatatccaaactccgaatggacgcggattgagccacaaccgctatacgcagtttgatgttgacaacaaaggggcagtgttaaacaacgaccgtaacaataatccgtttctggtcaaaggcggtgcgcaattgattttgaacgaggtacgcggtacggctagcaaactcaacggcatcgttaccgtaggcggccaaaaggccgacgtgattattgccaaccccaacggcattaccgttaatggcggcggctttaaaaatgtcggtcggggcatcttaactaccggtgcgccccaaatcggcaaagacggtgcactgacaggatttgatgtgcgtcaaggcacattgaccgtaggagcagcaggttggaatgataaaggcggagccgactacaccgagatacttgctcgtgcagttgctttgcaggggaaattacagggtaaaaacctggcggtttctaccggtcctcagaaagtagattacgccagcggcgaaatcagtgcaggtacggcagcgggtacgaaaccgactattgcccttgatactgccgcactgggcggtatgtacgccgacagcattaccctgattgccaatgaaaaaggcgtgggtgtcaaaaatgcgggcacactcgaagcggccaagcaattgattgtgacttcgtcaggccgcattgaaaacagcggccgcatcgccaccactgccgacagcactgaagcatcaccgacttatctctccatcgaaaccaccgaaacaggcgcagcaggcgcatttatctccaatggcggccggatagagagcaaaggcttattggttattgagacgggagaagatatcagcttgcgtaacggagccgtggtgcagaataacggcagtcgcccagctaccacggtattaaatgctggtcataatttggtgattgagagcaaaactaatgtgaacaatgccaaaggcccggctactctgtcggccggcggtcgtactacgatcaatgatgctactattcaagcgggcagttccgtgtacagctccaccaaaggcgatactgaattgggtgaaaatacccgtattattgctgaaaacgtaaccgtattatctaacggtagtattagcagtgctgctgtaattgaggctcaagacactgcacacattgaatcgggcaaaccgctttctttagaaacctcgaccgttgcctccaacatccgtttgaacaacggtaacattaaaggcggaaagcaggtggtactgatggctgatggcgacattcaggcaaaagcctccaatctgaatgcatccggcaatctgtatattcatgcaggtaaggatctggatttgaatgccgataaagacttatcaacacaaagtatcagcctgagggcagacaacaccgccctcatcagtagcaacggtaacaccttgactgcagaaaagaatctggatattcaggcaggtagcttgagtgtgcgtcaaagtaatctgcaatccagtggcggtaatgtgcagatgagcgcgactaaaggcaacattagcttgaatcagagttggataaatgccagtcagaatattgatacggcagcacttcaaggcaatattatttcagacggtctgactgctgttgccgaagttggacgcgtatctcttcttgccaacggcaatgttgatttcaacggtctaaataccttgattgcggaaggagacattaatgctggttcagtcggtaaaggccgtctgaaaatggacaataccgatatttatgcttctgcaggcgatgtgaaactggttgccggaggtcaattagatttaggcaacggcaccgttaacggcggtcatatcagcttagacagcaataaaggcagcatggtggtgcagaatgtacacctgaatgcccgcgcatcactgaaagtggatgcggatcaaactttaaccattaataacagcaagctcaattccggtcacaatacccagattaatacaaatcatggtcatatgacgcttaatcagcttgatgctcattcacatcgtcatatgagtatcagtgcacagggtaaaggcaaaggaaaagacagcggtcaaattttacaaaacgaccagcaaaacagtaaaagtactttggcggcagatggtgtattgtcattgaacagcagcgcattacaggttttggacaatactaccctgcgcggtggcgcgataaacatcaaagctggcggaggcatcatcaaacgggggcatatcgattgggaaacccaagatacggcaactatgcgttcagcggaactgaaaccactgtccggtatgatgtcgatagaatcgggcggtaataaccctttaaccgttgaacccggtaaccgtatcgtttctgcaggtgatttggccgtgaaacacaacggcacattccaaatcagtgccagagcaggaaataacggcaatccgagtgcgcaaacagccagcgtttcagctaaaggcaatatcgggattgtggcgggagaggtggatattgatgcagcaaatattgccgcagggaaagatttggctttagtggcaactaaagggaatatttcactaaacagtattaggaatacgtttagtaactatcaattgaaaacagataaacacaatatcacacagcaacttactgatgtagagcaggagcttagtaagttaacgagcgatcctaaatatcgtaaagcacaggatcttccacaaatgttgaggcgtaaatataagaggcgtgacaaagtattcggtgatagtgaggccagattacgtggtttacgagcagagataaatgctgctgatgaggcttgggcagaactccaatccccagtaaaagcgttacttgaacgtaaacaattgttacaacaagcccttttaacagtttcccaaccgggtagtggtcacgaaaaccaaggtagcacccttagcggtcaaaatatcaaactgctcgctgcaggtggtatccgtatccagggctccaaagttgctgccacccaacaggcaaatatccaagctgcaggatttttacctgcaccagccgcagaggaactgcaagaaggtcgacttcaatcagccattgacatcagcggtgtatttgatacttttgaatatggtcagcaaggcagcgataaatacggctatgccattttcagcaggccatctgaaatttcaggaaaaacaggtgttaccctctctgcaccaaatgccaatgagaacagccgcatcagtctgagtgcggcaaacatcgaagctgaaaacggcaaaatcaaaattcaatcttacggtgaccaatattactatgcgagacagagcgaactctatacctttgaacgccgcagctacaaaaccggcaaatggtacaaccgcaaacacattaccgaagtcaaagaacacaaaaacgccaagcccgacgcagtaaacctcagcgcatcccaaggcatcgacatcaaatctggtggcagcatcgacgcctacgccaccgcattcgatgcccccaaaggcagcattaacatcgaagccgggcggaaattgacactctatgccgtagaagagctcaactacgacaaactagacagccaaaaaaggcgcagatttctcggcatcagctacagcaaagcacacgacaccaccacccaagtcatgaaaaccgcgctgccctcaagggtagttgcagaatcagccaacctccaatcgggctgggataccaaactgcaaggcacacagtttgaaaccacactgggtggcgcaaccatacgcgcaggcgtaggtgagcaggcacgggcagatgccaagattatcctcgaaggcatcaaaaccacgatccacaacgaaaccgtgagcagcagcaaatctgctctatggcaaaaacaggcaggacggggcagtaacatcgaaaccttgcaattgccgagtttcaccggtcccgttgcgcccgtactgtccgcacccggcggttacattgtcgatattcccaaaggcaatctgaaaacccaaatcgaaaccctcaccaaacagcccgagtatgcttatttaaaacagcttcaagttgcgaaaaacatcaactggaatcaggtgcagcttgcttacgataaatgggactacaaacaggagggcttaaccgaagcaggtgcggcgattatcgcactggccgttaccgtggtcacctcaggcgcaggaaccggagccgtattgggattaaacggtgcggccgccgccgcaaccgatgcagcatttgcctctttggccagccaggcttccgtatcgttcatcaacaacaaaggcgatgtcggcaaaaccctgaaagagctgggcagaagcagcacggtgaaaaatctggtggttgccgccgctaccgcaggcgtagccgacaaaatcggcgcttcggcactgaacaatgtcagcgataagcagtggatcaacaacctgaccgtcaacctggccaatgcgggcagtgccgcactgattaataccgctgtcaacggcggcagcctgaaagacaatctggaagcgaatatccttgctgctttggtgaatactgcgcatggagaggcagccagtaaaatcaaacaattggatcagcactacattgcccataagattgcccatgccgtagcgggctgtgcggcagcggcggcgaataagggcaagtgtcaagatggcgcgataggcgctgcagtcggtgagattgttggtgaggctttggttaagaatactgatttcagtcgtatgagtgcgaccgaaatcgaaaaagctaaagcgaagattactgcctattcgaaactagcggctggcactgcgactgccgttgcaggcggggatgtgaatgctgcggcaaatgcagcacagatagcggtggagaataatactttgtatcctaaatgcattggtgcaaagtgtgatgaatttcaaaaggaacaacaaaaatggatacgtgaaaatcctgaagaatatcgagaagttttgcttcttcagacaggatttattccaattatcggtgatatacagagttttgtacaagcacagaccgctgccgatcacctgtttgctttgctgggtgtggttccgggtatcggtgaatcgatacaggcctataaagtagcgaaagcggcaaaaaatttacaaggcatgaaaaaagccttggacaaggcagcaaccgttgccactgcacagggctatgtcagtaaaaccaaaatcaaaatcggtcaaactgaattaagggttactgcagcaactgacaaacaattgctgaaagctattggcgaaggaagggacacgacaggtaaaatgaccgagcagttatttgactctttagctaaacaaaatggcttcagagtgctttcgggcggcaaatacggcggaaataacggttttgatcatgtatggcaggctgccgatggtagtgtcgttttgattgtagaaagtaagcagattaggaacggtacggtacagctgaatccgaatggtgcgggtggatatacgcagatgagtgaggattggattaaacaagttgcaaatagcttacctgatggtagtcctgctaaagctgctgtcttcaaagcagagcgggaaggcaaattaaaaacagcaatagcaggcgttgatcgtcaaacaggtaaggccgttattctttctgtcaaagttccttctaaaaccaatataaggagataa

SEQ ID NO: 40450 - DNA, 1101 bp, Neisseria meningitidis
atgattactctgaaaaccaccccatttcatcaagcccatcaagatgcaggcgcgaagctggtagattttgccggctgggagctgcccatccattatggttcgcaaatcgccgaacacgaagccgtgcgcaccgacgcaggtatgtttgacgtatcccatatgcttgttaccgacgtagcaggcgcaaatgccaaagcctttttccgcaaattgattgccaacgatgtcgccaagctcgcttttgtcggcaaagccctttattccgctttgctcaacgacaacggcggcgtgattgacgacttaatcgtttaccgcaccaacgaagccgaaacccaataccgcatcgtgtccaacggcgcgactcgcgaaaaagatacggcacaattccacaaagtcggacaagagttcggtgtttccttcaatccgcgctacgacctcggcatgctcgccgtacaaggccctaaagccattgaaaaactcctgaccgtcaaacccgaatgggcagatgtcgtccataacctcaaaccgttccaaggcgcggatttgggcaacgactggtttgtcgcccgcaccggctacaccggcgaagacggcgtcgaagtcatcctgcccggtaccgaagccgtcgcattcttcaaagccctgcaacaagccggcgtacaaccctgcggcctcggcgcgcgcgataccctgcgcatggaagccggtatgaacctctacggcaacgatatggacgacgacaccagcccgctcgaagcaggcatgggttggacggttgatttgaaagacgaaagccgcgattttgtcggtaaagccgccttgctggcattgaaagaaaaaggcgttgccgtcaaacaagtcggtctgttgctcgacaaaggcggcatcctgcgcgcgcatatggaagtgttgaccgacaaaggcaaaggcgaaaccaccagcggcgtattctctccaagtctgaaacaatccatcgccatcgcccgcgtaccgaaagattttgacggcgataccgccaaagtgctgattcgcggcaaggaagcggacgtgcgcgtactgaagctgccgtttgtgcgcaacggacagaaacagtttgattga

SEQ ID NO: 40451 - DNA, 546 bp, Neisseria meningitidis
atgaaacactatgccttactcatcagctttctggctctctccgcgtgttcccaaggttctgaggacctaaacgaatggatggcacaaacgcgacgcgaagccaaagcagaaatcatacctttccaagcacctaccctgccggttgcgccggtatacagcccgccgcagcttacaggaccgaacgcattcgacttccgccgcatggaaaccgacaaaaaaggggaaaatgcccccgacaccaagcgtattaaagaaacgctggaaaaattcagtttggaaaatatgcgttatgtcggcattttgaagtccggacagaaagtctccggcttcatcgaggctgaaggttatgtctacactgtcggtgtcggcaactatttgggacaaaactacggtagaatcgaaagcattaccgacgacagcatcgtcctgaacgagctaatagaagacagcacgggcaactgggtttcccgtaaagcagaactgctgttgaattcttccgacaaaaacaccgaacaagcggcagcacctgccgcagaacaaaattaa

SEQ ID NO: 40452 - DNA, 876 bp, Neisseria meningitidis
atggcagtaggaaaagagattctcaccaaaatccgcagtgttcagaatacccaaaagatcactaaagcgatgcagatggtgtcaacctctaaaatgcggaagactcaggaacggatgcgtttggcgcgtccgtatgccgaaaaagtgcgtatggtgatgagccatcttgcgcaaaccaataccgatcatggtattccgttactggaatctcatcgggaaatcagacgtgtcggttttattttgattacgtctgataagggtttgtgtggcggtttgaacgccaacgtgctgaaaaagtttttggcacaagttcaagagtatcggaatcaaggtattgaagaggaaatcgtatgccttggcagtaaaggtctgatggcgtgtcagagcattggtctgaatgtggttgccagtgccgtaaatttgggcgataccccaaaaatggaaatgctgctcggacctttgacagaactcttccaacggtatgagaaacatgaaattgacagaatccatctggtgtattcgggttttgtcaataccatgcgtcaagaaccgagaatggaagtattgctgcctatcggtgagaacgtgattggcgattcagctcccaaatcaccgttcagctgggaataccgctacgaaccgactgcacttgcagtgttggaatatctggttcgccgctatttagagtctgtggtttatcaggcgttgagcgacaatatggcatccgaacaggcagcccgcatggttgccatgaaagctgcaacagacaatgcaggcaatgccatcaaagagttgcgtttggtatataacaaatcgcgtcaagctgcgattaccacggaattgtcagaaattgtagcaggtgcggcggctgtctga

SEQ ID NO: 40453 - DNA, 375 bp, Neisseria meningitidis
atgattattcaaaatgaatttaatttatatcctagtaatatgcttcctgaagggttttgttatcctgaaaagtatgttcgtatctctaacgatacatctttaataccttatattcagccacataattttcactggtggtttgagaattatggaacagaaggggcagaagtagcttatatatttagaaattctatcctgcctgatttaaatcttatcccattcgctagtaatggagaatgggaagcttattttgatggtaatgatgtaacaggaaatcctagggttattgtcattaatttagataatatagaaaaccatgaattttttaatagttttgaagagtggcttgaattagcaattaaggatacttggtaa

SEQ ID NO: 40454 - DNA, 645 bp, Neisseria meningitidis; identical to SEQ ID NO: 38405

SEQ ID NO: 40455 - DNA, 519 bp, Neisseria meningitidis
atgcccaagctccatatgttttacctcggcggcaatgccggcaggtcgaatatcgaagtgcacgacatccaatttgccgtgtgcgacgactaccgcgaggccgtccccgcgctcaaagccgcgtggttcggcgatgcggacaaaatccacatcgacggctggcagattgtcgaatgggcggacggttacgacatcgccgtatccgaaacgcccaaaacgaaaatgccgtctgaacacgccccgcgcctgtatttcgccaatgtcggcggttatcgcgcgggtcagcttgccgaggcacacgctttcgggctgttcgccgccgccacgcctgccgaagccaaacaaaaagccctgcaaaccctgttgaccgacagctatgttcagcagcataaagacaacttaaaagacgtggacaacctgcttgcgctcgaccgcatcggcaatttccatatccgcctgaccccgaatccgcacggcaaacccgccgaaatcggctttcaaggctatttgcccatttga

SEQ ID NO: 40456 - DNA, 690 bp, Neisseria meningitidis; identical to SEQ ID NO: 39729

SEQ ID NO: 40457 - DNA, 1104 bp, Neisseria meningitidis
atgaatacgacagcaaacccttccaatatcatcgtcgggctctccggcggtgtcgattcttccgtaaccgccgccctgctcaagcagcagggttatcaagtgcgcggtgtgttcatgcagaactgggaagacgacgacaacgacgaatattgcagcatcaaacaggattcgtttgatgccatcgccgttgccgatattgtcggcatcgacatcgacatcgttaatttcgccgcgcaatataaagacaaagtctttgcttattttcttcaggaatacagtgcggggcgcacgccgaatcccgatgtgttgtgcaacgccgaaatcaaattcaaatgctttttggattacgccgtagggcagggcgcggataccatcgccaccggacactatgcgcgcaaagaagtccgcaacggcgtgcattacctgctcaaaggtttggatcgaaacaaagaccaaagctatttcctctaccgcctcaagcctttccaactcgagcgcgcgatttttccgttgggcggtttggaaaaacccgaagtccgccgccttgccgccgagttcaaactgccgactgccgccaaaaaagacagcacgggcatctgcttcatcggcgaacgcccgtttcgcgagtttctgcaaaaatacctgccgaccgacaacggtaaaatggttacgcccgaagggaaaaccgtcggcgaacacgtcgggctgatgttctacacgctcggacagcgcaaaggtttgggcattggcggcgcgggcgaaccgtggtttgttgcggctaaagatttgacgaaaaacgaactgattgtcgtgcaaggacacgaccatccgctgctctatacccgcagccttgtgatgaacgatttgagtttcacgctgcccgaacgcccgaaggcaggacgctatacctgcaaaacgcgttaccgtatggcggacgcgccttgtgagttgcgctatttggatgatgaaaccgccgagctggtgtttgacgaaccgcaatgggcggttacgccgggccagtctgccgtgctgtacgacggcgacatctgtttgggcggcggtatcatccaaacgaccgacaaacccgtcatcatcacacgataa

SEQ ID NO: 40458 - DNA, 1194 bp, Neisseria meningitidis
ttgttaatccactatatacaggcagcattcaaagccgaaaaaaacgccgtcaaatatatggattggcacgaacgtttccccgaattggaagcgcaactgggtgcgccgattgaggattacgcgccgccgaaacattggacgcgcaagcagctcagaagtatggggcgtgtgtcgtatttgtgcgtcgatgcggcggagcaggctttgacggatgccggtttgctcggagacgaaagcattactgacggacgcatgggcgttgcctgcggctcttccagcggcagcaccaaagacatcggcgatgtaggcgaattgttgctgaccggcatgtcgcgcaacttcagtgccaacacctatgtgcgtatgatgccgcacaccgccgccgccaatatcggcatctttttcgggctgaaaggacgcatcatcccgacatcgagcgcgtgttcgtccggcagccaaggcataggttatgcctacgaagccatcaaatacggtctgaccgatatgatgctggcgggcggaggcgaagaatttttcccgtccgaagtgtatgttttcgactcgctttatgccgccagccgccgcaacggcgaaccggaaaaaaccccgcgcccatacgacgcgaaccgcgacgggctggtcatcggcgaaggcgcggggattttcgtgctggaagaattggaacacgccaaacggcgcggtgcgaaaatttacgccgaactcgtcggctacggagccaacagcgatgcctaccatatttccacgccccgccccgacgcgtaaggcgcaatccttgcctttcagacggcattgcaacacgcaggtcttgcgcccgaagacatcggctggattaatctgcacggcaccgggacgcaccacaacgacaatatggaaagccgcgccgttgcagcggttttcggcaacaatacgccctgcacgtccaccaagccgcaaaccggacacacgctgggcgcggcggacgcaatcgaagccgcgttcgcgtggggcattgccgaccggcaaagcaatcccgaaggaaaacttccgccccggctttgggacgggcagaacgaccccaacctgcccgccatcaacctgaccggcagcggcagccgctgggaaaccgaaaaacgcattgccgccagctcatcgtttgccttcgggggaagcaactgcgtcttaatcatcggatga

SEQ ID NO: 40459 - DNA, 1620 bp, Neisseria meningitidis
atggacaatctcgtatgggacggcgttcccgacatccgcacactcgaccaaaccatccgcaaacacgcacacccgctcaacctgattgtctgcctccccgataatcagattcccgattttcaaaccgcacaagatgcttcggacgcggaatgccgtctgaagcaccgtttggatcaggcaacgcagtgcctccagttcgacagcatcaacctcatcgaacacatcctgcccgatgtccgcttctggctggttcccccttcacgcacccgcagcctgcacgaacacttccaccacatttcctggcagaccgaagccatcccgcaaaccgaaagcaaacccgacaaaccctggtttgcacttccacaaacagccgaacggcaaaaaccggaacacatcctcgttatcggcgcgggcatatccggcgcggcaaccgcccacgccttagcatcacacggcatttccgttaccgtattggaagcccgaaaagccgcccaagccgccagcggcaaccgccaagggctgctctacgccaaaatctcgccgcacgacaccgaacaaaccgaactgctgcttgccggctacggctacaccaaacgcctgctcggacacatcctgcccgaatccgaaacctggggcggcaacggcatcatccacctcaattacagccgcaccgaacaacaacgcaatcacgaattgggtttgcaaaaacaccataaccacctctaccgcagcatcacgcaggcagaagccgaaaaaatcgccggtatcccactgtccgtcccatacgaccacccttcatgcggactctactggcaacacggcgtatggctcaatccacccgcattcgtccgcaccctcctcaaccatccgctcattggactacacgaagacacaccgttaaccgacatttcccacgacggggaaaagtggattgcaagcacgccaaacggcacatttaccgccacacacatcatctactgcaccggtgcgaacagcccctacctacccgaaaccaacctcgccgccctgcctctcaggcaaatacgcggacaaaccggcctcacaccgtccaccccgttttccgaacaactgcgttgcgccgtttcaggcgaaagctacatcagcccgtcgtggcacggactgcactgctacggcgcgagttttattcccaacagcagccataccggatggaacgaagccgaagaagcctcaaaccgccaagcattggcacaccttaaccccgccctttccgaatcattgtttgccgccaacccaaacccccaaaaacaccaagggcacgccgccatacgctgcgacagccccgaccaccttcccctagtcggcgcactcggcgacattgccgccatgcggcagacctacaccaaactcgcgctggacaaaaactaccgcatcgacaccccatgcccatacctgcctaatgcctacgtcaacaccgcgcacggcacccgcggactcgccaccgcccccatctgcgccgccgccattgcagcccaaatcctaggcttgccccatcccttttcacaacgcctgcgccacgccctacaccccaaccgcaccatcatccgcgccatcgtcagaaggaaggatctaaccccttaa

SEQ ID NO: 40460 - DNA, 1443 bp, Neisseria meningitidis
atgaaacaattggccatgtacatcaacggacgctttgaaaacgatttcaacggcgaatggcgcgacgtattgaacccgtccaccgaagaggccatcgcccgcgaacccaaaggcggcagggcggacgttgaccgcgccgtagcggcggcgcgtgcggcgcaaccggcttgggagcgtctgcctgcggtcgaacgcggcgcgtatttgcgcaaaatcgcccaaggcatacgcgaacgcgccgacgagctgaccgacaccatcgttgccgaaggcggcaaaaccaaagacttggcgcgcgtggaagtcatgtttaccgccgactatctcgattaccaagccgaatgggcgcgtcgttacgaaggcgaaatcatccaaagcgaccgcccgcgcgaaaatattttattgttcaaacgtccgctgggcgtaatcgccggcattttgccgtggaacttccccttcttcctgattgcccgcaaaatgggccccgctttggtaacgggcaacaccatcgtcgtcaaacccagcagcgtaaccccgatcaactgccacatcttcgccgaaatcgtcgatgcggtcggactgccagcaggcgtgttcaacgttgtgaacggtccgggtgcggaaatcggcaatgccttgtccgcccatccgcaagtcgatatggtcagcctgaccggctccgttgaagcgggccgccaagtgatggaagccgcttctgccaacatcaccaaagtctcgctggaactcggcggcaaagcacctgctatcgttttgaaagacgcggatttggacttggcagtgaaatccatcttggcttcgcgcgtcggcaacactggtcaaatctgcaactgcgccgagcgcgtttatgtccacagcagtctgaaagacgcgtttatcgaaaaaatgaccgccgccatgaaaggcgtacgctacggcaaccctgccgaagccgaagcaggcgcgctggaaatgggcccgctgattgaagagcgcgccgtcaaagccgttgccgaaaaagtggaacgggcagtcaaacaaggtgcgaaattggtttgcggcggcaaacgcgccgaaggacgcggttatttcttcgagcctaccctgctgaccgacaccgacaacagtatggacattatgaaagaagaaaccttcggccccgtgctgcccgtttccgctttcgacacgctcgaccaggtcatcgccttggcaaatgactgcgaattcggtctgaccagctctgtgtacaccaccaacctgaacgaagccttctacgttacccgccgcctgcaattcggcgaaacctacatcaaccgcgaaaactttgaagcgatgcagggtttccacgccggttggaaaaaatccggtatcggcggcgcggacggcaaacacggtttggaagaatatctgcaaacccaagtcgtttatttggaaaccgacatttaa

SEQ ID NO: 40461 - DNA, 561 bp, Neisseria meningitidis
atgaaaacagcacaagaactgcgcgccggcaatgtatttatggtcggcaacgatcctatggtcgttcaaaaaaccgaatacatcaaaggcggccgctcttccgccaaagtcagcatgaaactgaaaaacctgctgaccggcgcggcttccgaaaccatttacaaagccgacgacaaattcgacgtggtcatcctgtcccgcaaaaactgtacgtacagctactttgccgatccgatgtacgtctttatggacgaagaattcaaccaatacgaaatcgaagccgacaacatcggcgacgcgttgaaattcatcgttgacggtatggaagaccaatgcgaagttaccttctacgaaggcaaccccatctccgtagaactgcccaccatcatcgtacgcgaagtcgagtataccgagcctgccgtcaaaggcgatacttcaggcaaagtgatgaaaaccgcgcgcctggtcgggggcaccgaaatccaagtgatgtcttacatcgaaaacggcgacaaaatcgaaatcgatacccgcaccggcgaattccgcaaacgcgcttga

SEQ ID NO: 40462 - DNA, 1914 bp, Neisseria meningitidis
atgttgaacattaccttgccggacggctcagtccgccaatacgaatcccccgttaccgtggctcaaattgctgcgtctatcggtgccggtttggcgaaggcggcggtggcaggcagggtaaacggcaaattggtcgatgcgtgcgatccgattaccgaagattcaagcgtccaaatcattactccgaaagatcaggaaggcatcgaaatcatccgccattcctgcgcgcatcttgtcggacatgccgtcaagcaactctatcctaatgcaaaaatggttatcggccccgtcattgaagagggcttttattacgacatcgccacggaaaaaccgtttacaccggaagatgttgccgccattgaagcgcgtatgaaagaattgattgcccaagactatgatgtggtcaaaatcatgactccacgtgcggaggcgattaaaatttttcaagagcgcggcgaagaatacaaactgcgcctgattgacgatatgcccaaagtggaagcgatggggatgtatcatcaccaggaatatgtcgatatgtgccgcggcccgcacgttccgaatacccgtttcctgaaaaacttcaaactgaccaagttggcgggcgcatactggcgcggcgacagcaacaatgaaatgctgcaacgcatatacggtacggcttgggcgacaaaagacgagttgaaagcctatattcaacgtatcgaagaagccgaaaagcgcgaccaccgcaaacttggcaagcaattggatctgttccatctgcaagacgaagcaccgggcatggtgttctggcatcctaaaggctgggctttgtggcaagtgattgaacagcatatgcgtaaagagttgaatgctgccggttataaagaggtaaaaacgcctcagattatggataaaaccttctgggaaaaatccggccactgggaaaactataaagacaatatgttcgtgaccagttcagaaaaacgcgaatacgcggtgaaaccgatgaactgtccgggtcatgtgcaaatttttaataacggtttgcgctcatatcgcgatttgccgatgcgtttggccgagttcggttcttgccaccgcaatgaaccaagcggtgcattgcatggtctgatgcgtgttcgcggttttgtgcaagatgatgcgcatattttctgtaccgaagaccaaatcgtcagcgaagcgcgcgcattcaatgaattgttggttcgcatctacaaacagttcggtttccatgatgttgctgtgaagttgtccctccgccctgaacaacgtgcaggttctgacgaagtttgggataaggccgaacaaggcttgcgtgatgcattgaccgcttgtggcgtagagtgggaagagttgcctggcgaaggtgcgttttacgggcctaaaatcgaatatcacgtcaaagatgccttgggtcgttcttggcaatgcggtacattgcaactagatttcgtcttaccggaacgcttggatgcagaatatgtaaccgaaaacaatgaccgcgcccgccctgtaatgttgcaccgcgccattttgggttctttggagcggtttatcggcattctgattgagaaccatgcaggctctttcccgttatggctggctccggttcaattggtaattatgaatattaccgaaaatcaggcagattattgtcgggaagtggctgccaaattgcaggcggcaggattccgcgccgagttggatttgcgtaacgaaaaaatcggttacaaaatccgcgacaacagccaataccgtttcccttatcaaatcgttgtcggcgataaggagaagcaggaaaacaaagtggcggtacgccgcaaagcagaagatttgggttctttggatttggatgatttcattgcgcaattgcagcaagaaatcactgatgccctcgtcaatcattaa
